United States Patent Application Publication US 2011/0183924 A1 - sequence listing, part 244

SEQ ID NO: 678060 - DNA, 963 bp, Homo sapiens
tttgatgttagttgtggtgtgcgctgtcactctatgtgattatcctagatgacatatactagggttccgtcgccgaatttggggcctatgtactcattattcgccgccaatgcgtgtatcccatcggggatttgaaaagccatgtcgggatcagacgtgttgcttgcgcttgaacatgttgcaccggggataaaccggaatgtggggagcactggtgtaaccacgacgccagtctttgagaacccttctatctttccttggggctgctgggctcctccatccgctcctttttggtttgctcctgcgtttcgaggagctttgctggtgcgtgctgttgtttcgagcttcacttggagagtatttcttgtgtatcacatgtaagccccctcgcttccccagccagagatatggggggaaaataatcaactgtccgctcgtttaaaccgacaaacccatcggaccaaacaacttgaaaagttaggttctcaaagtcttttcgtctattcagctcgctcccccaaacaggcatcgttacactaactaaatacattgctccccaatcttcccccaattagtcaaaaataatgctttctgtaacaacctctaaagaagactaaatatagtgtccactccaaatgaaaatctcacagcgattcttttcaaccacaagcgcctcacatgatgattgacccatttccacctcccacctgttcggagagacccaagccaccccattttccagaaaaggaatagtctattatgagcgaataaatttcctacacaaggacattgccgaacagacccaacacaacatccccatcattcaactgacggaactaattattatcacgccgctcttcccacttttcttccataaaaacacacacactccgcttttttttaaaaagtaaaaaaggtttttttttttggggaaatttaaaacttaaatcccccccaaaaaaa

SEQ ID NO: 678061 - DNA, 424 bp, Homo sapiens
gcactagctatcaaactgagcgctttcttgataactacttatagattccccgattttgaaatggcatagcgcacggttcaccctatcatgtcaggtgtgctggctgttctctcccagtactggccggcgtttcacaaaagactcacacccgaataagaagcctttttggtgttgtgtccaggtgggcagaagtcacttgatccaactacagagatattgttgttatgaaggtagacaacctggatgtacttatgctctgccagcccaccaggtactctggtaagcttgttgttgtcccagtaaagctccctcagatgaggcgtgtaggccagagagccattgtcaacagcagagatgctgttgaaactcaatcccaacttagccaaaattattcagtcctttcaggctagctgcatcaactctg

SEQ ID NO: 678062 - DNA, 459 bp, Homo sapiens
  misc_feature (24)..(24): n is a, c, g, or t
  misc_feature (27)..(27): n is a, c, g, or t
  misc_feature (30)..(30): n is a, c, g, or t
  misc_feature (33)..(33): n is a, c, g, or t
  misc_feature (35)..(35): n is a, c, g, or t
  misc_feature (37)..(38): n is a, c, g, or t
  misc_feature (55)..(55): n is a, c, g, or t
  misc_feature (58)..(60): n is a, c, g, or t
  misc_feature (80)..(80): n is a, c, g, or t
  misc_feature (100)..(100): n is a, c, g, or t
  misc_feature (105)..(105): n is a, c, g, or t
  misc_feature (116)..(116): n is a, c, g, or t
  misc_feature (119)..(119): n is a, c, g, or t
  misc_feature (136)..(136): n is a, c, g, or t
  misc_feature (154)..(154): n is a, c, g, or t
  misc_feature (157)..(157): n is a, c, g, or t
  misc_feature (160)..(160): n is a, c, g, or t
  misc_feature (163)..(163): n is a, c, g, or t
  misc_feature (187)..(187): n is a, c, g, or t
  misc_feature (195)..(195): n is a, c, g, or t
  misc_feature (203)..(204): n is a, c, g, or t
  misc_feature (208)..(208): n is a, c, g, or t
  misc_feature (229)..(229): n is a, c, g, or t
  misc_feature (243)..(243): n is a, c, g, or t
  misc_feature (249)..(249): n is a, c, g, or t
  misc_feature (266)..(266): n is a, c, g, or t
  misc_feature (292)..(293): n is a, c, g, or t
  misc_feature (305)..(305): n is a, c, g, or t
  misc_feature (310)..(310): n is a, c, g, or t
  misc_feature (314)..(314): n is a, c, g, or t
  misc_feature (323)..(323): n is a, c, g, or t
  misc_feature (325)..(325): n is a, c, g, or t
  misc_feature (329)..(329): n is a, c, g, or t
  misc_feature (331)..(331): n is a, c, g, or t
  misc_feature (333)..(333): n is a, c, g, or t
  misc_feature (341)..(341): n is a, c, g, or t
  misc_feature (377)..(377): n is a, c, g, or t
  misc_feature (380)..(380): n is a, c, g, or t
  misc_feature (453)..(453): n is a, c, g, or t
tctccatggaggccgtagaggaancgntgntgntngnngaactcaatcctggtcnccnnnactagtttgattggaagtcnagctgtgaaacttggagcgntgccntcttcctagangtntccttgtttgcttggtntcaaggacactgtatcgncanacngancctctggtccgttggtggagtagntcattccnataaggtnntgantcttaaagtcgaagtagcaanaatgagacgaaagngctggncagcccaaaagagaagncgctggactgttgtcagattgtttgnnggctggcctttngcccntggncttccccancnagcngnangctctggncacgctaccactcctcaagtgcccgatgtttcttgnctngttcttgctacgggactcaacgatgggcagatcaagatctgggaggtgcagacagggctcctgcttttgaatntttccg

SEQ ID NO: 678063 - DNA, 223 bp, Homo sapiens
actccgttcgcaccggctaccgagtcttgtagcacaactccacggccgtctgcacggaccttgtcaagcgcgtcacagagcgccttggtgctgtatcgctgaagctttgagtatatgataccactggtgaatcacgagttgaactatagaagtctgtacttggtcaagatgttctcattatacagacactacccagtagatgtgtacagctgtgatgcatatc

SEQ ID NO: 678064 - DNA, 823 bp, Homo sapiens
  misc_feature (8)..(9): n is a, c, g, or t
  misc_feature (15)..(15): n is a, c, g, or t
  misc_feature (41)..(41): n is a, c, g, or t
  misc_feature (43)..(43): n is a, c, g, or t
  misc_feature (55)..(55): n is a, c, g, or t
  misc_feature (60)..(60): n is a, c, g, or t
  misc_feature (63)..(64): n is a, c, g, or t
  misc_feature (66)..(66): n is a, c, g, or t
  misc_feature (77)..(77): n is a, c, g, or t
  misc_feature (97)..(97): n is a, c, g, or t
  misc_feature (109)..(109): n is a, c, g, or t
  misc_feature (134)..(134): n is a, c, g, or t
  misc_feature (190)..(190): n is a, c, g, or t
  misc_feature (192)..(192): n is a, c, g, or t
  misc_feature (224)..(224): n is a, c, g, or t
  misc_feature (232)..(232): n is a, c, g, or t
  misc_feature (244)..(244): n is a, c, g, or t
  misc_feature (261)..(261): n is a, c, g, or t
  misc_feature (265)..(265): n is a, c, g, or t
  misc_feature (301)..(301): n is a, c, g, or t
  misc_feature (317)..(317): n is a, c, g, or t
  misc_feature (331)..(331): n is a, c, g, or t
  misc_feature (338)..(338): n is a, c, g, or t
  misc_feature (365)..(365): n is a, c, g, or t
  misc_feature (370)..(370): n is a, c, g, or t
  misc_feature (378)..(379): n is a, c, g, or t
  misc_feature (385)..(385): n is a, c, g, or t
  misc_feature (399)..(399): n is a, c, g, or t
  misc_feature (404)..(404): n is a, c, g, or t
  misc_feature (409)..(409): n is a, c, g, or t
  misc_feature (456)..(456): n is a, c, g, or t
  misc_feature (460)..(460): n is a, c, g, or t
  misc_feature (472)..(472): n is a, c, g, or t
  misc_feature (507)..(507): n is a, c, g, or t
  misc_feature (563)..(563): n is a, c, g, or t
  misc_feature (572)..(572): n is a, c, g, or t
  misc_feature (600)..(600): n is a, c, g, or t
  misc_feature (626)..(626): n is a, c, g, or t
  misc_feature (636)..(636): n is a, c, g, or t
  misc_feature (641)..(641): n is a, c, g, or t
  misc_feature (657)..(657): n is a, c, g, or t
  misc_feature (706)..(706): n is a, c, g, or t
  misc_feature (713)..(713): n is a, c, g, or t
  misc_feature (720)..(720): n is a, c, g, or t
  misc_feature (731)..(731): n is a, c, g, or t
  misc_feature (815)..(815): n is a, c, g, or t
taccagtnnagaaanttatttgaattcaaaaaaaaatggcnanatttaaaaaaanaaaanaannanccaaagcaaanatcaccattggccccgaaangcgtctaaagangtcattcttaagtcaaaaaaaacgnagtaagaatgtacaagaaagaaaaaaaaaaaaaaacaagtctgccgagtggcgggngngggggagggaaatcccaccaaattgggacggngtccaaanagaaaacatgcngcaacagtccccccgcnttancagccccccggaaaaaaaaccagtaaccccgggagngcagtaaccatttggntaacaggacaaacntcccganggacacagaaagtaattcaccgcattnccccnccccaacnncccccnccacaccaattccntttcnttccnttaagagggggttcaccccgttgacaaaagatttgggtttatttgtnaagnaaagcagaaaanatcccgattgaagtattcaatgatttagttgaggntgcttggggatcaaactttgtaaaaaggtcaattaagctagttagcagagactatnagtggcttncagaaaaaaaattcggataatatgtttnttaaaaagacaaaaagaataagcggngaaaaatccnagggnttactgtgacctaganaatcaaaagcagaaaggtgaccttttgattaaatccatttacttgtggngtgagcnaaaaggnggctccaaganagagtttggttcccaacagtgtccgtggccaaagggcacactcagaaggtctcctcctctcgtaggaactggaacacggatganaagtcttt

SEQ ID NO: 678065 - DNA, 418 bp, Homo sapiens
agcaatctctacctttacttctggcgtcggatgacactgagccgtctcggaagcacggctctcccttggctacttactgcgcagggcccaggacaccgccgtcggggctgaagatgctagccggtgcacacttctcacccttgtgttcccggtgagcctcgtatgcccttagagaccaggtttgccttgggtcctgcatggtccgggaaagactgcgaaacccggcctggcctcaggtcccggcacgctcaggacggatccgtcctgctccaacttctccctttgaccccggcagcccaggcacgccatgattccccttaagtcccggcaggccgggagggtccctgtggcccatcagcgcttcgggctgttgaccagaagtgccccccggagccttccatgtcatcaaatccagcgg

SEQ ID NO: 678066 - DNA, 371 bp, Homo sapiens
actctgaaccatgcggtataggctagtgggatatggaatcccgacgggcaaccaagcatggggtaattcaaccagctggggagcaaacactgatccaacaaaggatatatactcatggctcgcaataagcacaacgcctgtgacatagccaacctggacagcttccccaagatgtgactccagacagccacatccatccagcacttccattactatccaagatggtgcagtgtaacgatgcactttggaagggagtaggagtgctataaaagaagcagatgtggtgatactgagcttgtctgctcagtttccccattagtttgtgcttcacatgatccttcctcctttgcttctctccacccatgaccttt

SEQ ID NO: 678067 - DNA, 407 bp, Homo sapiens
agacgtatacaatcagctcgtaccgaacattcagtgtcacagctattcagtagcactggaggagacgctcagatcacattggtcaaaggcctttcccaaacttaggatctgatgtatctgttccttaaacgcctggcttaataagagagccaggaacaccgtgatagcaggcttatcaaaccgctcacttcctccctgttttccttcgcaggtcccctctccattgttttctcgcccaatccttccctcttgttccctttgtgaaaaagccatgtggaactcactgtgcccctctcccagctgaaaggacatgaacctcctctgacctctttcctccagacacccagctggacagctggtggcagcacgggactgaacctgtttgagtttgtcccctataaaagtcc

SEQ ID NO: 678068 - DNA, 476 bp, Homo sapiens
cccacccaagcttggaggcggggttgtgtttttgggggtccctttttttccagggagttcccttcccgggcctaccagcggccgttggggtgagccccttccccacaccggggtgtttttccggggccttccttggaaacctgccctggcttaggggccctttggccaggttggggccaggtggggtttgccccccttcctgtttagtgttccggggccgtttgggtttgggccgtttagggctttgggttttgttggaaggggttggggggggccaaaccccccttgttgggggctgcagggtggtgttggggtttagcccgttcccgggggatgttttggcctggaggtggggttgggatttgggggctggttccaccctttttttggaggtggcctttgttgtttttcccttgggggggttgggggccccgttgtcttgggaattcggttgttgggcttcgggcttcccttta

SEQ ID NO: 678069 - DNA, 105 bp, Homo sapiens
ttctcaaaagctacaaggaagttcagttaaagattaacagctaaaaatcaaggctgaataatactaggacaagggccaaacaggataccgatggtacccacctgg

SEQ ID NO: 678070 - DNA, 1386 bp, Homo sapiens
  misc_feature (434)..(434): n is a, c, g, or t
  misc_feature (441)..(441): n is a, c, g, or t
  misc_feature (471)..(471): n is a, c, g, or t
  misc_feature (1386)..(1386): n is a, c, g, or t
atgttggcgtggttgttgtatgcattgattggcttgttaagaggtttgttctcgatgcatactactgcactctggagcctggcccactaggtgagatgtcatttatccttcatcgatcaaatcaatcgaccacaccaaatgtctcccgcaagcaggatccgagctctctacaggtggactacgtagtagtctgcgaacacatcgctactctatcgcgctagatttgagacaacctggagaatagtcataagagagtcgaggacaattaggagattccctagtagcacttgggtgcccacactactctctcatccgtgcagcaatatgtatgcgcttgcactactgtgatggctcacctttcgtggattacctcagttgcgtcacaagtgtgtgcgcacccctacgtggggctaggtcgcgcgtgggttccttantgcacantggacagagtatgagtgagctcgttatggnctggggtgaacacgtcgacttccagggctttggccctggacagtggcgtaggtggcccttgctggccagggcagcctgaacgtaaaaaactttggaatgcggatggcctacccgaccaacgccaaagcaccgaattgggccacaaagcacggcgttttcgtacgcaaaggctagcgcttgggcgggctccaattgccacttccgaagggccacggccgtgggttcgccgagggcccccgcctatggtttggggtccggtgggcagtgctttcccccagtgcgctccatctcgattttggggcttaccagggtgcgccctggtccgcgggggggcgttcccgaagattcgggcatctcgagccgatcgttcgcattggccgagtggttggggcgtcgtagtttcccgcattgtgggctccttcgttgcgagttaacacacaccgccccatggactagccaattgcgcacccttgggggaggtactcggcttgcagggtcttttcctcccaaggggaagcacctagtgttgccggcccttgcgcccgcttcgtggcctagggtctcattcgatcgcccggtggggctccccgtgccccccattgtggccctcttttcgcatgcataggggcccacggacaggggccgtttgtggccttcggccgttgtgtgtgtttttgcccccttggttgtgagcctttggcgcccccctatttagggtggtggtggccacggggcacctagggtgagccggagaactcaaacgcgccggcgttggagctatgtgtcccatggggtgtttaccccattgcgacccccgaaggttttggtatggccttcctttcggagtcccccgcgggtctccacgatccccccttgagaggcagaagacccttgttttcccgcgcacactgcgcn

SEQ ID NO: 678071 - DNA, 382 bp, Homo sapiens
gtaaaacaccccgagttgatcctacactcactaggccacatatagtatcgctgtgtttaccaaacagaatagaatttatcacataaagcaaagaatacaagaatatgataaagtaatgaatcgggatgtacaaggttattcttaacgcttattagaaaccactttatttatttattttattttattattatgagatgaagtctcgctctagttacccaggctaggaatgcagtggcacaatctcggatcaatgcaacctccaacctcccgggttacaagcaattctcctgttcaagcaattagcctccccagtagctgggattacaggcgtgcgctgccacaccccgataattatagtattattagtaaagacgaggttcac

SEQ ID NO: 678072 - DNA, 319 bp, Homo sapiens
cacgcgcacagccacgctgcccttggtctcgtggtcaacacttgatcttggtggcgttgtacttctgtgcgatggcatcggccacggcatatcggccccatgaatagtgtgttccagttgtgagagctggcactgttggctttgtcctgggcctccttcttcttcttgtaggacgacgatcccagggcactggcatcctcgctggcttccttcttgatggtagatggtaacacgtggagcatcctgccctggaatacctgcccgtccacctccgagtaggccttcacagcgtgctcagggaacatgaaggtgatgaata

SEQ ID NO: 678073 - DNA, 220 bp, Homo sapiens
  misc_feature (31)..(32): n is a, c, g, or t
  misc_feature (78)..(78): n is a, c, g, or t
tcatgtgctgtggcagcgcaactctccaggnnccacttgttcctcaaagccccttctttggcctaaatcctagaggtngctcatcatcctgcctgagatcagagaccccagctaggtgagcacatgtggtctgtgagctggggtgggacacagagcctcacccagttcagcatgctgtcccccatcgttccatgtgtcatctgaccccgctggcctacca

SEQ ID NO: 678074 - DNA, 199 bp, Homo sapiens
tcatgaccctacagtgggattcatagaggccaccagaaaccaggccttttcttgtccagaagttccaacgcttcagcagcgatagccaccacttacagctcgtccccacacagtgctgccacagcaggctgacgcaggtcctccgcccgagcacctccagcgctgcacgtgcgcacttgcgtctggactgcacgatccg

SEQ ID NO: 678075 - DNA, 121 bp, Homo sapiens
actcatgagatccccaaccccctctcacccacaaaccccctctcacccacaaaccccctctctagtctggcacggtgaagagacatgagagtgttttgtgggtgagagggggtttgtggtc

SEQ ID NO: 678076 - DNA, 240 bp, Homo sapiens
  misc_feature (202)..(202): n is a, c, g, or t
ttctgaatcgacggtttctccatcgtggtcaggctgtttcccaaagtcctgggattacaggcgtgagcaaccgcaagtggtcttgtagtactataaatgggcagtatgtagcgtaacctattcacatcctcccatatactttacttacttattatttattcatttattggcagacagagtctcattctttagcccaggctgnaagtgcaggtgggggcaatcagcggctcacgtgcagcc

SEQ ID NO: 678077 - DNA, 113 bp, Homo sapiens
cttccaaagttaaccactgtcccagctgagaagaggaagccatccgagtgctgtctctctttgatggaatcgctacagggctcctggtgctgaaggacttgggcattcatggt

SEQ ID NO: 678078 - DNA, 245 bp, Homo sapiens
tctagacgactccctgggtgacgtggtgacttactggccctctggacgaagtgtcagccctgcctgaaacagacctgcatagaagttctacgcacgctgtctgcagaagtggctcaggcctggttggccgccagtttgaggagttcctgaaccagagctcgcgcttctacttctggatgaatggtgcaccgcatcgactccctgctgtagaacgaccggcagcaagacgcacatcctggatgtca

SEQ ID NO: 678079 - DNA, 1069 bp, Homo sapiens
  misc_feature (156)..(156): n is a, c, g, or t
  misc_feature (250)..(250): n is a, c, g, or t
ggtagcagaccactaaatctacgagtactatgggaatgaggagaggggaacccccagtgatatgttggtcctagagacctgtctagggcacacagagatgccagaggtctgctctctttgttgcgcccgacaactcactcattgccaggagagccntacatgaatgtcaaccggctgcagtcatcgctcctactcttctgacagggtgagagtggagatgaggtggtgtgcacatatacggacatgaccnctcagtcacagtgtggtagtgagcgcatgggaagaaagagactgtgtgtgagacacacagtgtctgactcagaatagttcaaacaccgaagtaagttggtctatgctatatgtcgctacttcgaagaggtagacaccactgagtcttagagtctcacaccgagagacagagagaatgtctctgtatgcccatacgggaagggacatgtacaattggtatgcgggtgcagtctgtacagccaccttatataaatgctacttcatacaacacgaagagcccgggatgtgatgcatgctctcttcgcgtgtgcaaccatcaagctcgttcgtacatgccgcacaaatattcgcatgcgcaacgccacgacgtgccgcgcaaagaagagatttcccccaaagggggtcgtacatatcggcgctatctctatcggagcgctctcttgggtctccccactactagtggcagccctattgtcctttgcgccgtgcactacccccaaaatgatggggcacgggcacccaacttttcaactgctgaacagagacaccgcatccgtcgcgtgtgtgaggcgaaagcttcattgcgaactttgtggggccgctacgggcggcaccccattatttgaacctccactattatccttcgaaacaataaccgatctagaggggctctctataccgcaacgacggatccgatgagaaagcagccgattgagtagacccccccaaacattatgcggcgggagacgacggttcggtgctgcgagtaatattaaaccacaaaaacaagaatctgagcccccttatcatcacttatatg

SEQ ID NO: 678080 - DNA, 767 bp, Homo sapiens
atctcagcactttgggaggccgaggcaggtggatcacctgaggtcaggagttcaagactagcctggcaacatcatgaaaccccgtctctactaaaaatacaaaaattagccaggcatggtggcacacacctgtagtcccagctactcgggagcccaacgcacgagaaccgcttgtacccaggaggtggaggttgcagtgagccgaagttgcaccattgcactccaccctggggcgacagagcaagattctatcaaaaaaaaaagggcggcgggcaagtaagttatagaagagaaatgctgctagaaggacattaagcgtggtagtaaaccgcgtgctcatcctctaagcttgaagaagggagacgaaaattccattggtttaaatttcacactctcagggagggagaacccgggctgtgtgggtgttgccaatttcctagaacggacatgtgcgggggctatagaaaccgcgactgaataacgcgtgggttttccaaaagtacggggtccctgtgtaaggtcatgcgatgcacgagggacaaaacgattggaccttggggagggcgcttacaccacttgcttgtggcgacaacacccattggcttttggaagggccccaagtggaccacggggcaaagattaccaacctttaataaacacatactctcgctatatcacacacaacacactcttttctgcggcagcccttgcgcccccgcgaaaaaaatttgtttagacacacatctcgttgcgggacgccgggccca

SEQ ID NO: 678081 - DNA, 124 bp, Homo sapiens
tgagatcccccgtcttggcacttgttgacctgcgagtgtactgggctgctggctgaggcttcgggttgggtgtgctgttggcaatctccgtgtcattgtggggccacgatgttatttcctgttg

SEQ ID NO: 678082 - DNA, 1100 bp, Homo sapiens
  misc_feature (541)..(541): n is a, c, g, or t
  misc_feature (671)..(671): n is a, c, g, or t
  misc_feature (778)..(778): n is a, c, g, or t
  misc_feature (799)..(799): n is a, c, g, or t
  misc_feature (806)..(807): n is a, c, g, or t
  misc_feature (831)..(831): n is a, c, g, or t
  misc_feature (855)..(855): n is a, c, g, or t
  misc_feature (858)..(858): n is a, c, g, or t
  misc_feature (880)..(880): n is a, c, g, or t
  misc_feature (882)..(882): n is a, c, g, or t
  misc_feature (959)..(959): n is a, c, g, or t
  misc_feature (966)..(966): n is a, c, g, or t
  misc_feature (969)..(969): n is a, c, g, or t
  misc_feature (976)..(976): n is a, c, g, or t
  misc_feature (984)..(984): n is a, c, g, or t
aaaggtggaagaaggaagatgaagaagagtgtggaggctgacgtgtgagggaggacagtgcgggaggaggtgtgaggaggaggctcccgaggggaaggggcggtgcccacaccggggacaggccgcagtctccattttcttattgcgctgctaccgttgacttccaggcacggtttggaaatattcacatctgcttctgtgtatctcgtttcacattgttgtgctgctattgggggatcagttttttgtttacacaatgtcatatactgccagtgtactagttttagtatttctcttagaacattgtattacagatgccttttttgtagctttgttgtatctttatttatgtgatcaattttggacttaatgtgattactggctctatttccaaaaaggttgctgtttcacaatacctcagtgcttcacttagccagtggtggacccagcgggcaggttctgcctgcttgtggcgggcagacacgcgggcgcgatcccacacaggctggcgggggccggccccgaggccgcgttgcgtganaaccgcgccggtgtccccagagaccaggctgtgtccctcttctctttcccgtggcgcctgtgatgctgggcacttcatctgatcgggggcgtagcatcatagtagttttatacagctggtgttatccttngcgtgtagctttggaagttgcataattattattattacttattataacaaggtgtgtcttacgtgccaccacggcgttgtacctgtaggactctcattcgggatgantgggaatagcttctggaattngtccacnnttggggtatgtcactctgtatgtnctagtgtcctgtcggtcatggttngtnaattacaccataatgctaattnanaagagactccaaatctcaatgaagccagcctcacagtgctgtgtgccccggtacacctagcaagctgccgaaccaanagaattngcncccgtgngggccccntggtggggcctgcctggcaggtgcaaccggtgccggaggccattccgggacagggccacccggccaccttccaaaacggtacgctaactaacacacagttgcgggtttataaaccg

SEQ ID NO: 678083 - DNA, 398 bp, Homo sapiens
  misc_feature (266)..(266): n is a, c, g, or t
  misc_feature (361)..(361): n is a, c, g, or t
ggatcacgaggtcaggagatcgagaccatcctggctaacacggtgaaacccatctctactaaaaatacaaaaaaattagccaggcgtggtggcaagcgcctgtagtcctagctattcaggaggctgaggcaggagaatggcgtgaacccgggaggcagagcttgcagtgagccgagatcgcgccactgcactccagcctgggcgacagagcaagactccgtctcaaaaaacaaaaacaaaaattagccaggcatggtggtgtgcanctgtaatctcagcactttggggaaactgaggcaggaggaggacttgagcccaggaattgaagaccagtttggcagcatagcgagacctttctttncaaaaaattacaaattagccagccacagcgtgcatac

SEQ ID NO: 678084 - DNA, 432 bp, Homo sapiens
ggatctcttccgggatttgtgctccagcagaggttgattcatgaggtttaaggaaagaagccgtctccataacataaaagtacaaggtgaaacaatggcaagggctgatgcagaaggtgcagcaagttacccagaagatctacctaacttcagtgatgaaggtgactacactaacaacaggttttaaatgtagatgaaacagccttttattgaaagatgacatctatgactttcatagccaaaagaagttaatgtctggtttcagaggacagcctgacctgttaggggctaaggcagcttgtaaccttaagttgaagccaatgctcattcatcattccaaaaaaccctagagtccttaagaattatgctaaatctaccctgcctgggcttataataagcctagataagaccacatcggatcacaaccttgtc

SEQ ID NO: 678085 - DNA, 115 bp, Homo sapiens
aaccaatgttaacacattaattgaatgtatatattgctagtcagagcagctgtcaaaatgccagatgcatcatagacctggcaagcacaaatagtattccaatgtgcaatactcc

SEQ ID NO: 678086 - DNA, 838 bp, Homo sapiens
tacatcagcttgagtggaagtcaaagcaagctagttttagaagctatccagaactggtaaaggtaaacctgaatctttttaaaaattgtgataaagtacacgtaacgataaaattcaccattttaaccatttttaagtatacagttcagtgacatttaagtccatccacactgctgtgaaactgaaagctggatcttaatttctagtctctaacactgaactgaaatcaattgactttcatctggaaaaagccccacttcactgtggtctgtcactttgatggtgtcagagggtccaggacctcagtgccagggtgcgaggagagcagtgctgtgcagaggggaggaacctcaccatcacccagtctcctcaccgtcacaccagtctcctcgccagagggtccaggaactcagtaccggggtgcgaggagagcagcgctgtccagcggggacggagtctcaccatcaaccagtctccatcaaccgtcacccagtcagcctcgccagaagggtccaggacctcacagtaccggggaaccgaggagagcagcgcaagcacaaccggcgagacgagtcaacaacagtcacccagagcatacgtcacggacacacaaggctccatcgaccacgagggatccaggacacacaatgccagcagtgcgacgcgaaccaacagactggcaccagagaacagaaccgcaacagcagacaatcacatccagacatcactacaccaggagcacggtacggccagaagacaccagcaagcaagacacaccacatggacacacgaactcactaaagaaggaagcgcaacacacgacggggaaaagaggaca

SEQ ID NO: 678087 - DNA, 689 bp, Homo sapiens
agatcagctgccttctggctgacctgtcctacagacgtcccacagacctggccagaccacctctgcataagccattccttgccatgagactctaatgtggatctccacctgcttctgcttctctgcatgaagcctgtccactacaggttatgacagagagtttctcctgtggagactattccagctactaggctggcatttctgctcagctggcattagcacctgaggcatgagcactcttcccttaaacagctccagagcttgcttcacggcttccaatgggccaacagaagtgtcttactacttaatggccacttatttaacattatcccaagagtaattagagtccaggcgcggcgcctcatgcctgtaatcccagcactttgagaggccgaggtggccggatcacttgaggtcagcagtttgagaccagcctggccaacatgatgagggcacatctttactaagaaacagaatcagcacatgaacgcagaatcagccaggagtgctgtgcgccactatagtccagctactgcgaggctgacgcaggagactgttttggatccagaaggtcgaggttgaagcgagccgagattgcacaactgcactccagcctggctgacagagcaagactctgtccaagactccctataggagttcaattacctgctggccattcgcacgtcgtt

SEQ ID NO: 678088 - DNA, 244 bp, Homo sapiens
agatgacctaagaaaagagataagtaaaacgatgtttgcagaaatggaaatcattggtcagtttactggattgcaccaaactgaatgaggatatcttcatagtggaccagcatgccacggacgagaagtataacttcgagatgctgcagcagcacaccgtgtcccagtgccagaggctcatagcacctcagactctcaacttaactgctgttaatgaagctgttcttataaaaaatctggaaat

SEQ ID NO: 678089 - DNA, 185 bp, Homo sapiens
tcccaggtaggctccaggagaagactagcggggaagctggtagagtgagagtgtgggtgctcatggcatgccctgccctgcccaggccgagcaggagctccgcgtggacccagacagagtttgaccgagcaagcagaagtgacccgtctcttgctaggagggaatcagtagcactcacgtgaacc

SEQ ID NO: 678090 - DNA, 121 bp, Homo sapiens
taaaacgacggccagttgtaaaacgactggccagtgtaacacgacggccagtgtaaaactgacgtgccatgtgtaaacacgacggccatgtgtaaaacggacggcctagtgtacacacgac

SEQ ID NO: 678091 - DNA, 479 bp, Homo sapiens
tcgagagtgataagagaaaaatacagggagatggaatggaaactaccaggaaggccgggcgcggtggctcatgcctgtaatcccaaagtgcaggtgtgagccactgtgcctggcctgttttgctttgttatcatttgtgtgttcactggagtagcacttttaatttccttccagaacttttccttgcattcatagcttggctgtttggtgcaagaggcctagctttgtgtctgtctcagctttccacatgcctttctcactaagcttaatcatttttagtagaggcggggtttcaccgtgttggccaggatggtctcgatcttttgacctcttgatccacccacctgggcctcccaaagtgctgggattacaggcatgagccacccggcctggccttcattttgatatttaaaaaaatgcgtatgcttacttgaatccagaagtgcaagaccagcctggggaacttagaccctgtctct

SEQ ID NO: 678092 - DNA, 849 bp, Homo sapiens
  misc_feature (683)..(683): n is a, c, g, or t
  misc_feature (708)..(708): n is a, c, g, or t
tcgatgccgcgcagctgcaggatggtgtgcgcacggcggcctcgacgagcacggcgaggttgcggcccgcgtcgaccgcgatgacgacctgcgcaccggcatgccgagcacgtcctcatagagcggctcgtagggcaggcgctcgaagtcgcgctccatcgtctccttgcgcacgaggtggacgatgagcttgaggcgcatcttgcggcgcaccgccgtctcgccaaagatggccttgatgtcgagcaggccgatgccgcgcacttcgagcaggttgagcagcagctcggggcagcggccctcgatggcggtctgcgcgatgcggaagaagtccaccgcgtcgtcggcgacgaggccgtggccgcgcgagatcagctccaggccgagctcgctcttgcccaggcccgattcgccggtcagcagcacgcccaggcccaggatgtccatgaacacgccgggcgggtcgtgcggtggcgaacagctgggccaggtagccgcgcaccacgtcgatgacatggccggcggattcggtcgtgcggaacagcgggatctcggcgcggtcgcacatggccaccaggcgcggcggcggcacggtgtcgtcggcgcagatcagcaccggaggctccagcgtgacgatgcgcgagatgcggcggcctggatctcgagctctcctggtgaggtangcgacctcggggggcgagatctgcncccggtaggggtggtgttagtccgggtagccgaacaggtgggcgggcctggcttgcgccggcgggccgtaaagggccggagggggggcgggaccccccgagggcccggggtcaaacctggcgcagggggcaaaggcggaaa

SEQ ID NO: 678093 - DNA, 140 bp, Homo sapiens
gtcattcgtgccgctgagtctttccccagagtgcatgtcattcatgctgttcccattgcctggattcctgctcctctccaccccattcaactgataaactcgtggtttatattttttatttataatattttttttttttt

SEQ ID NO: 678094 - DNA, 1001 bp, Homo sapiens
  misc_feature (439)..(439): n is a, c, g, or t
tgttaaacggtacaaatccagttatatccatctgtttatgacccagtacacaggaggcaaagggtttcacatcataaacttcacttccaacccctgtggaatgtccatttcttgggcttacaggagaagaactagaacgaggaaggccaggcaatgcttaggcaactaaaatgaggtggggggtaatgctaacgtcaccctcacgagggatggccacggggaacggtatatccgcaagcgggtttcctagaaccgtgttaagcgtggaagcctgtgggtgagcaccattttcgtggacgcctcaggccggtgctcgggcttcagtcatctccaccacacaggttacagacagcgcttccgtggatagtcgcccttaggtgtctggcgtggaatataatgagtccgagggaactgtcccgaaacatatatctctttgaanatctcagaacctaaatttctcaacgtgtgttcccactttcaacgtggcgggaagacaccgagtgaatctcgtgaatcgaggcaccttaatctgcggcgttcccctttgccctttcagtgggagtcatcacgagcgcgaatcgacgcaaaatcacgaggggcgtaggtccgtgaaagtgcccgtgaacaccgaggttcgagggaaagagcctatttcccgagggtactcctttaaaccgtcttccccgtgaatgcttttccaacaagtgttccatagaggggcgtgtaacactctgtgatccctaattcaaatacctctctcggggaggtaggggcaacgcatccgcatcgggcacatgatgctagactccccaacgtgggggaaccactcaagttcccatttcccctctttacactccaaggggttcataagaagaatcccagaagcaatttggggcacactccagctacaataaatcaagggcacaagaagccaatcccgtgacatctattaataaccccttttgccaggggaaaccattccagattggggaaaaagtccc

SEQ ID NO: 678095 - DNA, 377 bp, Homo sapiens
  misc_feature (32)..(32): n is a, c, g, or t
  misc_feature (68)..(68): n is a, c, g, or t
  misc_feature (70)..(70): n is a, c, g, or t
  misc_feature (79)..(79): n is a, c, g, or t
  misc_feature (83)..(83): n is a, c, g, or t
  misc_feature (103)..(103): n is a, c, g, or t
  misc_feature (117)..(117): n is a, c, g, or t
  misc_feature (124)..(125): n is a, c, g, or t
  misc_feature (129)..(129): n is a, c, g, or t
  misc_feature (136)..(136): n is a, c, g, or t
  misc_feature (139)..(139): n is a, c, g, or t
  misc_feature (142)..(143): n is a, c, g, or t
  misc_feature (147)..(148): n is a, c, g, or t
  misc_feature (239)..(239): n is a, c, g, or t
  misc_feature (247)..(247): n is a, c, g, or t
  misc_feature (251)..(251): n is a, c, g, or t
  misc_feature (257)..(257): n is a, c, g, or t
  misc_feature (259)..(259): n is a, c, g, or t
  misc_feature (262)..(263): n is a, c, g, or t
  misc_feature (266)..(266): n is a, c, g, or t
  misc_feature (268)..(269): n is a, c, g, or t
  misc_feature (294)..(294): n is a, c, g, or t
  misc_feature (305)..(305): n is a, c, g, or t
  misc_feature (307)..(307): n is a, c, g, or t
  misc_feature (309)..(309): n is a, c, g, or t
  misc_feature (350)..(350): n is a, c, g, or t
attttagatcccgtttaccatgaagtgcaganacagcagatacccagataatacagtcagtgcaaaantnaaatgagtnagtnagctctttgatgaggctggntacactgcaaaatntaaatgnnactngaaaatnganggnnaggnntatttacaaaagtttgtttagtaaagtgacttgaaaaaagttgttaaccacttcccaggaatccctcccctctcccaccaaaacaaacaancaaaaaanaacngcaacntnaannttntnnttttttttgttggttaagttaaaantatgtggtganananagagtgcttgttcctggtttgggttttttggtttttttatnggttgatttttttttttttgttttagt

SEQ ID NO: 678096 - DNA, 263 bp, Homo sapiens
  misc_feature (29)..(29): n is a, c, g, or t
  misc_feature (45)..(45): n is a, c, g, or t
  misc_feature (58)..(58): n is a, c, g, or t
  misc_feature (63)..(63): n is a, c, g, or t
  misc_feature (156)..(156): n is a, c, g, or t
gtgcctatcacagggacccaccgccgtgngctgatgggggccccncacacaggggganctgcnggccggtctggacagatcattcctcactcagttccctggtagcacagactgacagctgctcttgggctatagcttggggccaagatgtctcanaccctagaagcctagggctggtgggagacagccctgttctgggagggggcgttgggtggcctctggtatttatttggcatttataaatatataaactcctttttact

SEQ ID NO: 678097 - DNA, 1426 bp, Homo sapiens
gacagcagatcaggctcggagctccagacgctgggacaggccgccgcagaccacccccggcgcgcgcgggacacgacgtccccccgcatggacccgcccatcaggccggaaacccctgagctgcttctcccggaggccgatgcccaaccgggagcccccaaagactcgcggctcccgggggtcacctgcatactcatccgcctgggacctgggaccccggtgagcctgaccgggagggggttcccagggcgggacctctaggtcaaagagatttagacccgtccagtttgaggtgagctccgggtttcccgatgatgcccgattataactcgcagagccacgattcctgttgtgagtgtgcagaggactggccgccccgagggcctcagaagccagacggcgccacccgggcgcatccgatgtgccagccgccagatcgtggaccaccacaatggaaaaagacgcaaggaaagataggtcgatgtgtagggcatgagatagtcgtcatcgccaagggcacatccatgtggagcgccaaaggaagccgtattggggaggaacgatgcgcgtgaatgggagcgataaggggcatagtggaacaaaaaccgaggtggacgcgagggtactggagcagtataaaggttaaccccacggaacaagttattgcaaggccgacgatgaaggcacggggaggacaacgggaatgtgccacgagcattacatggctacacgccaagggatggtatgccccaccgggtagacccaagtacacaggggcaggggaggctaaacatactgaagaacggcataccgaatgaggaacagacaccgaaacaggaggacaagatagaacacaaagagacaaaaacagcgatccagaagacgacacgcccggtgagcaacgaggcatctcgtctgcacatgtgtaaagcaattcaaccaggtagaacgccacgggcaagaggcgccatcacacagaaggtccgagcgatagacagcagaacaggggacccagacacaaaggttatagagcgaactagccacgcggggggagactatgggcagagcggagcgtgttggctacagtgtcgaaagaggaaacatggcagtcacatgggacactccggcgggtaaggacagcacgggcgctggcgtacaagcgcacacactgcaaagggctagaacatgaaggccaattataaaggacgatcaggagagcgggaaaaataaagatacgacaggaaaacacaagagatgacaacaggaaagaaacatacgagtgacctgattaacaggtgacagagaggatatgacatggggagtacgaaaccagggcaaccggacaataccgaaaatataggaaagaccaaaagagggaaaaagaacggagagaacagcacaaaagaggaaagaatggaggatacag

SEQ ID NO: 678098 - DNA, 187 bp, Homo sapiens
cagtgttgagcctagcatatattcatggacagataagctaccagtcgactcccgaattcttgccaaaacctcgcgatgaagtagtccttctggccagggcgatctgcaaatcatattactatccggtacgtgccatgcctaggactagtggcatcagtataatgattcgtgtgactgaccaaaggaa

SEQ ID NO: 678099 - DNA, 492 bp, Homo sapiens
  misc_feature (2)..(2): n is a, c, g, or t
tnatcgttacccatcaactccttggatatacaattatagatcaccttatttgttgatctcatgtttctatatcagccgtatttcctgtggtatgcgatagttagtcattatgtgtaggcaatgggttgagtgatgtctggatacattctgaaaggggaggggccgagttcgtgactttcacccttcttctgcagaccaagttttgcaaagctagagtggggctgtttgttttcttctcttctcgggaaattgccattggatcagtttgtcttggttaagatctcttgtgggtagctgagcagttgggcttttaaagatgaaagccacatgaaagaagactgttctttcctagtcatacaaatgattatctccatggtcgtataatctccataagaagtatgagcattcgagaccacacacttaaaaacttaacatataacagagtcagaaggaaagatgtacaacatagtggcagaggtcagtacctttaca

SEQ ID NO: 678100 - DNA, 116 bp, Homo sapiens
atatagtggtaccattttatctgaaggctgtgtgccaagagtctccagctgcagctgcaggccccagtgggaacacagttccagctcggggtggccttcctatcacccagccttca

SEQ ID NO: 678101 - DNA, 139 bp, Homo sapiens
cagtgagcaagtatgaccccgaacagacgagctacgtagacgctaaagagccaccgtctatgtagcaaatagtgggagattataggtagaggcgacaactaccgagcctggtgatagctggttgtccagatagaatctt

SEQ ID NO: 678102 - DNA, 516 bp, Homo sapiens
  misc_feature (59)..(59): n is a, c, g, or t
  misc_feature (74)..(74): n is a, c, g, or t
  misc_feature (138)..(138): n is a, c, g, or t
  misc_feature (148)..(148): n is a, c, g, or t
  misc_feature (165)..(165): n is a, c, g, or t
  misc_feature (167)..(167): n is a, c, g, or t
  misc_feature (225)..(225): n is a, c, g, or t
  misc_feature (351)..(351): n is a, c, g, or t
  misc_feature (394)..(394): n is a, c, g, or t
  misc_feature (396)..(396): n is a, c, g, or t
  misc_feature (398)..(401): n is a, c, g, or t
  misc_feature (425)..(429): n is a, c, g, or t
  misc_feature (431)..(431): n is a, c, g, or t
  misc_feature (439)..(441): n is a, c, g, or t
  misc_feature (443)..(444): n is a, c, g, or t
  misc_feature (446)..(446): n is a, c, g, or t
ccgatgggaccgtgcaatccctaacgtgtccgagttaatggtcccagtacttccatgtnggggatgtaataacntaggtgtaggttgggaattaccctatatagggcctttagatatgcagtgttaattctatacgcnttgagtgtangtaacttagcttatgtnangcagtcatgaagttggtttgctccgcatcggtagtctttaaacttcttttagtgaaantgtcttgttttatcagtgctatgtgtgcaagcagtttttttattttgcttttctcctggcatcagaaagtggtggcgttttctgtactggattgcaccaaggaagcttttggggaggaaggaaggncattaaattctttccctggtaatgaaaagagccctttatcaananannnntgcaatttctggatatcagctacnnnnngnttttaagnnngnntntgacatgtttatttggcaaattttataatgaagttttaagttgaaaataaaatgtagcaacattttgatc

SEQ ID NO: 678103 - DNA, 273 bp, Homo sapiens
tgttgcattatttttttctagagatgagctcttgctgtgttgcccagtctggccttaaactcctggcctcaggagagcctcctgcctcagcttcccaaagtactgggattacaggtttcagccactgtgcccatccaatttgttcacatcttggagtttttaacctgatggaagggaagtgacttgtcgttgcttttcctgctgggttttaaaaccaccttcctccctccccagtccaatggatgggaccccaatgaaatgttcaagttcaat

SEQ ID NO: 678104 - DNA, 200 bp, Homo sapiens
actacccataaaatatatttcagagctcacagagcttcataagagcaagatgattgcaccggactaaacctatttctgcttttcctatttctttctcagactgcttagcctagcctcaccccctcggtaaagagcagttatttatctctagcactctacgaaagtttaactaagctatactaaccccagggttgtgtcat

SEQ ID NO: 678105 - DNA, 207 bp, Homo sapiens
gcgttgatagtaaagatactcttaacggactcgagttatgactcccgaaagcccatgtcgaagtcccccgatcgctgggtcaatagtacgggccgtcgtactcaaaaaaactaggcgggtagggtataataggcctcacactcattctctaaccccctgacaaaacacatagccgagcccgtccttgtacatggtgtaaagtgagtg

SEQ ID NO: 678106 - DNA, 449 bp, Homo sapiens
  misc_feature (344)..(344): n is a, c, g, or t
ccattccattccactcgggttgattccactccatcccattgcattacattccatttcattccactcgggttgattccattccgttccattccattccactcgtgttcattccattccgttcctttccatttcattccattccattccattacattacattccgttccgttccattccgttccattccattccattccattccattcgtgtggattaacttccattccattccattccatcccattcctttccattccgttccattccatttatcatccatctacccactcacccatccatccaaccttccaaccatttatccacccatccaactattccatcgntcattttccacccatttacccatctactaattcactcatccatccacctacctatccatttatcacccatcaacctatccatccatccatccatccatccaccca

SEQ ID NO: 678107 - DNA, 908 bp, Homo sapiens
attttggtccccggggtcctttctgttatagttggctctttctctacactgtgtgcccccgtgtcttttgtacaatcatccgggggccgtctatttctcccccctggtttgtcgaagttgtgctttctcaattcctccctccgtgtcgccctcaggcagttcgggtgttcattgtgggcccccccgccccttgtttcgctcagtgtgcgcctaatgtggggtgcctcgcccttccgtctttggtcggtgtgagtcacctcacccatctggtcctggtcgctaaccgttccgttgggccgctgcaggctcctccctttgggggggggcaatggaattttgctgcttctcttccctccaccttctccctcctgtttttatattgaaattcgtcctccttggggtcctcgctcccactatatccgttgtgacacctcccgtcatgacatcatacattctttcgtaacattctggtgctaccacattttctagtcatcactcccacctgcgcagcagatccctcaccacaattcatctctcactcacatagtacagacaagagatatcacttctatttctcacacgcccccccacagttgtgaaatcaaaacctcctctcccctcgtttcttctcgtgaagtaatcctctcccgcatctgtacaagagcctcgttcctgtggacaataacatcagtttcgtaggatcatttaccatctcttgacgctgccgcggggcgactctgtcagcgatgtatcttttcatcgtcgctggaaccattcttctcacatccaatgaggcgagtcacaagtaggaccacccccatgtgggtcgggcggcctttgaacttgtgaattaggaacatgctccattgtttttttaacccaaaaaaggcccccccgggccacataac

SEQ ID NO: 678108 - DNA, 233 bp, Homo sapiens
  misc_feature (14)..(14): n is a, c, g, or t
gctcggtaccgacntggccgagtcgtggttgccgcatttcgggcaggtgaagcctttgctggtgcaggagaattcaccggtgaagccgcactcgtagcactcgtcgatcggcgtgttggtgccgtagtaaggcacccgggtgtagctgtagtcccacacgtcttccagcgccttcaggttgtgctgcaggttcgggtattcgccgtagcagatgaagccgccgctggccaacg

SEQ ID NO: 678109 - DNA, 110 bp, Homo sapiens
gggtcgcttagttccaggcagcgatgacagacgtatattgggaactcatcgggtcatgagattaaaggtctccattaacccgtaggtctcttgccgatcagtagcgtaga

SEQ ID NO: 678110 - DNA, 435 bp, Homo sapiens
ttctgggtgactctagaggttcccggctatacattatctatcacattatcccagtatgttccatctgttcacaggctatttccccgttcctaaaacaatgtatggcacatagtagcatacagtagatattgctgaataatgatttgtagggaattccgtgtcactgtcggtcttttagaatgacattgtacacattagagaattatttttcatgctccttctcaaagttgatatgaatgattttcacttaatttccttttaagtttctttatgttcgagttacttcggaaatactaaaaacactttatattaacatgaattatagaagaagtacaaagttcccagtgtagataatgtgatagccggctatcacattatgacctaagaagaaagtagagatgtaagtggatgtatatacgtgtatatgtcaactaa

SEQ ID NO: 678111 - DNA, 404 bp, Homo sapiens
acgtctctacggaaggtatggagctgatgaactaactgctgacgccctgtcgtcccccagatcagtgcccgaaataccaacaaggagaggctagaagaacatggacactctccattgccgaacggtctagggctcaaggaataagcgcaaatcaatttgtggactccaggttctatcttcttttggacttaatcaccattaatatgacgagtatcagcagtatcatattaatagagcttttgatatcattgagcgcttaaagctagtgcccctaaaatcaggaaagtatggaaaaaagagtggctgccttcagaacatttcagtaattaaatcaggcacaacctctcagaagtgcttcttgccaccataaacatcttgttcacacaagtttacagaggctcaag

SEQ ID NO: 678112 - DNA, 174 bp, Homo sapiens
tttcaagatcctcagcacacacacagtcagcctgtgtgtagattggtgggggtctgtgaggtagcgggacaggctgactgtgtgtgtgcttgagcaaacgctggtatgacagtgattgaaagtacatgttgatgtggctatgtttgtgttggcataataaatttagggttgatg

SEQ ID NO: 678113 - DNA, 917 bp, Homo sapiens
cctgcctggacggcagtcattcaccttttctgtgtgctgggatgtgttggtgcctgtgaggtccatgttgcttgcactaaactcctcctgccctgcatgtgccacctgaggtcctgtatcttgccctgtgtgaattcaaccccaacttctgttggctgcgtatgatacctaaatgtggagtggtctggacgttcctggatggctggcctgataacttgctgtctgatccaggtgcctgaaatgggccggttgagggatatcgaggagaatgaggagtttcatgaggaccatgcaccacctgctgctggaggtggcagtgatagcagggcaccctgacagtgcccggaatcttggacgtatgtaccccatcagccgcgggatccccaacatgcttgctgacgtgaacgaggacacactgagagtcgactatgtgccaggcgccagctaaccttgtcaatgactgtagtataacgctgacaccactaccctgaacccgaagtctgcccgagtgctatcccacaaaccactgcacccactcgacacccaaaacacacagtgctcacaccagagacacggcacacacatacatgaaaagactacagcgacacgagagaaagaacccagcagacaggacaacgaagaaacaagacgaacgcgcacaacagtctcaccgccgctcgaacacagcagacgagacagccacgaagcagaacaccacacgagagaggggagaggcgaggacacaccagagacagcaaagagacgaacgagcagagaaggcacgggagcagcaggaacaaaagaccggcgagaacaagaaaacgagagaaaagtccccacagaaacaaacgcgagcgagaagcacgactgcatagaaaagccgacaggcgggcacagcggcacaacgggaacaagac

SEQ ID NO: 678114 - DNA, 1028 bp, Homo sapiens
  misc_feature (411)..(411): n is a, c, g, or t
gatcgaccgagtctgggacacggtcatggcgggatgctgctggaaagagagaagcactggcccatgctagagtattggaactgtgtacgatactcctcacgagaggctacagaatcattgtacaccaagattttgtaatgtttgttgaagggcaagggtctccgtaaaataagtgcctggcattatacgaagagtactcatctagcacaccaagattcaacaaactagtcgtagacgctcgcgacatagtggtcttaaacgccggaatcccagaagtgtctgaggagaactttcagaagcacccaactacactggcggtcacattaggaagacggtgattctttcaggctgtacactatatagaactatatcctggcacctgaaaaagtgagtggaatggcataactatgngaagccattacgtggaagtaggcttcgtgccgcatcagtgggaaatggccaatataattatgtgagagtgactttggtgttgttcatgggaaactgatgtaatgatattattctcgtgtatatgtaagagcgtgttcttattactgacattctagtaatcaacgaaaatgtgatgtagaacatattgtacggagaagtgttaggatttggtgatcctggttagtatggtctgtggattccattgacgattgcatgaagtatcacagcgggtggttttaagcgacggatatttggtgtgtaccgtatagggccatggtaagagttggatgacttattaatgtaacaattcctggaattgcagtgggagactataattagaagaactagatatagtatggtcaatcttcaagagattaaaaggatcggaagaagaagggctaaatatttgagtcaaaacttaggttgtgaagatatagaggagtattgaatgacaaagataacaagagtgaaattgaaagagaaacatgttatagaggcaaaatatatagtgaaaaaggatcttagagtataaattaaagaaatatatatagaaaaaaaaagaataataataaaaaata

SEQ ID NO: 678115 - DNA, 289 bp, Homo sapiens
ctgaaagaccctagcggcagaacgggtcccattcactccctcaatgtttcagctcactggcaggacagctggacatagtcgctttggagcattgtattttcctgcttctacgccactacataccagaagctgtatataccactgcctgctgattcttcgcttggggcccctgccatttaaaatataggcaaggtcagagtataggatagcttcccatgccttcggttggaggatgttttaggatacagaaaaaacttgtaaaaagtcatcttgaggtaatccgtgaggg

SEQ ID NO: 678116 - DNA, 727 bp, Homo sapiens
tactttaatatcagcttgtttgtgaattctctgaatactgtcaacactcttatctaagttgcctttatgatgcagtggcagcatttgaattacttttcaaagaatactgttcatatgcatgttttgtgtttcaaactaaatacaggcagtttgtgccagctgtgatattgggccttccactaatagtggccacattatagagaatcatttaaaatatcaagaatagattcaacaattacattacttgctttcacattttaaaggcactttaaaaaaatctacttctcttgtaggtttgcggctagttggctattcaagaaacctcgcccctctgaatgtcatactgtaatctttaaggaagaacagctacatgaattaattgtactctatgggaaaatttctttggacagatatttgtaaaaacttttttttccaagtaacaactttatgaacctggtctcgcaaagaaacacgaagcaacacaaaaaacaaacaaaaccaatggtcagcggcgcagagcccgtcgagaaagacttcaaacacaatgccttggggcccggggcccaataatcggataagagaacccggggcacaagcagggacccaagagaccctggacacgaaccaagtccgactctcacccataaaaaaccgctgcggcaccgacctctagaaacacaaggcggtcgaagacaaagaccctccaaggccaagaagacaatatacc

SEQ ID NO: 678117 - DNA, 295 bp, Homo sapiens
  misc_feature (32)..(32): n is a, c, g, or t
  misc_feature (155)..(155): n is a, c, g, or t
  misc_feature (285)..(285): n is a, c, g, or t
  misc_feature (287)..(287): n is a, c, g, or t
ttttttgagatggcgtgtagctttgtcacctnggttggagtgcaatggcgcgatctcggctcactgcaacctccacctccacctccagggttcaagcgatttacaggcgcccaccaccacgcccagctaatttttttatttttagtagagacagntttcaccatgttggccaggctgatctcgaactcctaacctcaggtgatccacccgcctcggcctcccaaagtgctgggattacaggcttgagccaccacacctggcccagaacccatttctttataagcncngcctatgg

SEQ ID NO: 678118 - DNA, 136 bp, Homo sapiens
  misc_feature (16)..(16): n is a, c, g, or t
ggcaccgggaatgtantcgattggcccagtcgtaagtgctcctgcctagaaggcgggttttttaaagagagaagatgactttttaaaataattgatgtttttttaaaatgtacagaaaagtaaacaacatatatca

SEQ ID NO: 678119 - DNA, 113 bp, Homo sapiens
  misc_feature (98)..(98): n is a, c, g, or t
aacggctctgaactctgagcagaaaagtcaatgagcttcggaagcagcactttgccaccttcatcgctcttcaggaaatccagcaaactgcccttgancttgccatagtgcaa

SEQ ID NO: 678120 - DNA, 191 bp, Homo sapiens
taaggaaatgacatgaagcacaaccctcgctccgccgacttcgaattcattgacgccaccttgctcaaatacggcgaagaccactcggtgctgaacatggccgaactcgacggttatttcaccgccctggtttccagcccggccaaggtgatgtgccgagtgttcccgcaatctggggtgggcaaaaccct

SEQ ID NO: 678121 - DNA, 135 bp, Homo sapiens
ctctggccccccagtctgcaagagcagtgaggtgctgtatgagcgcccccaaccaacccctgccttctcctcccgcacatcctacagttggaaatccatccagatgccatgttccaataaacaggaggtcgtgta

SEQ ID NO: 678122 - DNA, 289 bp, Homo sapiens
cataagtttctggatagaatacaattctgctacccctcgtgttacctaatgtttcagcctctgctccgctcacgtaatatatgacaacatagtatctcccttgcacgggtcattgtgaagacttcgtttatttccacggaagggcctacagatgtcttttctcgcatcattttttggctagtgtgtgtgtgtttgtgtgtgtgtgtgtgtgtgtgaatcagcgcctaatagcactatatgcacagaattatactgttcctcctgtagccatgaatgaagatcagaatgc

SEQ ID NO: 678123 - DNA, 1000 bp, Homo sapiens
gcacaatcggggacgactctggctgcggtgaggtatctgtacaaagtgctcacggactaagaacagtgaatccctctatgggtgaggttcagaaaggcaagaagatgctattatgtgtgaagtgtgacccagctgcccctaccgtatgacccggccggccacgcgatccaagattgggagcacaattctgcatgtatcttctgttggccctgactcaacattccaggcgcccatggtctactcgtttaacagcagtccgccattaagaacaaagggacatccatcgtgggcgagagcactactacgtgaataggaaggtactcgcatgaatcccagagaagtatcagtcggcgtgtgacactagagaaagtgatcttgaggcggtcagttaagcatggaaggaatgatacttggcatgactctcatagcgttgatcgtcatgcaagctactaatgagtaataattggcctattgtctaatatattaggccttaagaaatgtctgatgaaatttggatgtgtagcgattgcgtaaatagatctgatgacaggagaattcagatcttgagatgattgtgcgaatatttggttggtcgtggccctgattctaagaatgtcagcggagtggctttgctgggtcaaagagagatagtgttccaggttgtgggagtttccagtaaggtacctaccgatttcgggtaccgtggaatcatgggttgaccccgtttaaagattgtgctacaccgttcgtgcgaaccggtcgcggttggtccacaagaaggtgacggccatcttaaagttaccggggacgggtaaaacggcgcccaacaacctgggccgacaaaattttcccagcagggcacagggcacgcgtgagcccaaaggcccggcgtcggcggacagcacttggcacagggggaggcaacagcacagcacaaggcagagcagcaataccggagaggacccgacattgcggaacagagcccaaacagaatcgcagg

SEQ ID NO: 678124 - DNA, 883 bp, Homo sapiens
gggaccgtgaccgaggaaacccctggagggacttggacattccttgggctccgtgcctgttcttcgtgctcctttacgggcaaggatctcacaattatcagtctttgaacgacacagaatgcctggcatatgataagagtgttctgtagaacgttgaagagacatatggacaagtgaatctgcaatagatactggggagagactaccaatatcatcacgcgcagaccaagagaagttccttcgatttggtcccactgggagttccggctggtgtgagagatctcatgaggaccacgccctgtgcaacagactcgtcaagacaaatgacgcaggagcccccccgattatgcgggacatctcctaagagccatgtatgtgctcaccatccatacgattcagttgattcagcaacaaaccgagggtattccgcgaaccttatggcctgaagctcaggcctaggaatcgagcgagcagacaaagaacggtgtaaacaccctgagagaggagtgaagctcttccctcgtgccgcagggttgagtctccctgtgccctgattgagctcctggccttgtagcatggtgaccagtccctattgcgcgcattccgcgagcccggcgactgtgtccctaggagagttgacctgtgagatctgtggccactggggtgatccttgtgacttgaactcagctggcactccgtgttcgggggcctccttcgtgccaggtagggggcaggaatcgtggcccacggcgggccttgtggcttgggctcaattgacacagtgtcctgggaacccgtaactgagtgtgggcagtgagtatggccgtacagtttaccaagttagtccgtttggtgtgagcaggggtcccgcgtgagaagtcct

SEQ ID NO: 678125 - DNA, 143 bp, Homo sapiens
cgtaacagtagatgcggagctggagaattcgcggccgcaggactgccggctgaaattctccggaacactagattgtataggactctgccttgatcaggtgataatctagaattttcaaccgtacaggcacatctagcgtgtat

SEQ ID NO: 678126 - DNA, 962 bp, Homo sapiens
ctcgcgcctgtaatcccggcactttgggaggccgaggtgggcggatcacctgaggccaggagtttgagaccagcctgagcaacacggtgaaaccccgtctctactaaaaatacaaaaattagtcaggtgtgggggcgggcacctgtaatacccagctactcggaggtggagttgcagtgagctgagattgtaccactgcactccagcctgggcaacagagtgagactctgtctcaaaaaaaagttacagcaagacttttcttatttgagacagggtctggctctgttgcccagtctggagtgtggtggcatgatcatagctccttgcacctttaacctcctgggctcaagagatcctcccacctcagcctccccagtagctgggactaatttttttagttggtaggggatggggtctcactattatctggcccagccgggtctcgaacttcgtgagctaaacgtcatcctccgtgccttggcctcccaaactgggggattacaggtatgagcagctcgcccggtcctcaaattacttggataatggaccaaagagacagatgtgccatgtactcaaagttaaaaccccctacagttccaaattctgggcctgtattctatcatatcttgccccttctggtccgagcccgtgtacgggaggcccaagggaaaatgaaggggttggaaaaagtcaaccccacggcagacctcaagaccaagaattggggagggcaacacgcagctcaggggacagaggggcccaagggggcgggccaacatgaaagagggcaagtgtaccacagacatcatgcccacatccgggcacaatcccagcaaaggagaaaaccaactggggacccttaacggcgagagtaccaccgatcgagggggaaaagagcaaagaaggcacaaataaggtaagagggacactaaagaggaaaacacaggcaaaagacaggagaa

SEQ ID NO: 678127 - DNA, 948 bp, Homo sapiens
  misc_feature (809)..(811): n is a, c, g, or t
aacccggctgggtgggtgggaagtgtggctggtaacctggcagccgcggagagagagaagattataaatggcagagccatttaactgtggttagctgttggattctgatactttcttaaaaatacgttcttgcaccaacatcttcattgggaacagttcagaaaaagcaaagaggagagccaacattcacatttaccatggctataccaataacagtgcttgactgtgacctcttgctatatggccgtggtcaccggacattggaccgttttaagctggatgatgtgactgatgaatacttgatgtccatgtatgggtttccacggcagttcatttattacttggtggagctcttgggggcgaatctttctaggcctactcagcgatccagggctattagcccagagacacaggtccttgcagcattgggtttttatacctcaggttccttccagactcggatgggagatgccattggaatcagtcaggcgtctatgagtcgttgtgttgccaatgtcactgaagcacttgtggaaagggcctcacagttcattcgctttccagctgatgaagcctccattcaggctctgaaggatgaattctatgggttggcagggatgccaggggtgatgggggtggttgactgtatccatgtggccatcaaggcaccaaatgctgaagacctctcctatgtgaaccgaaaaggcctgcattctttaaactgcctgatggtgtgtgaccattagagggacactaattgaccgtggaagacaaactggcccggcagctacaggactgtgctgtgctgnnngcagtcttccctcagtagtcagtttgaagcggggtttgcacacaagatatactgggcttcttgggttacacaatcccttcttttcttcggaaccctggttcatgaaacccactttccaatttcttgaaaattccagg

SEQ ID NO: 678128 - DNA, 328 bp, Homo sapiens
tccactagtgtaggcccgcgcttggacagtgacgagggcagggagcacacatgaatttctgcggttgaaccttctagaggaagaccagacagagggtcaacagagttgacaggtgaatatccttgtggatgaggtccaagttgttagtttcagagactaggcatatggataatatttacgtaggacattctggaacaggagcttgtggggcaagaagggaaggaacgccatctagcggcactctgacatctttaacacggcttgtcaaggcttactatattcatcgaggcattgtaccaactgtgcccgaatctagattaaaaatttt

SEQ ID NO: 678129 - DNA, 380 bp, Homo sapiens
attcggtcctagaattccaaaagaagctacacatcagacttcctgagacctctgctgtggattacaattggactattctctctaataagtgggagtttctattggtaaagactgaacctctcagagaaaagatcccaaagaactttggttctcaaagtgcgatcccgggaccagcaccatcaccatttggcaatttgttagacatgcaaattcctgggttgtgcttcaaatacactaaagcagagactctggggtgcagcatccggcgttatatataacaaggctgccaggggtttctgactacattgacgtttgaggaccattgccctacaaatagcagcttgtcccactttctatttaggtagtttcaacccacatgg

SEQ ID NO: 678130 - DNA, 267 bp, Homo sapiens
agcctcgattacaccataaactggatcttctccgacaatgacggccgcgtacagcaattgtttcatccacaacgagcacataaccttgttttaactctaaatcggtagcaattgtatcttgattgggatacccatttgccattggttaaggccttgttgcttcaaatactctcgtccattatcgatgattgctttgatgtcgtggcaagtcatctgcgtgcgcttgggtggttaatactgctggcatatttccaaggtaattcaggg

SEQ ID NO: 678131 - DNA, 389 bp, Homo sapiens
  misc_feature (4)..(4): n is a, c, g, or t
  misc_feature (18)..(18): n is a, c, g, or t
  misc_feature (29)..(29): n is a, c, g, or t
  misc_feature (46)..(46): n is a, c, g, or t
  misc_feature (272)..(272): n is a, c, g, or t
  misc_feature (280)..(280): n is a, c, g, or t
  misc_feature (283)..(285): n is a, c, g, or t
  misc_feature (294)..(294): n is a, c, g, or t
  misc_feature (388)..(388): n is a, c, g, or t
caanttacagtggcaaancagatgaatgntgagaagacagcagctngattacaaagattttaaggtggttcagtccttcacctggtgttggctctgagaggaggaggtggtcttaggcagtgatggaccctccattttacctctttaccctgtcgctcataatgaggcatcatatatcctctcactctctgggacaccatagccactgccccctcccctggatgcccagtaatgtatgtctactggtgggagactgtgaggatcccaggatncagtattncgnnncagaggccnttgctggctactgggtgttagtttgcagtcctgtgtgcttccctctcttatgactgtgtccctggttgtcaataaaatatttcctggcctcctng

SEQ ID NO: 678132 - DNA, 190 bp, Homo sapiens
ctaagggtggcggggatcctaaataaaggctgctttaattggcctgagagggagtggcaggaaggcagatcagtgaatgctcccagctggacaggaagaactggtttagtactagcaagcccagccaaacgagagcgagcaggacagcctgggatactgagcctggcgttcccttccaaacatatggggc

SEQ ID NO: 678133 - DNA, 142 bp, Homo sapiens
gaatatgactcaaggacggggtcatcactgagggccatgatggactgccgggtgtagccagatgctgtccagcagtacctgacagacgatgcgctggcttgaaggcggagtggtgcctgagtgcgcgggggtcagagcaccc

SEQ ID NO: 678134 - DNA, 1241 bp, Homo sapiens
  misc_feature (1136)..(1136): n is a, c, g, or t
ggctggagctggtgcctgggccctgagctggatctgctggtgctcgtggctgcgtgggctccgtgctgctgggctgctgtgtgcctgctgatggctgctgtgagctttgtggatgctgtgatgcccatgtgcctgtgcctgctgctgtgtgccatgaatgtgtgcaatggatgtgatgaatggattgtgctgtgctgacactgtgctttgtgtgctgcttgtgctgtgctgtgaatgcccctgatgaatgatgccctgagctgctgcagtgatgctcaatggatgcatgtggcaatctgtcttgttctgttgtgtgcctgaaatgtaccctggatgtgctggctggccttgctactggcctgctgctgatcaccctggaagccctgcttggtggccgtgtattacacctaacctggtgccattggtgcttaccctgagagatgcaagcatgcactgagcaaggccctgtgcctgacatgcctgtggctgctgccctgggagcttgtggactgtgggcagtcttgtgaagggcgcacttcttcctggtgtgcagtgccatgctggacgactggacgagctatgatgatggccatcgccaatctgcagctgagcttacatgcctgggccaatggatgcagctggctgaacttcggggacgacatccccagctgctcttcgaatctggcgaagacagaatgctgcttggacacatgcatttgacggagcggcgcatccaaccaggagagcgagctgcaactcctacctctccaggctcattgccgctggaagcgtgagaggggagctgggaagagttgccagggaagaccacgaggggtgcttgaggaccgacaggcaacgttcgggccccaagcaggccctgcattgagggccaagcacggacgatggtacattggcgggacatttgacggagctttatttctcacggtggcattgtggaagcagggaagacagcgggaacatatccccggagtataacctttgttttggccaaggaatcaaccgtttgtaagacgtagattgtgggagaacgaggtgttatatgaccccgatgggatcatccttctgaacgcctggaacaattagtgagagaaacctgcgcgcagcgtggtgatgcnacatgaagccgccagtaacctgagaacccactatatgagaaagatgctactctcagcggattgtagatgtgagaggaatgaaacatcaaagatagagttgagcac

SEQ ID NO: 678135 - DNA, 564 bp, Homo sapiens
  misc_feature (110)..(110): n is a, c, g, or t
  misc_feature (114)..(116): n is a, c, g, or t
  misc_feature (118)..(118): n is a, c, g, or t
  misc_feature (122)..(122): n is a, c, g, or t
  misc_feature (130)..(130): n is a, c, g, or t
  misc_feature (135)..(137): n is a, c, g, or t
  misc_feature (141)..(142): n is a, c, g, or t
  misc_feature (145)..(145): n is a, c, g, or t
  misc_feature (147)..(147): n is a, c, g, or t
  misc_feature (150)..(150): n is a, c, g, or t
ctgttccttgtgtgtcccccggttggctactagtcacggttggctctagtccacggttgtctactattccacggttggctactagtccacggttggctactagttccacngttnnntnctgncacggttngctcnnntccnnggntngcnactagtccacggttgtcgactagtccacggttggctactagtccacggttggctactagtccacggttggctactagtccacggttggctactagtccacggttggctactagtccacggttggctactagtctccacggttggctactagtccacggttggctactagtccacggttggctactagtccacggttggctactagtccacggttggctactagtccacggttggctactagtccacggttggctactagtccacggttggctactagtccacggttggctactagtccacggttggctagtcaagtcgcaagcagtgggagtggagaaggaacaaagcaatctgtacctggttcgcgatcattagttgtaacaccactgcactcggaccagccacccgtggact

SEQ ID NO: 678136 - DNA, 332 bp, Homo sapiens
cggtacccgggatgagatgattttctgtctaatttatttagctgtctcttttccaataacttttcctccactcaaccctagagttgaacagagacaggccttgatggaacggttcaatgcagccaaccgtggactagtccacggttggctactagtccacggttggctactagtccacggttggctactagtccacggttggctactagtccacggttggctactagtccacggttggctactagtccacggttggctactagtccacggttggctgtctaccctcccctagcagggaactactcccacactggagccaaccgtggactagt

SEQ ID NO: 678137 - DNA, 147 bp, Homo sapiens
gtaacctcagtgcgcttactgcgctgcactgtggagtggcgccctaatgctgtcacccaatgcacactcacttaaagaaaaaacgagttctttcgttctgtgcgcagtttaaaattgggcgcccttacattctccgttgccacttcc

SEQ ID NO: 678138 - DNA, 316 bp, Homo sapiens
  misc_feature (197)..(197): n is a, c, g, or t
  misc_feature (199)..(199): n is a, c, g, or t
  misc_feature (205)..(206): n is a, c, g, or t
  misc_feature (213)..(214): n is a, c, g, or t
  misc_feature (216)..(216): n is a, c, g, or t
  misc_feature (220)..(220): n is a, c, g, or t
agatcgagctgttacgtccacggttggctactagtccacggttgcacactagtccacggttggccactagtccacggttggctactagtccacggttggctactagtccacggttggctactagtccacggttggctactagtccacggttggctactagtcccacggttggctactagtccacggttggctgtgcntnccgctnncagtggnngnccanttgatggcttcagaaagctttgagtggacagaggcctggtcgctttctacgcacatcctgcatattttggagaagcctaccaaccgtgatggtgtg

SEQ ID NO: 678139 - DNA, 564 bp, Homo sapiens
ttgacgatcggtctactcctcacaactactgagaaagtcacaccccacttctactggtgaggaaacagaggcttgcaggcttagtagtcatgtagctagtaagtggtggttctttccaccagaccacactgtcttccccaagaggcatttgttaaccctgtgcggagccagccaaaccacaggctccatgactaccgggaaggtaagggccaggttctagttgaccagaactggtgaagaaactaatctttgcttacagggagaaaccacaggacatctgcttcctttgagcaagtgaaggagacacaggaaaagaggtcctggtgaaaacacgactttcagaagttatatctgagccttccaggaagaagtggcaatcagagccataagcttgaagtgtggcgaggaatcggaagggctggactggaagctggcttccttatccggccacggcctcaggaacaaggcagctgtaggctgtcttgaccccagtcagcaacgtggccttggcagactgcacattgaaggtgatttggggagggcctgaatctcccagcatgcctc

SEQ ID NO: 678140 - DNA, 260 bp, Homo sapiens
  misc_feature (171)..(171): n is a, c, g, or t
  misc_feature (254)..(255): n is a, c, g, or t
  misc_feature (258)..(258): n is a, c, g, or t
cggtacccactagtccacggttggctagtagagagccgtcttatccctatgtcttcacagtgtcctccccctgaacgtgtctgtgcctaatttcttcttcttatgaaggcaccaatccagactgcagcccaaccgtggactagtagccaaccgtggactagtagccaaccntggactagtagccaaccgtggactagtagccaaccgtggactagtagccaaccgtggactagtaccaaccgtggactagtggnnagncc

SEQ ID NO: 678141 - DNA, 271 bp, Homo sapiens
  misc_feature (20)..(21): n is a, c, g, or t
  misc_feature (32)..(32): n is a, c, g, or t
  misc_feature (39)..(39): n is a, c, g, or t
  misc_feature (41)..(41): n is a, c, g, or t
  misc_feature (44)..(44): n is a, c, g, or t
  misc_feature (54)..(54): n is a, c, g, or t
  misc_feature (182)..(182): n is a, c, g, or t
  misc_feature (265)..(266): n is a, c, g, or t
  misc_feature (269)..(269): n is a, c, g, or t
actagtccacggttggcttnnaatatgccttncaatgtnanctnccaattccantccagcgtagactagtagccaaccgtggactagtagccaaccgtggactagtagccaaccgtggactagtagccaaccgtggactccaaccgtggactagtagccaaccgtggactagtagccaaccntggactagtagccaaccgtggactagtagccaaccgtggactagtagccaaccgtggactagtaccaaccgtggactagtggnnagncc

SEQ ID NO: 678142 - DNA, 512 bp, Homo sapiens
  misc_feature (69)..(69): n is a, c, g, or t
tctagaggactccccgctctccacccaccccgcgtctcacagacaaaaacaaaaaaaacaaaacaaacnaaaaaactctgacagagatgtctgcctccttttcctctgcccttcctttctcttagggacacaggtatcactaaaaacttgttgaaaactaggctgggcatggtggctcatgcctgtaatcccagcactttgggaggccgaggcagggggatcacaaggtcaggagatcgagaccatcctggccaacatggtgaaaccccgtctctgctaaaaatacaaaactagctgggcgtgtcggtgcgtgcctgtggtcccagctacttgggaggctgaggcgggaggatcgcctgaacccaggaggcagaggctgcagtgagcccagatcgtgccactgcactccagcctgggagacagagcgagactccatcacaaaaataataatgataattctcaggatgggactgtgaataactttccgggtcacactggaaacaagcgacgct

SEQ ID NO: 678143 - DNA, 606 bp, Homo sapiens
aaggctcgtaaaaggggcattggcgaaacgaaaggggcaatgtctgacccgagatgatgttctacgtgtaatgcatctcatttcccccaaaacctgctcacctgcagcacagaggctctggacaacgtagctcagcatgtactcattttccccaggaaactgcacggccgacaaggcacagcaaaacgctgcacatgacgtgctccatttctcaacgggatgaacaaaacaggctgctttcttggcatgctgcacgttcacacaatgtactacattgcccccaacaaaagcaaagagctagattttcctgcgctagcatgcactcacttggccattgactacaccactggaaagcaagagtctgtctatgtgggctggattcctgaactacagcttacaagggaagggcgtagaatatcatcattaactggctcacaaggaatagtcatcttgggcgaacacatgctaatacgtttcacagaatgaggggtgacagtctagaatccacaatgtgatgtttggaacatttctcgccaaaccttactatcaaagccctggagtgcacagaagagacatgtcgggtaatgaattggtgttccctcagac

SEQ ID NO: 678144 - DNA, 213 bp, Homo sapiens
cgcatctaggtcttgtgttgtgaaaagaggtgaatggtatatatatatatcttcatctatatctatatctatctatctatctatctatctatctatctatctatctatctatcttccttcctttttttttttttagggaaacaaattttggccctgccccccaggttgaattccagaaccagaacctcagttcatgtgcagcccccccccccg

SEQ ID NO: 678145 - DNA, 2124 bp, Homo sapiens
  misc_feature (1020)..(1020): n is a, c, g, or t
gagatgatgagtgagcgagtactgtatgtgagtagttagacggagttggctcagttgtggtgctgtgcgaaaattattataacatctccgttgttgtgttactacgactgcaggtggttggtgtagaccgctgattagtcagcatcgtgagtggtgtgagtacacatggtgttgtgcctacgatgagtgtaaagcgtcggggtgttgtgtagaggaacgtgcggacgtcggcagttagtatgaatataggcgctgtcgtgctctaagataggtttgtgtcttgggacgactatgtgtgtgtgtgtggagcaaaagtttgtctgttgtcatctggaggtggtgatgtcgtgtgattgtgtcgcgtgtgacggtacctgtacggcgctggggacatcacacaggatgcggtggaggtgtttggtcgacttcttttgttgagtagtggctgtagtcggatcagttgttgttggtcgcatcgtgctggtgggtggtatagtactcttgtatgatgatctgctattgtggttgcggattctccctgcattgcgtggggtgtagatgaacggtgatgtcgtatttcggtttcttattgtgaaaagaatagttgttggggcgggtttgcttcgaatgcagtgaggagggacatcataagctactggagtggctcgtgggaggggtgtgttgtcagaactgagcagctagcgaggaggtgtgtgatggagatggatatgtgcttggatgcaatgtgacattggtgggtcgcagtaattgagatgatggagatacaacatctggcgtggtggactgacttaggtttggaggtgggagggatagtaggtagggggacggtgtatttacaggcagagtggtgcgaatacacagcatctgcgtggttggttggtgggtggtgagaagctaccagcaagcggaggagggttgtatacgtggggcttcgctggtagtgttgtgtgggttaggaggtgaggatgtgtattgttgtgtaagtaggattgttggttncagctggctttgcagataaggtgagtgagtctgagtgacagacgggagcgactgtagttgggttgttggtgaggtaggaaggttgttttaggtagtcgacgcgactcaaaagagtgtttcagcgagtgagagtggttgttagttgttgagatgaatgatatgggggcgacagtaggtggtgtgataaagctgcgtgttggtctgtcgggggggggggtggcaagaccacgaactcttgttattgtattattacacggcctattatgctgctctctcgtcggggtgaggtgttccactctactgtggctcacgacgggtttctcgcgacgcgtggagtctgagagccgcactactcatctcgcagcgcgcgtatgatattgactgcgcggcgcagcccactcacagcatgtgtttctttgtcgcgccgtggtgtgtgtctctcgcgctggtggttgtgcgccccacgatgtgtgtgtgtactctcgtgtgatatctgcttgttggagagtgttttctctcgggtggggggcagctctcgtgggcgcgcgtgtttggcccctacggtcgcgccgcgtggtcctgctcctcccgtctcttttcccgcgacgcacgctctgtgtgctctgtcgtcgagcagctccgtgatgactattctgttgagagagcacctacggctcggtgtctctaacacagagagcggcacaccagcgctcgtgggtgcatctctagaggagccagcacctactctctctctactacaccacgcgccacgtgtgtgtgtgtggcgccgtcgggtgtgcctcgtgcgtctgcgctgtgttgttcgtggaggagcgtgattgtcttattttaaatagagagagagaggttgtatctcttgttttatacacgtacagagagagaggagagtacacacgcaccgtgatgttgtctcacagagaagaatatacacaccacgctatcgagagagagagtgaggtgatgggctagcaggtggataccccagcttgttcgtggcgcagaactcaataagtgattgttctccccctcgataatatagtgcccagggggtcctccccaacggaaataaaataaaataagaat

SEQ ID NO: 678146 - DNA, 172 bp, Homo sapiens
agatcgagctgttacgtccacggttggctactagtccacggttgccacggttggctactagtccacggttggctttctactggcaatcatggagactgaagagcctcctccaccaggagtgaaacctgaagtagaactctccaccagagtagctttcagagccaaccgtgga

SEQ ID NO: 678147 - DNA, 452 bp, Homo sapiens
  misc_feature (69)..(69): n is a, c, g, or t
tctagaggactccccgctctccacccaccccgcgtctcacagacaaaaacaaaaaaaacaaaacaaacnaaaaaactctgacagagatgtctgcctccttttcctctgcccttcctttctcttagggacacaggtatcactaaaaacttgttgaaaactaggctgggcatggtggctcatgcctgtaatcccagcactttgggaggccgaggcagggggatcacaaggtcaggagatcgagaccatcctggccaacatggtgaaaccccgtctctgctaaaaatacaaaactagctgggcgtgtcggtgcgtgcctgtggtcccagctacttgggaggctgaggcgggaggatcgcctgaaccttggactgggaaggtggaggttgtggtgagccgggatcgcaccattgcactctagcctgggcaacaagagcaaaactccctctaaaaaa

SEQ ID NO: 678148 - DNA, 606 bp, Homo sapiens
  misc_feature (20)..(21): n is a, c, g, or t
  misc_feature (32)..(32): n is a, c, g, or t
  misc_feature (39)..(39): n is a, c, g, or t
  misc_feature (41)..(41): n is a, c, g, or t
  misc_feature (44)..(44): n is a, c, g, or t
  misc_feature (54)..(54): n is a, c, g, or t
  misc_feature (517)..(517): n is a, c, g, or t
  misc_feature (600)..(601): n is a, c, g, or t
  misc_feature (604)..(604): n is a, c, g, or t
actagtccacggttggcttnnaatatgccttncaatgtnanctnccaattccantccagcgtagactagtagccaaccgtggactagtagccaaccgtggactagtagccaaccgtggactagtagccaaccgtggactactagtccacggttggctactagtccacggttggctactagtccacggttggctactagtccacggttggctactagtccacggttggctactagtccacggttggctactagtccacggttggctactagtccacggttggctactagtccacggttggctactagtccacggttggctactagtccacggttggctactagtccacggttggctactagtctacgctggaatggaattgacgagggcaccacaggagtgagccaaccgtggactagtagccaaccgtggactagtagccaaccgtggactagtagccaaccgtggactagtagccaaccgtggactagtagccaaccgtggactagtagccaaccntggactagtagccaaccgtggactagtagccaaccgtggactagtagccaaccgtggactagtaccaaccgtggactagtggnnagncc

SEQ ID NO: 678149 - DNA, 911 bp, Homo sapiens
atgctatgtcgtagaacagggcattaattttgtttacagcgttttatgtgccccgagtcccgccacgcgttgccccccgcggttgttaaatctagccggggggtaaatataattcgcaaagtggaaagaaatgtgtcgaaacgcctgaagaagagtggaaatgcccaaaacacctattgttttttgcagggctataaaaccctgggcggtcgcagaccaacaaatagtctgcgtgaaacgggggcatcaaccgcgctttgttttggcagtccttctcggggcgtaactacacctctcttcgacagggaaataaagcatattgtccgttgctccgcatcctgagaccgcagccaagcaaagtacgttaccccgttcaagatattttagtagttacactagcctcggttgctcgagcaaattctccgcttcacaataaaaggggttcttttggtggtaacacgtgtcttcgccaatatgacgctcccttttaaagagagactcttgtatcgccattgaacccctgtcgttgtcgacaaaccactatttgtgtgacctttctcttttactgagaagagaaaataatttccccccccccttacatggcgactttaatggtcacaaacatacaccgaaaattactaaaactttttccccaccaacatgtcacacgacatcgacctcaatactcccccacacccgatggacttacccataacctaacatccttcaacaattgtttaaaacccaacagagtcaagaacgatctctaaatatcgatatcaacacaccaacagacttctagactacttctcttcttacacaaaccatccaactctctctcgtgctcctttaaccctttgtagcaattttttccagcttatataaaagcacaccccacaagccgcaagcaa

SEQ ID NO: 678150 - DNA, 636 bp, Homo sapiens
  misc_feature (20)..(21): n is a, c, g, or t
  misc_feature (32)..(32): n is a, c, g, or t
  misc_feature (39)..(39): n is a, c, g, or t
  misc_feature (41)..(41): n is a, c, g, or t
  misc_feature (44)..(44): n is a, c, g, or t
  misc_feature (54)..(54): n is a, c, g, or t
  misc_feature (401)..(401): n is a, c, g, or t
  misc_feature (430)..(430): n is a, c, g, or t
  misc_feature (547)..(547): n is a, c, g, or t
  misc_feature (630)..(631): n is a, c, g, or t
  misc_feature (634)..(634): n is a, c, g, or t
actagtccacggttggcttnnaatatgccttncaatgtnanctnccaattccantccagcgtagactagtagccaaccgtggactagtagccaaccgtggactagtagccaaccgtggactagtagccaaccgtggactactagtccacggttggctactagtccacggttggctactagtccacggttggctactagtccacggttggctactagtccacggttggctactagtccacggttggctactagtccacggttggctactagtccacggttggctactagtccacggttggctactagtccacggttggctactagtccacggttggctactagtccacggttggctactagtctacgctggaatggaattgagccgaccgtggagccaaccntggactagtagccaaccctggactagtanagccaaccgtggactagtagccaaccgtggactagtagccaaccgtggactagtagccaaccgtggactagtagccaaccgtggactagtagccaaccgtggactagtagccaaccntggactagtagccaaccgtggactagtagccaaccgtggactagtagccaaccgtggactagtaccaaccgtggactagtggnnagncc

SEQ ID NO: 678151 - DNA, 586 bp, Homo sapiens
  misc_feature (20)..(21): n is a, c, g, or t
  misc_feature (32)..(32): n is a, c, g, or t
  misc_feature (39)..(39): n is a, c, g, or t
  misc_feature (41)..(41): n is a, c, g, or t
  misc_feature (44)..(44): n is a, c, g, or t
  misc_feature (54)..(54): n is a, c, g, or t
  misc_feature (497)..(497): n is a, c, g, or t
  misc_feature (580)..(581): n is a, c, g, or t
  misc_feature (584)..(584): n is a, c, g, or t
actagtccacggttggcttnnaatatgccttncaatgtnanctnccaattccantccagcgtagactagtagccaaccgtggactagtagccaaccgtggactagtagccaaccgtggactagtagccaaccgtggactactagtccacggttggctactagtccacggttggctactagtccacggttggctactagtccacggttggctactagtccacggttggctactagtccacggttggctactagtccacggttggctactagtccacggttggctactagtccacggttggctactagtccacggttggctactagtccacggttggctactagtccacggttggctactagtctacgctggaatggaattgagccaaccgtggactagtagccaaccgtggactagtagccaaccgtggactagtagccaaccgtggactagtagccaaccgtggactagtagccaaccgtggactagtagccaaccntggactagtagccaaccgtggactagtagccaaccgtggactagtagccaaccgtggactagtaccaaccgtggactagtggnnagncc

SEQ ID NO: 678152 - DNA, 357 bp, Homo sapiens
atgggtctgcagcaacctcaagtctcctcagaagaaagaatttgaccaaggggcataaggcagaaggagagacccgggcaagcttcagagcaagagtggaagtttattaaaaagcttcagagcaggaatgaaagaaaaagtacacttggaagagagccaaacaggtgacttgagagatcaagtaaaacctcattaacgtaactgcaacaatgaagacattacctagacgtgctggcttcctctttgccttcctccatgatgtaagtttcctgaggactccccagccatgcttcctgtacagcctgtggaactgtgaaccaattaaaccttttttctttataaattaacaaaaaaaaa

SEQ ID NO: 678153 - DNA, 643 bp, Homo sapiens
  misc_feature (20)..(21): n is a, c, g, or t
  misc_feature (32)..(32): n is a, c, g, or t
  misc_feature (39)..(39): n is a, c, g, or t
  misc_feature (41)..(41): n is a, c, g, or t
  misc_feature (44)..(44): n is a, c, g, or t
  misc_feature (54)..(54): n is a, c, g, or t
actagtccacggttggcttnnaatatgccttncaatgtnanctnccaattccantccagcgtagactagtagccaaccgtggactagtagccaaccgtggactagtagccaaccgtggactagtagccaaccgtggactactagtccacggttggctactagtccacggttggctactagtccacggttggctactagtccacggttggctactagtccacggttggctactagtccacggttggctactagtccacggttggctactagtccacggttggctactagtccacggttggctactagtccacggttggctactagtccacggttggctactagtccacggttggctactagtctacgctggaatggaattgtccacggttggctactagtccacggttggctactagtccacggttggctactagtccacggttggctactagtccacggttggctactagtccacggttggctactagtccacggttggctactagtccacggttggctactagtccacggttggctactagtccacggttggctcacaccgtgcaatcccagcactttgggaggcacaaggcaaggcagatcacctgagctcgggagttcgagaccacaacacgtgactagt

SEQ ID NO: 678154 - DNA, 156 bp, Homo sapiens
gtgatgtacatgagatatgtataccaacctagtttgttgcttctgactatctcacacacatttaagactttaccatttttcagtgcacttttcaatgttaaacaaaattaaatccaattcttgaaaatcagtttgacaaacaacccccactccata

SEQ ID NO: 678155 - DNA, 203 bp, Homo sapiens
  misc_feature (25)..(25): n is a, c, g, or t
aaccagggactgcgatcctgacgtngacatcgagtagtactccgatggagcccccattcgtattataatacatcacagacgtctgcgctcatgagctgtccccacataaggcttaaaaacagatgcaattcccggacgtctaaaccaaccacttttaaccgctaacacgaaggggggatggacacacgaaagggggatggaca

SEQ ID NO: 678156 - DNA, 379 bp, Homo sapiens
cctatacgcggtccggggtggatccatgaacctggagaaacggaagcaagaagattaaacagctcatccttctgttctaaagctgtccctactgccagcacccccgagggaaggctaatctctgtagacctcagcaacaacaagccaggctgggcaggagcagggcccagggtatctgagacgcatgtgagtcccgaggctggaagctgaggcaccaacactggcattgtattactgtaggtggcaatgaccgcctgttaccccttccctcctatcatgcaccatgagccggccttgccctcaagatgacctcagcaaatgacaagagtaggcatgccaaagccataaagccataaacatggctggaaagggggcaggg

SEQ ID NO: 678157 - DNA, 788 bp, Homo sapiens
  misc_feature (344)..(344): n is a, c, g, or t
  misc_feature (411)..(411): n is a, c, g, or t
  misc_feature (496)..(496): n is a, c, g, or t
tgtgtgaggatcccggggccgccgcgctcgctcgggccccgtccagtggcccgtcaccatcacgctcaaaacgctgcaggcagcggaccttcaaggatccgcatggagcctgacgagaacggtgaaggggctaaaggagaagatagaagctagagaaggggtctgttgatgcccttccccgtgcgtccgggacagaaatcctcatctatgccggctggatcttgaagtgacagatgtccctaatcagaggtagctatctgcgatcgagtagagaaaggaaaggcgtgttcgtggtcgtcaatgagtgaccatacgagccagataggcccggtccacggtggttnaccatcagcagcacccgcagtatgcgtccgtgcatcccaactaggcatggcactccaagatggtccntcgtaactgtcctcggtaccctgtcctgaacacgtaatacaattacgtgcattgtgcctaattctactgaaacgtgtccaagaancgaaaggtagtcatcgaaagaaggacacgcctccaagtatagacacttccctgtctgccaaaagtggggtacctgaggaaaacagttccaccagaggctattggttcggcactttcataggggtaagccatgctggcctctgtactaaaggggcctgttgccctccctggctattggggattattcccactagcggaaagtcattacatggtacctagggcttccggtgcaaagatggggtagcgcaatgtacaaacgcataactgggccaaggagggggcgcgccctggtg

SEQ ID NO: 678158 - DNA, 116 bp, Homo sapiens
gtgcatagtcattgaaagaggggaagcgcttgcaaattcacgagtcatcggagtagtcatcgctgggttgcttggcggatggcaagttgggcttggtgcggagattgatcgcctgt

SEQ ID NO: 678159 - DNA, 682 bp, Homo sapiens
  misc_feature (6)..(6): n is a, c, g, or t
  misc_feature (56)..(57): n is a, c, g, or t
  misc_feature (125)..(125): n is a, c, g, or t
  misc_feature (144)..(144): n is a, c, g, or t
  misc_feature (206)..(206): n is a, c, g, or t
  misc_feature (454)..(454): n is a, c, g, or t
ttctcntgcctcagcctctcaagtagctggatcaggcaccaccacaccgcgcgggnnctattttttttttttgtaatttttagtagagcagggtttcacgtgttagccagagtggtcttatctgntgactcgtgatcaccctcnctcagcctccaaaagtgctgggatacaggcgtgagccactgtgcccggcccagttttatttntttgttgtgtctccaccaggttttggagtcaggatgatgtgggcctcacattgaagttaaggaggagtccctctttctcagttttttggaatagtttccgtggtaatgataccagctcttcttgatacacctggtagaatttggctgtaaatccatctggtcttgggcttttttcggtttgaaggctatttttttgctgattcaatttcaaagctcattattgctctgttcagagactcaatttcttncccggttcagtcttgagaaggtgtatgtgtccaggatttattcgtttattctagaatttctagtttgtgtgcatggaggtggttatggtagtctctgagtagtttttatatttctgtggagtcagtggtaacatccactttctcatttctggttgtgtttatttggctgttccgtctctccacccttcgctgtgtccgtatctcaataaagagaatctgctctcttca

SEQ ID NO: 678160 - DNA, 106 bp, Homo sapiens
tccgggttgtgtgggctgggctctggtgcctcttcctggccaggaccctctcctcctgattcccttggcccttgttctttctgtctgtttactcattgtctccccg

SEQ ID NO: 678161 - DNA, 161 bp, Homo sapiens
  misc_feature (60)..(60): n is a, c, g, or t
ccggcgccctctgtgggactgggtttcccgggcgaaagactgaattccttttcccatttntggcatccggcccccgtggaaagggctaaggttggggggctgttccgtctctccacccttcgctgtgtccgtatctcaataaagagaatctgctctcttca

SEQ ID NO: 678162 - DNA, 147 bp, Homo sapiens
cggacctctcgaaccatgactcaagtgatccacctgcttcgtctttcaaagtgctggaattacaggtgtgagccaccacgacctgcatccacttctcaaacagtccttttttgcgtccttgtcctctttttcttcctctttctctgc

SEQ ID NO: 678163 - DNA, 1678 bp, Homo sapiens
  misc_feature (441)..(441): n is a, c, g, or t
  misc_feature (494)..(494): n is a, c, g, or t
  misc_feature (579)..(579): n is a, c, g, or t
  misc_feature (637)..(637): n is a, c, g, or t
  misc_feature (780)..(780): n is a, c, g, or t
gatgctgactacccggaacagatctgactcacctccctggtgcaccagatctgaagtgatacgctagccagatcgtcatgccccgttcgtggataatgatagtaagatacgctgtcccgcgagatcgaaggacggggtataatagatcgctaacgtcgattaagtcatgacgccaaagggacataaaacgcccctcactagcgcgtctcttggctactaagtcgatcttgagcgtgagtacatcttacatgtatatgcaggcggtatcaagtggcgaagcgctgtaacgcactgccccggacaatggctagtaccgcaacttgctcttcaatgacactaggggtcaaaaggaagctattgaacgcgcttcattactagatgacgcccaagtgcctaggttgtgcgtagagggcagtgtcactgtcagagcatgagacaggnctggcaagcaaaacaagctcacactggagacacgctgtggtgggaatttgacnctcggagtgggctccaagagggcccaatcagccaaagtctgtacagcgtcccggagaccgtgtggtgacagagtcaatgacctgngtcccacgcaaagcgacaagtccatcacacattcccccttgtctgcttgagtaacatnttgtgtacacccttgctttgacgctcccttacacacggaacgcggttagaccaacgcaatcgttctatcggagcattggacactccaagcgcaataccatagataccccatcttgttctgtcagggcaaggttatgggttcangaccatagacttatgcaacaggcggggggccacactgaggcttgaggagttcccctccacaatatagtcctccagattctttactccagggcatcctaatatagtacacgggtagccgggtctttcggaaagaccctcccaacatccaccctttttacgattaaaacctaaatactataaagattctcccggcaaattccagtccatgatatacttggagaaaaggttccacgttacgggggttatacccttccagagtttccgtggagacgggccatatattcgttggagttccagaacgcgcgtttcacttcacggttaataaggatacacctttaaccgtgggcagggttggtcaattcacaaggtttagatcggagagctaataggggagcgtattttccttcgggcttggccccggtcggtcactttagaggcggctttggacctttcaacaggggcgaccttaaaaagggcgagcggaagggagacgactcgggagttggacttttaaaaaggccacgagttcgcgcacacctaggtttcggaaagcgagaagtgaccaaagcgccacaaaccaggacaagggtccgcttgtgtacttttttggttcccccctccatatgtgttagggtctcggagcacgcccactatgggtgcccacgtctgatagtgtgtgctctcaccttattagccaggcggaccacgagcggttgtccacctactgtggcgcgcgtgtttgcgaggagccccgagggcgcgcgcgcagcgccaccgaaaggttttattactcacccacgtgcgctgtgtgtgtgtagccccgaagcgatgtgtacgtccgccgcgcgcgttatgggcaagcttgcgcggcggcacattttgtgattgtggccgcccg

SEQ ID NO: 678164 - DNA, 609 bp, Homo sapiens
ctggggaaaaaaatttaccattagattcccggccaaaaggggcgaattcccgggaacaaaaaaaaaggggcgcttcccgagaaaaaaaaaaaaaacccggccaaaactgggagctgggggaaataatgggcatagaccctcccgcacaaaataggtgcccgctcaaaaaaccaaaaaacataagagccctaagaataaaggtaaaaccccggggggcctaatgggtgacttaacccacattaattgggaagcccttactgcccgctttacaaacgaaaaacccaacgtgccagctgtattaataaatcggccaacccgctgggaaaggccgtttgtaaattggtcgctttttcggttcttcgataactgacaaggagggccaggtccttcaggggggcgaagcgggttttccctactaaaaggggggtacccgggatatcccaggaatccggggagtcccccaaaaaacaaattgccgcaaaaagggccgccaaaagggccggatacccctaaaaaggtcccccctcttggcggtttttaaataaagtctccgccccaccgcagggaggaaaaaaatcccgagggtaagttaaagggggcggaacaccc

SEQ ID NO: 678165 - DNA, 459 bp, Homo sapiens
  misc_feature (82)..(83): n is a, c, g, or t
  misc_feature (114)..(114): n is a, c, g, or t
  misc_feature (155)..(155): n is a, c, g, or t
  misc_feature (203)..(203): n is a, c, g, or t
  misc_feature (208)..(208): n is a, c, g, or t
ggaagtggacgctgtgcaggacggttccggattccggggtcgataattaaaattataaaattgcgggcgcttgacccccaannataatgtcagagagcttctactatccctcanaattttcgatagataaagaaatatcataaattgagaagttnattttgtgcattgaaatagttaattaaatctttcccaatcatacttanctttnaatcggcgtcccacttccataggaattgggaacatctttttgaatatcacgggtacgaagacacaagtaatcacagcactaagaattaaaatgcctgaagtttccggagaaatcgcttttaatttttcagcaattttagccgcagctataacaagtgataaagttgatgtaagtaagaaagcagatgcaatggtagttttagtgtcaaaccagcgtctaatgtaaaatactggtatcaattttgtcgacgc

SEQ ID NO: 678166 - DNA, 422 bp, Homo sapiens
gtgtctagaggatcccgctgcgcctactactaccggtgcgcggctgaatccatgcagaccaaaggagaggttggtgagaggctcccagcttgtggtgttgacagcgtgacaccctggtccagtccgccccactgagaattagggagcaggagcaggtaattccttctgggctcagctcacgagctccaacccagaaccagactttgtagctcacctgcacacagggccctggggccttccatagaagcaaaggttcctctcctccaggcgtcccacagaggttccctgatacccacacatcttttggagcagaaggcggtgtctggaaggacaaaatggggctccactcgccccacaaatcctcttctttctccatccggcagcggccatacactttgtagccagtggctagctccaaatct

SEQ ID NO: 678167 - DNA, 916 bp, Homo sapiens
gagagaggcaaagactcaccaagagacgcgctcccccgagcagatcctgaaaacaatgtgggaaatgactgtaaaggaccgcacacctgcagtggggccccgcctcagtgcccgttgtgagtaaacggtggggtatacaaagagggcagggacacccccctttggggtcgacggaaccccgcgtagcagccgtgcgcggccccgggagccgcccgaagtccggtatatgacgtcaaaacggtcgtcgtggtgacatcacgtttagcgccatagggaaaaacctttgtctggaatcaaatactgactcctgctcagggtgtgagaaccacaccattattaacaagaaaggggcaaggaccacttagtacggcaaagatccttgcagatagaaatctccagctagaagaaccactgcgtgggtagcacgccaccacgcagcggtcacccccgtagatggatcgcaccccactgcagcactattgccagagaacagacacccacaagggcacaccattggacgatgaagaaaaggcacgtatgaaagggatctggccccactcccgcctgagtccccaaaagcagaaaggtaaccaatttgggggggcaacaataaagggaccacgagggccccccccaaacaaagggttagaactaagggagtgcccccagaacagcccatggtttgtccaaaagggaacccaaaacaacagggctggtcaaggtaaaccccggagcccccgatagcagacctccgcaattcacgccggaggaatggaagaaacaaggcaaacacaccccaaggagtccgagaatttcacgctgctatatatacaacggaggattgaagcagggaaagaaaaaaagagagagcaggttttatccccaaaaacaaaaaagggtccccacaaacaaaaca

SEQ ID NO: 678168 - DNA, 940 bp, Homo sapiens
  misc_feature (329)..(329): n is a, c, g, or t
ccagtagatatgaacaaggttggaagggggtgatgttcgaacatgtgccaagcggcgtttcattctgaggctccctctttttgcagcaaagttctgaccgccccaagtggcttgtctgtggcgcacccgtgttccgttgttttgcgcccgctcccccccgtctatttggccgcggccgattgtccaacatggtgaacgtttgcctagcaaacatgtgtgtcgataagggttgagccacaccaatgcacaggtgtgggctgtaaaacaacccccctttttgggggatccaggaaccgggatttgcgtattggggacatacgcccgtacgnattaacaagggcccgtgcagtagcgttactcacccgttccaagggtgaacaccctgttaacaaagccacaaatcactagtcccctaagcaacctgtactacactggtacatcaggcacatactccccccttcctcgagcagcctctaccaactttactgaaccaacctggttgttaaaatcgagcagtcccccaataaagtacttgttttggcccccactttttaatttgattccccgcgaaacactgttacgtccttctaatacatgcaccccaacaggcctagaacctctccctccccccaaccttctagtcacgcgaactctccccttcctcatttatgcctcatgagaagctcaaagattctttatcaccaaaaacaattttggttctccacacgagtagcctcctgtccacaatgcactgtgtcgtgcaaaatgtgcatttcacactattattcataaataagtggaaagcatatggtacaaactctactccacccgagattacttatttctggaccccccaactgacccaccgcagcacactctctgtactgcacataattgaagaaaatttccccgaaaaaactttctggcgaaccacaaaaca

SEQ ID NO: 678169 - DNA, 291 bp, Homo sapiens
tttagaagttgcaagtagcaggacatgatccgtggctggaataattcctggcacagagaagcgtatggagactaccagtgtgtggaatccaaggacccgctgtccccgtgtaatttaaagagtattccctgagcttggatgggtgcggtggctcatgcgtgtacgctcagcacttttcaaggccaagtaggggggatcacttgaggtcaggagggaaaatagaaccagcctcccttgtcaagctggttatcccgcaggcagcaatgtgctattgaaacttctaaaactagg

SEQ ID NO: 678170 - DNA, 120 bp, Homo sapiens
gaaatatttagtacaccaagtgtacatagcagctcctctaatcataatagctagccacatggacagcaacccaagtgtccatcgacagatgaatggcatgagcaaaatgtggcatacaca

SEQ ID NO: 678171 - DNA, 909 bp, Homo sapiens
  misc_feature (109)..(109): n is a, c, g, or t
  misc_feature (116)..(116): n is a, c, g, or t
  misc_feature (139)..(139): n is a, c, g, or t
  misc_feature (824)..(824): n is a, c, g, or t
ggttggccgcatccggttttatttctctagtgacatatttacagttcaatataaattaaaggcctgcttgtacaccaaatccaggggggtgggggtggtgcattcaaanaggtaangcctccacctggcttcacaaaanaagcttccactcctttgccctggttttgggattttgccagcctttgactcatcaatattttcttcaatttccttagctggcaaatcctccttaaccgtggtttatgggggggggggactcccacttagtttctaaattttattatcattaaccctttcttcttttcccattttatcttctatacgcctttttgcccaaaaattctccggttttcctcccctgtgttatttccaattgggtttttaataaactggtgacgcccgtggtggcgatggcttataggtacttagatccatcccgttgggggcgcaacacaccacccacgtaggcggtctgttttgttttttgtcccccccgacccgtattgaaggtggataggagtaagagtgtttgcccggtggctcggtgtgggcccgtgttttgagcttgttttcttccttggtgtgtgtgtggtttattccgtccaatctgtttttgctcgccggtgtttgtgcgtttcgtatgtgggggctcagcggggccgttcgccggctgtggtgttctcgtacccgttatggtgcgccttggttctcgttgtgggtggtcgggatattgttggttgctgtttcctgagtgtgcggtcagacagcagtggaagagacaaccacccccggtgccgccgggtgcggtatcggaaattttttgngttgttgttcgctctcgtgtggggttatgccttcgcgcgatgacagcggcggtgtggtcgctttgtgggttatgtggtctggcgc

SEQ ID NO: 678172 - DNA, 237 bp, Homo sapiens
  misc_feature (12)..(12): n is a, c, g, or t
gccgactacggnggaagtgggattccagcctttcatttattctttcacctatttgtcctctttactctgtgtacaaaaaagagaggattatactatcatagactgttgtttctaaacagaaactcaagctgggcacagtggcatacgcctgtaatcccaacactttgggaggccgaggcaggcggatcacctgaggtcaacagttccagaccagcctggccaacatggccaaacccc

SEQ ID NO: 678173 - DNA, 150 bp, Homo sapiens
gttcagttgcacagatgttccttatatataatgtaagacagttcatctctggtgaataagacacttacgtatcagtaatggattgtaaagatataacaatatgcaaagtgctatgccagatgctgagctaatatagactgctgagtctgc

SEQ ID NO: 678174 - DNA, 119 bp, Homo sapiens
cctgggttaaaactgaagggataagcctatacacagaatacggggtcagaggtataatcaggcagagggaagagcaggtataaaacttccagcacaggtatggagcgttggtgctgttt

SEQ ID NO: 678175 - DNA, 458 bp, Homo sapiens
ctgagaacacatgcgtatgtgcacatgcgcacacatagcgtacactatcagcacgtgaaaggcgctctgcacattgaagtcggcactgtgttggtgccttttttgttttttggctcggtggtttgactgcgaggctttttggatagaaatttatatggtagaaaggagctaacacttgggttttatatggcacaaaaaacaagtgttatactaactggactttattttttgaggtcttattaatgaagaacattcacttttgcattgacagggaattcaagaatgcgtttataaacccttaaaggaatcttgactaggcgtgcacatcctggcaagtgcccaatgggtctgaagcactaagctttgggtgggctctgtgataaacactttcactataacttacagataattctgaagcatactccaaggctgaaccactgatcaatttgcatgcatcc

SEQ ID NO: 678176 - DNA, 426 bp, Homo sapiens
  misc_feature (410)..(410): n is a, c, g, or t
gctgggattataggtgtaagccactgggtccagccccaacagttattttgggacatactagtgctttgcatctaatacagggaccactatccacgtgtagctactgagcacttgaaatgtgtctagtccaaattaagacatgcttttaagtataaaatataccccagatttcaaagacttaacatgagaagaaaagaaaggaatcttaataatgtttgttaaatgcctgagagtttttttttgaaatgaagggaagggaggggtagtaatggtagaacattgcccaagccgttgcttttttttttttttggacaaactttttgcccttgccactcatgctggagggcaaatggggaggtttgggttactcgaacctctgccttctggggtcaaagcaaacgttctgattnctttaatggaggcgaa

SEQ ID NO: 678177 - DNA, 352 bp, Homo sapiens
  misc_feature (326)..(326): n is a, c, g, or t
tgagacggagtcttgctctgttgcccaagctggactgcagtggtgcgatctcagctcaccacaacctccacctcccgggttcaagcaactctctgccttagcctccccagtaactgggatcacaggtgctcaccaccatgcccggctaatttttatatttttagtagagacagggtttcaccgtgttagccaggatggtctcgatttcctgaccttgtgatccacctgtcttggcctcccaaagtgctgggattacaggcatgagccacagcgcccagcccggcctacagtatttttaagcaatttttttttttttgagatggggncccgctgctgcaaaggctggagtgca

SEQ ID NO: 678178 - DNA, 228 bp, Homo sapiens
  misc_feature (6)..(6): n is a, c, g, or t
  misc_feature (33)..(33): n is a, c, g, or t
  misc_feature (41)..(41): n is a, c, g, or t
  misc_feature (113)..(113): n is a, c, g, or t
  misc_feature (128)..(128): n is a, c, g, or t
ttcatnccccaaagctcaaacaggcgtatcctnaccttgtntttttccaaatctacccaagcctgaggtggaggaatgatactttccccacaaatggtgggcccactccctgncccagaccctgaagnttgaagagttggaaacccaacggccaacggagagaaacatgatgagaagttggtggtggacacaaggctgcaagtaagcactgttagagcccatcagatc

SEQ ID NO: 678179 - DNA, 198 bp, Homo sapiens
ggattcatattttgcttccaattcaagggctttttgcatatcctcttctgaacaaagcactaatatgagtcgctttaggacatctcttataggttgattttcagctttaagcgtttcaagtgtggactccaattcagatgatgtaagttgcacagtttttttgaccgtctaaattcttactctcaaacaagaatgtcg

SEQ ID NO: 678180 - DNA, 527 bp, Homo sapiens
gggctgtatctagaggatccctataatgtatgatactggaaggcaaagaaatcttagagtctgggacaatagtttatttgtgcaaaaagtagaaaggagcaatgaagttaatttcagtagtatttttccctaagcacaatctgcaatagttatatgtatagacacgagactaattccaaaaaggaaaactatatatcaaagtggtatataaagttggtctctgcaaatcatttcctttgcacagtttttcaaaacaattgcactcatgtttcaaaaaccaaaaaccacatattcagcagccatgggcactatttttacacttgtcttcatctagtttatcagtgacttttttactttctgggtgtagcagtcccacattatttacgttgggtggtactatttaaactttcaacagttcaaactctgaacgaattacgcgataggtgactttcggagataccagtgcaggtggttttacatcccaggaacaaaaactatcaacaaaaagttcgttgggattctcaatt

SEQ ID NO: 678181 - DNA, 407 bp, Homo sapiens
tacttaatatttcagatataaccatttttattaatttctttgtaatgaccatgactgtgactattagtaacatttactaccagtagccataaaaatccccctcaaaaaggtgataatatatttcatagtcatcatggcaatttcatagtcatttaacttcgcgaggttcaaagcaagaaagctgtattttcacatgacacggatcacatttcacattgcacgcttaacacgaaagcaagttgaatcctcagttttcagacctgaaccaaatgttctagattactggtggactcagggaatttaaacatatctttatcatgattataccacaactgtgttctcttgctttctctctgtaaacatgttaaatccagaggagacagaagggaagacatttaatctgtatt

SEQ ID NO: 678182 - DNA, 196 bp, Homo sapiens
aaattgtgtctgctactagcccagaggagaaaaatgtgcctgtttgcagacttccagcgaaaagctgttgtagtttgcccaaagatgaagactataagcaagagcacagaagaaagcagaagtagagaggaaagacctaacagaacatgcggatctcaaaatgaaaggaactttacccaccagaaatagcaagtgc

SEQ ID NO: 678183 - DNA, 1317 bp, Homo sapiens
  misc_feature (880)..(880): n is a, c, g, or t
  misc_feature (884)..(884): n is a, c, g, or t
  misc_feature (890)..(890): n is a, c, g, or t
  misc_feature (924)..(924): n is a, c, g, or t
  misc_feature (975)..(975): n is a, c, g, or t
  misc_feature (978)..(978): n is a, c, g, or t
  misc_feature (993)..(993): n is a, c, g, or t
ggcggggggcacctactacatcgccctccacatccctgattcctgttgttatggaaactgttgccagagatggaggttctctcggagttatctgggaactgtgccttttgagtttcctcaggctgctggaggaaaactgagactcagacaggaaagggaaggccccacagacaaggtagccctggccagaggcttgttttgtcttttggtttttatgaggtgggatatccctatgctgcctaagctgaccttgaactcctgggctcaagcagtctacccacctcatccttctgtgtagctgggattatagattggagccaccatgcccagctcatagggttgttctcctaactgaccctgatcagtctaagatgggtggggacgtcctgccacctggggcagtcacctgcccagatcccagaaggacctcctgagcgatgactcaagtgtctcagtccacctgagctgccatccagggatgccatctgtgggcacgctgtgggcaggagggagcttgattctcagcacttgggggatctgttgtgtacgtggagagggatgaggtgctgggagggatagaggggggctgcctggcccccagctgtgggtacagagaggtcaagcccaggaggactgccccgtgcagactggaggggacgctggtagagatggaggaggaggcaattgggatggcgctaggcatacaagtaaggggttgtgggtgaccagttgctacttggcctctggattgtgggaattaaggaagtgactcatcctcttgaagatgctgaaacaggagagaaaggggatgtatccatgggggtcagggcatgactttgtcccatttctaaaggcctcttccttgctgtgtcataccagngcgncccagnctctgagcccctgggactgctgcttctatgaccncagtaagccactgccacaacgtctgaccctctccaacccatagtgaccggntgncttttccctaagccnagggcctcttgcggtcccattcttactccacaccagatgtacccagtatctagggtagtgccctattgtacaatgtgtcacacttgagcgcacgagcaaaagtgaaaggcactgggtcatattccttgcagactggagggtcgggtggtccgggttgagaccgttcatcccaagttgcaccgattcttgttttgacttgagcaagactgttgagcaacatggtgggatctgggccagaaccgcgctggggggccactatcagggtaccatttcccttaaggcgcaaagggtctccctttccaaaatgggtgctcccgcaacctc

SEQ ID NO: 678184 - DNA, 549 bp, Homo sapiens
gtactcacacgcagctatggattactagtcctacaggagaaaaaaaaaaagcctttggtgtcgagaaacattttgacctttcaaggggatcctcaagagtcattagcttccaagtggtctttcctaaaacaaggatgtcccagtggcgggatcatcagcatgcaagtgacccggaaaccacacacactttcatcacagccatggtcaggatctctgagatacacagagaaactggctaagaggctggcagactaattatgttccactataaggatattcccagaaataagaggaattacactttaataaagcaatgaaactatgcgggtaaccatgacgactggctggcaaattcaataactatttaatgcccctgaagagttttttttcctttttttaatggccagtaagatcagagaatttatgagagggaactgagaagcatttatgcctgattggtatgctcagacctccaaagacgtcaggggtgtgctaagcacattataataccaattcacagcaatccttgaaaatgcccttctgggtacc

SEQ ID NO: 678185 - DNA, 144 bp, Homo sapiens
cgtacttcccatgcatcagaagcaggtgaaggatcgtggggttacagcccagacgccatgaaagctggcatggccctggagaaaaagctgaaccagtgcccttttggatcttcatgcccgtggtgttctgcccgctacggtacc

SEQ ID NO: 678186 - DNA, 1521 bp, Homo sapiens
  misc_feature (1084)..(1084): n is a, c, g, or t
  misc_feature (1088)..(1088): n is a, c, g, or t
  misc_feature (1094)..(1094): n is a, c, g, or t
  misc_feature (1128)..(1128): n is a, c, g, or t
  misc_feature (1179)..(1179): n is a, c, g, or t
  misc_feature (1182)..(1182): n is a, c, g, or t
  misc_feature (1197)..(1197): n is a, c, g, or t
aggagaaaggcgagacgacgcgtggaggacgtgggggggcactctagtattattgcggctctgcgataaatctcgcgtgcacaacgctgatatgttattgtcatacagctcgttcagctcatgacaatcagaggtgttctactacgtcagtgattgctgggcgtacgctggtgactcctccgaggtttgcgcttcacgagggtcgtatgaagtacgcgccgagacgtggtatgtacgtcgccgtaccaagagaataagggtgagacgcgtccacgctagcagcaccaataggggtacgacacctgagccaagaagagcatatgaaatatagtactattaggtatatattaattgagagtagggatagtcccgtgagtgtcgtgcctaagagcttagacctttggaagcgtccctgtgggtcttcaaaggcgagtactaacccaaccttcagggccttccctggttggttcgctggggaattttatggacatttggtgtaagccaaccaatggcccaggttcaagagggttgaactccttagatttgagccctgactcaggtctaaagagtggtgttgtgtggacagtcgcgtgccacctggggcagtcacctgcccagatcccagaaggacctcctgagcgatgactcaagtgtctcagtccacctgagctgccatccagggatgccatctgtgggcacgctgtgggcaggagggagcttgattctcagcacttgggggatctgttgtgtacgtggagagggatgaggtgctgggagggatagaggggggctgcctggcccccagctgtgggtacagagaggtcaagcccaggaggactgccccgtgcagactggaggggacgctggtagagatggaggaggaggcaattgggatggcgctaggcatacaagtaaggggttgtgggtgaccagttgctacttggcctctggattgtgggaattaaggaagtgactcatcctcttgaagatgctgaaacaggagagaaaggggatgtatccatgggggtcagggcatgactttgtcccatttctaaaggcctcttccttgctgtgtcataccagngcgncccagnctctgagcccctgggactgctgcttctatgaccncagtaagccactgccacaacgtctgaccctctccaacccatagtgaccggntgncttttccctaagccnagggcctcttgcggtcccattcttactccacaccagatgtacccagtatctagggtagtgccctattgtacaatgtgtcacacttgagcgcacgagcaaaagtgaaaggcactgggtcatattccttgcagactggagggtcgggtggtccgggttgagaccgttcatcccaagttgcaccgattcttgttttgacttgagcaagactgttgagcaacatggtgggatctgggccagaaccgcgctggggggccactatcagggtaccatttcccttaaggcgcaaagggtctccctttccaaaatgggtgctcccgcaacctc

SEQ ID NO: 678187 - DNA, 216 bp, Homo sapiens
atcgatctagaggatccctggcaggctctctacctgtggcaattaatgtcttcgtaagagaaatgtctattcatggtcctttgcccctccctccccacttctttcttttttttttttttttttttttttggaaaaaaaacccaaattggccccggggcggaaggggaggggggggggccaagcccagggaaccctcaacctctgtgggtccaggca

SEQ ID NO: 678188 - DNA, 755 bp, Homo sapiens
tggaaagggagtctcactctgtcaccagaatgggagtgcggggtcccatctcagctccaggcaacctctggcctccgggggtccaagaaggttctctggcctcagcctctggggtagctgggagataacagggcacgcgctgccacacccagggtaattaattatatttttttttggaaaacaagatgtctcgcattggtgtgcccaggtgggactggcagggggtagatctcggctcactgtggaacctcggcctccgggggtccaaggcagaatttctcacaagcctcaggtccccctggagtaaagatgggagatacacagggcgcgccgggcacaacaaagcgccccaggttaaattttttgggataatcctcaaggcggagaggatggggggttttcccggccatttggttggcccaacgggtgggcatctaccacatccatctggggaccctcgggggagtacaccccggcatgcggacctctcccacaaaaagggggggagacttaacaggggcgtgacagtccaaaggcccccggggaccattaattcaagccactttaaacagcaataattatgccgaagtttgggtcccgggcgttgtggtggaacgcaatggcaagggggagcaacgacgacaactgtggggacaacccaggggggaggacaatcccaggtgtgccaggtgatgtacaagaaccgcccggtggaacagggggaaaacccattctttctaagacatacaatacgt

SEQ ID NO: 678189 - DNA, 699 bp, Homo sapiens
ggcggggggcacctactacatcgccctccacatccctgattcctgttgttatggaaactgttgccagagatggaggttctctcggagttatctgggaactgtgccttttgagtttcctcaggctgctggaggaaaactgagactcagacaggaaagggaaggccccacagacaaggtagccctggccagaggcttgttttgtcttttggtttttatgaggtgggatatccctatgctgcctaagctgaccttgaactcctgggctcaagcagtctacccacctcatccttctgtgtagctgggattatagattggagccaccatgcccagctcatagggttgttctcctaactgaccctgatcagtctaagatgggtggggacgtcctgccacctggggcagtcacctgcccagatcccagaaggacctcctgagcgatgactcaagtgtctcagtccacctgagctgccatccagggatgccatctgtgggcacgctgtgggcaggagggagcttgattctcagcacttgggggatctgttgtgtacgtggagagggatgagggagtgccggtagctgtgagcagcactccttcatgctcctcacagctaccgccactccctcatagctgtctcctcaagtgtcagctcagccgcctcgtgcctataccttttccagtacaggccactgcttgcaggc

SEQ ID NO: 678190 - DNA, 162 bp, Homo sapiens
atcaggatgtacattttttggcatatctccacctcgcccacctgccctgtgtgccctatcatgacgaacgtatgtgctttctctagccccgttgaccggggggtaccgtagctcgatcttcgttaatcctagctcatagcctattctcctgtggtgaacaac

SEQ ID NO: 678191 - DNA, 842 bp, Homo sapiens
gctctttttccggtctggaaccatggagggtgtacgaagacgaacgatagaaggaggttcctgctgtgccagagaacccttaagaatacagcgaaggaatttcgcagtagctgaatgatcaagcgcctgagaacgaagtttgccctaaaaagatgctctcgaaaaggcaaggtaggaagcttatctatgataaagcaaagcactatcacaatggaatatgagcagatgtacagaactgaaattcgaatggcgaggactggcagaaaagctggcaacttctatgtacctgcagaatccaagattggcgtctgtcatcggaatcagaggtatcaatggagtgatgcccaacaggttctgaaaggtgttgcagcattcttcgccttctgtcgaaatcttcgaatgggaacctttgtgaagctcaagcaaggcttcgattaacatgctgaggattgtagagccatatattgcatgggggtacccctaatctgacgtcagtaatatgaactattctacaagcgtggttgtggcagaaatcaactaagaagcgaattgctttgacgagataacgctttgattgctctgatctcttggtaaattatcggtatcatctgcattggacggattcgattcatgagaatctatacgtgtcggaaaaccgcttcatcagaggcaaatcatcttcctggttggcccttcaagattgtctgtctccacgaggtgtgaatgaagaaaaagaccacccatgttgtagaacggcggagatgctggcaatcagggcaggaccacgatcaacaggttatgagaacaatgacctacggtgtctaccaggattctttttctag

SEQ ID NO: 678192 - DNA, 715 bp, Homo sapiens
gaggaacgacatggcggtgctctggaggctgagtgccgttggctgtgccctaggaggccgagctcggttgtttcgaactccagtggtcagacctgctcatatctcaggcattgcttcaggatcgacctatacccataatggtgtgcgacgtgcagcacatagctacttgtcaccgaggccgaccattgcgtgtgactcacaaaggctgcatctctctcactggacatagacgagagggttgtcagtgttttgctcctgggtctgcttccggctgctctattggaatcctttgctcctggaaggactattccctgagactgtagacctcactcttcatggtcactgggggcctatggacaagtatgttactgaactatgttttgccactggggatgccgttggccagaaagctggccaatggcagaggcttttggctactctcagctttatcctttgctgggctatgctattctcagctatcacgagtgtggggcatctgtcaaagctgtggccatgctgtggaagctctgaccttctggacttcatacttggtaggaattgatgttgtgcctccgtggccatctgcttgtcatgccattaagctcacaagtaaggcagtgattaacagataaggtccatggggacaggctgcttctcttactcacgagattatttcagaattcactctcgcggcacacgttgagaggatttatct

SEQ ID NO: 678193 - DNA, 405 bp, Homo sapiens
ctccgtatttatatatgtgtatatatgtgtttgtacagaaagcaatacaaaagtctatttttatacattatttcactgcatgtaactaaaatgaaatgaagatttgtttgtatacttgaaaatgtttgaatgtgagcgcaagtgtggggtgtgtgcatatgaagggctgttttaatcggtacagatttcacagtgtatacaaactattgttggtggtccagttgtctgttatcattattgtgaacaccgaaatactctcaacggaaatggcttttttacatggattttccatgagtgactgtgaaatgtttcttgagaccttttaaagactttctccttgtcaacagacctttttgttacaattttacaaaaatgttgcattaaaaacatacatttggaaacaca

SEQ ID NO: 678194 - DNA, 554 bp, Homo sapiens
  misc_feature (55)..(56): n is a, c, g, or t
  misc_feature (68)..(69): n is a, c, g, or t
  misc_feature (77)..(77): n is a, c, g, or t
  misc_feature (103)..(103): n is a, c, g, or t
  misc_feature (109)..(109): n is a, c, g, or t
  misc_feature (165)..(165): n is a, c, g, or t
  misc_feature (168)..(168): n is a, c, g, or t
  misc_feature (203)..(203): n is a, c, g, or t
  misc_feature (228)..(228): n is a, c, g, or t
  misc_feature (268)..(268): n is a, c, g, or t
  misc_feature (274)..(274): n is a, c, g, or t
  misc_feature (276)..(276): n is a, c, g, or t
  misc_feature (286)..(286): n is a, c, g, or t
  misc_feature (301)..(302): n is a, c, g, or t
  misc_feature (381)..(381): n is a, c, g, or t
  misc_feature (385)..(385): n is a, c, g, or t
  misc_feature (394)..(394): n is a, c, g, or t
  misc_feature (401)..(401): n is a, c, g, or t
  misc_feature (434)..(434): n is a, c, g, or t
  misc_feature (454)..(454): n is a, c, g, or t
  misc_feature (480)..(480): n is a, c, g, or t
  misc_feature (487)..(487): n is a, c, g, or t
  misc_feature (492)..(492): n is a, c, g, or t
  misc_feature (494)..(494): n is a, c, g, or t
  misc_feature (513)..(513): n is a, c, g, or t
  misc_feature (534)..(534): n is a, c, g, or t
tgcatataggtaatggttaccagatactcattttttttgcagaaatttttttttnncccacccaaatnncctttgcnatctgtgagggtgaatgtacctagtntttctnagaaaccatcaattcctctcaacaggttttaacattttactctccaattatctganatnaagttaccaacagccttgagaagaattaggaagtntttctaattttctacctcacctccnggcagtctcaggattcttctcatcccaggtattggtcttncaaaantnttcttaaaanagggaaaactttaannatttgtgtgtggtggggcggtggggggcgggggagagataggaacaactgtagtatttaaagaggtttcttttaatgcnagtnaaatgcagnaatatgntgtgtccccttccctttgaataatctctccctntctaatattttctgtgtgcnctgtgtctgtttctttgttttccctnagccgangtccntnatcccgtaaaattctttgnctttagcacattttgcaaatnatttgtctccctctttaaga

SEQ ID NO: 678195 - DNA, 898 bp, Homo sapiens
  misc_feature (40)..(40): n is a, c, g, or t
  misc_feature (125)..(125): n is a, c, g, or t
  misc_feature (156)..(156): n is a, c, g, or t
  misc_feature (173)..(173): n is a, c, g, or t
  misc_feature (191)..(192): n is a, c, g, or t
  misc_feature (197)..(197): n is a, c, g, or t
  misc_feature (203)..(204): n is a, c, g, or t
  misc_feature (214)..(214): n is a, c, g, or t
  misc_feature (223)..(223): n is a, c, g, or t
  misc_feature (230)..(230): n is a, c, g, or t
  misc_feature (245)..(245): n is a, c, g, or t
  misc_feature (248)..(249): n is a, c, g, or t
  misc_feature (255)..(256): n is a, c, g, or t
  misc_feature (272)..(272): n is a, c, g, or t
  misc_feature (278)..(278): n is a, c, g, or t
  misc_feature (284)..(284): n is a, c, g, or t
  misc_feature (294)..(295): n is a, c, g, or t
  misc_feature (304)..(304): n is a, c, g, or t
  misc_feature (311)..(311): n is a, c, g, or t
  misc_feature (314)..(314): n is a, c, g, or t
  misc_feature (322)..(323): n is a, c, g, or t
  misc_feature (334)..(334): n is a, c, g, or t
  misc_feature (336)..(336): n is a, c, g, or t
  misc_feature (610)..(610): n is a, c, g, or t
  misc_feature (693)..(693): n is a, c, g, or t
taaaaaaaaaaaaagtgtttattataggcaacaaccccanggggaacgggttttggtctaccccaggggagtgcaatttttcattctcccaatggggggcctcaaccttgaggcgaactccactnggcgaaagatgcctttctaggaagcagagcntccctgacggggctaanatagttcagatttgatcnntaggntcaagnngtaaagaccntagtgtagntctcagngaagtcttgggcttntannggcgcnntgggttcgcccaaagncaaaantggganacggtataanngtgggtggnctcccanaantcccgaannaacataacgcngngagaagaacagacgccctgggcgcgcattaccactttggtttccctatggagaaaccctatacaggcaacaaaaacaccatcgtggcgaaaaagaccctgtggaccctatcaggtgtgcaccaccaagagtatccctatttctccaggagaccactattttctggggtgtctccccatgtgtgttttattgcgcacaacgggtgtcctctttggcgccctttagaacagagatcttggggttggctcataataattcagagaaggggcggatangttatccacaagggcgatttaatttcccctccaggagaccatgttgcgaccttgtgttgtgtggcgcaggatactcaaagagngttctggagagccgtgatgataagacgcccacgcgagagtgttggttggcgccagagttcacctcttgtaggaggggcgattgagcctatgaccagtgtcctacatgaatcgcaccagggcgcgttatttgtgcccgtgtatgaacaacgtttggcgacccgaggggtctctcccagaagaacacagtctctggggagaatccga

SEQ ID NO: 678196 - DNA, 226 bp, Homo sapiens
agaagtatagcactgcgaagctaagccatgaaatggcttcagtgacctttccccatcgtcttggataagacccccaaggtcttaactcattccagcatttactacaacatgtctagaagcccaaagtctcaactgagacaaagctgcagtctctatctgcgcccctggacgcgctctgacaatacaacagcaggttaaccacttccaaggtacgattgtccaggca

SEQ ID NO: 678197 - DNA, 241 bp, Homo sapiens
ctgagtatataagtttcctctcttaccgaagactgtcagaaaagaaactagtgggatacgaacaagttatataattgtggtctgaacacagaccctaaactgaagttctgtttaaatatagttacatgaatttctctgatactaatgtactcaacagccaggtataaactatatctcctagataacatattccatgttttgttccaatcacacatacttgcttaatgaaggcatatcagaa

SEQ ID NO: 678198 - DNA, 908 bp, Homo sapiens
tgggattactaatggggtatggaaagcagtaagaggttccaggaaaaccaatattaagaccagttctggagggttctccccaaagataaatttaacaggctccagcttcaagtggtttactcaaaatacaaaaagaaaaaatgtaagagggttggtcttttccgagagggcaaatcgggaccctggcagggctggagggaaaaaaagctacattcacacacaggagggtgggggtgcctcccggaggggcgtgggggctcatagggtggaccgcctgtgcccgagctggcagcgcgcctccgggcgtgggtgaggccccgagaacactcgcgggccagagaggtgctcgtggagcgagaccacacaagaggtggtggggagaacagaagggacacccaactctctggggccacacagagcggcgagaaacccggaggggacaccagaaagtggggggactccgtgggagtctcaccaaagatgagagctgtgcctgtgaaaaaggggtgggaatagaggccgggccctgtgcggcgcacaatcagagtgggagaggtggcccgtggagcgggcctcccccaaaggctctgtgcggcacacccggggtgggatacaccgggtggggacagcccacagagggggaaacaagagcacacgatgtgggcccatagcgcgcacaagtgccgcggggggtgaaacctcacagagagagggcaacagaggcgcgaaagccttgaggggggagggagaaaactccatacatcagacgtgaggtaacacccccgaaggtgcgcgcggaaacaaagctggaggaccctcccggccagcactcgctgcacagatcgcgcgagcccccaaccccaaaccacaacgcgccctacgaagtgggctccacccccgagagcgga

SEQ ID NO: 678199 - DNA, 771 bp, Homo sapiens
tgttcacgtcgagacgctcgcctgtggcagatgcaccgaatatgcttacaagctccgtgttaatgggaccagcatcacgaagatgaaggacaatgttgctcaaagcatttacatgtagcctaaaaacgaggtcccgtggctgatgccccttgcagccttggtagcagtgacctgggaatcctgctgtcctgtgggacaagatggaggagcagatgacatcttccatgtcaaggctcgtaaagtacgtgaatgcagttctcagccgcggacgctggtctatgtgagacatttcgcgagaagaagcattgatggtattcagaacacttcaagttagacttgggatatatcatgcgtcaacatgaaagttgtcatgaatgggagaagagcctattttgttgtggtaacaacagttgagagcgagcaccaagtgcatttagttgaatgaagtcttcttggatttgacccaagataaaaaggatgtgtaggaataaataacagtcttacctaagatcattaggtagtgaatggtgagccagtcgttgaatatcttaatgcagattttttgaaacaaaaacgtaaaatgagtctatctgtattttagaggattcaacggatcagtatttccctgggatgggttttttgaaatttgccccttaggaggtactccaggtattcattttctcgattattaaagtatgttatatttgcacaatcagaaaaggttatctaagtgtgattataccggggggtttacaagatgtaaggcattag

SEQ ID NO: 678200 - DNA, 205 bp, Homo sapiens
agaccctgccgggcctatgctgagcagtaccgaatagacgcccggaagttagcacacctgtttcagctagtctcgcccttggacctgcggggcccacacgggagatcctcgccgaaagggacgtatcaggctctatggatgacaacttggaccagctcatcagagtacaaagcggtaggtagagcggcctcgaatattcatgtat

SEQ ID NO: 678201 - DNA, 352 bp, Homo sapiens
gtactggcactctagtcaggtcacaatccacgtgactcagcccagtctcagcgtcaaaagctttcctgtagtgcaactgcctctttcacttggattccagttagctcttcctgcttactggttaactgacggccgaggatagttatgattcagaagctatccaaagaaataggttctatttcaagattaatttggatgttaaggccggaacacgatgagtctatcttttctgggtcctcggggttgccataggtcttaacttgaggcaaaacaacagctcaaatcaatataaaagcatactctatggaatcttccaggcgaagtgtaacccaggtttaagcagggttttctg

SEQ ID NO: 678202 - DNA, 811 bp, Homo sapiens
  misc_feature (210)..(210): n is a, c, g, or t
  misc_feature (254)..(254): n is a, c, g, or t
  misc_feature (346)..(346): n is a, c, g, or t
  misc_feature (444)..(444): n is a, c, g, or t
  misc_feature (452)..(452): n is a, c, g, or t
  misc_feature (486)..(486): n is a, c, g, or t
  misc_feature (529)..(530): n is a, c, g, or t
  misc_feature (638)..(638): n is a, c, g, or t
ttcctgagccaccagacaggaaagggtagcagaaaacagcttcactcctcaggaagtaccatggacagacgcctaccaggggtgacaaagcagtgcagttggattgtaaggaaaaattccggaattaatgcatcctaatgaatgttgtccccttcaatggtgttaccttaggagctgaacattcaattcagttacaccactatgactaanaacagtttggatctcttagtattgcctttgaaactgcaacatangcaactcaacaatattagttgcattcctttatagacataccatgtcaaagaccgttttctatcaagtgggcatcattctgtctatacccttngcatctgtagactctgatgtgtgatttgtataagcagctgaactatgacatgactctgagagacatctcactgacttataagcaatgtccatatactnatggagtnttaggcatctgggccagatttatgatatgatatnggcattatcctctactcttaatctgatgatgttgaatggctannatagtacttgtacatgtcatgtagcatgcatgattgacctgaatgtggtgattctgacccaggtttagaactgccttgaaagatacgggcatttaatggcaatgtcanggccaatgaaccaaacttggttaacaaaggtaaaaaaaaaaactggaattccggcgattgcagcctttaaaaaaaaattaaaaaaggaagggtgggcacacaaagggggcggaaatctctttgggggcggagaagggcttaaaaaaaggttagctctccatctggggggagaa

SEQ ID NO: 678203 - DNA, 875 bp, Homo sapiens
gagagtctgcggtggcgggacggtggcgagagccgcgggggccgtcggaagccaaacttccctgtcttctccggggccctcgctcccctcctccccacaaaatcagggatggaggcgcctcccacgtgcatcactcttagcagcccatccccagtgaaagagtgtccccacctagagactaccataatctgctcacccaaatcaagctaacgccacatgcactcaccagaggcacattgcgtcggccacagtgggccgccattgtatgccacctggtgcttggtgcgtaggccacctcgacggatgtcatggatttgtagactgagaggacaggggagtagagcatcacgagatgctgggaacccataaccaccaaaatactacaacagaagaaacaacacgcaggcagggaaagctccaggcgatccagcacagaggaaacaccacacacggcacagcagcccaatgcactccgagcaaacacgcgatcgcagccacacaagacaaaaacatccgtagcgagcaagcaacggccacatatcgcagcaaatagagaggctaggcgcgcgcggctttgagaacgtttgatggagcgaacatagagaagtaggattacgtctcatgttccacatctagcgcgcgagaattggtacgcagcaactcgatagaaatagaatcgtaggtaagtagaatcacgattcggatcatcatgcgccccctcgagcaagaggagcacgcaatcgtccccataggcacagggacgacccttacgtaggcagagccactcagaactaggcgactgcgatagaccaagtcgccagacccagcgtcagtggcaaagagcgtcagtatgcatccatctaagggcggcacat

SEQ ID NO: 678204 - DNA, 104 bp, Homo sapiens
agcggctactggcagaagtcggagcatggaggatctagctggggagatgctgtgtagggagaactgctcagtgctgtggtagtgaggattatttaaggatgtta

SEQ ID NO: 678205 - DNA, 914 bp, Homo sapiens
gaagagaactggacggcgatgtgcgacggtctgcagcaaatccagctgctgctgcggctggctgtggctggcagtgacagactgtgcgtgtgactgacggatagagagccaccatgcacgatggagctgccatggcctggacagccagtggctgccagatacgaaaactggcgatgatgctgggcgagaacgtccactgctgtggccggctgaaagctggttccttgtggatgaagcactggtataagcatgtgggacggcatacagtgcagggaggggaccaggactccagcaccataccctggctgcatcaacaatgccacactctttcaagatgagataaactgtgcgcctcaaggaggcgactggctggaaggcgagcgattatgtgactgctcccagcaagctgcattggaccttagcatggatccgactgagtatggctctagagacactggccagacaccccattcgacctgcaacggtcatagacgctgaccaacatccagaactcgtccacactgtacccagctaccccctgctgccttgatccgacacacatgcatctgcctcaactctcaacaacttgctttcaagacttacacgccgcaatacgcgaataacatattatggacctaggtatctgtcgacacatcttacccggacgctgtgatttctcgtgctctagacaccgcagcgaatcgaaaatccgtcctttgcctgcccaaagcacagatcaataaccggccctccattagcccttacgcgtttcgtactgaccaccaccctagtcccgtgatccttctcacgtgccctagcaccattcccacctgtggccagtccgacaccagtcactttcaaatcaaccgtggccacaaaccagaggccacttgggcctagagccaccagactgt

SEQ ID NO: 678206 - DNA, 833 bp, Homo sapiens
aatacatcttccccgtaaaaataaacccctcatgatatttaatactagggccaacacagcacatcttcttcttttgcctcggcttccaggattccggtatgaaaccgctgccatttgcactgcacactaatgacaagctggatgtttgcatgaaagccaatatgttcctacactgctttttgagacaagtaataatcagtctgtcatcaatgtcatgctgcaatcaggctttgacaaggtttgcaaataactcgaaaggaattgctcattcctgaacactacagatcaaaaccagacctgaacataaactagaagtctgctgagtgtaaactgcagcatcttatgaaacgtgctgcgaataagcagaagcaacagtccatggaacaaccaagccttagccacccgaaacccctgtctataattaaaaaaaaaattttttttttgaatatagctaccttcactgactaacactaataaacccctcgctctaaatgacaatgttatccctaaaaacacccaccctggctagaattaccacctgtcttattatcgagaatcaccggcaacccaacataaatacccattattcctgcggtttgttctttacattaaagacatgagatggcctctattctgggctttatccatcatttctttacggaataagatctccgccccctaaccttgagacaaccaatatgattcttgatttctacgtccttccgtaccgtcctcctttattatgatcgatgcccgtattaattatttgacaccatctatccaaacaaatgctctttgaacgcctacaaaaccctaaacatcgatgtatttat

SEQ ID NO: 678207 - DNA, 496 bp, Homo sapiens
  misc_feature (1)..(1): n is a, c, g, or t
  misc_feature (379)..(379): n is a, c, g, or t
  misc_feature (382)..(382): n is a, c, g, or t
  misc_feature (454)..(454): n is a, c, g, or t
nttccggcggcagagctccaccgctgaggccgacgaggccgaaagtttatttattgaaaatcatatgtataacctagcagacgagggagcagatttaaacacataacttcaagccatttctgagaacatacatcaggagctctgctcagctagagtcagactccagctccagcccgactgcgtgcggggacagcgcccgcgttgatgaggaccagccccactgcggggggaggcggggtcaccctgggaagggggtggggcgttgtggcatattaagtctaaaccagatgaatgtgaatatctctttgtgaatcatttatttcactctgtgccatccagggcagcaatcagattgtgggatgcggggggactggggccncanccgggccacctcttccgacaggcgtctgctctccaggagaagctgggtctgcttgctgaggagctgcaccanctgctgggctgtgggctggctgtgcttatccagctggcttag

SEQ ID NO: 678208 - DNA, 1094 bp, Homo sapiens
  misc_feature (1034)..(1034): n is a, c, g, or t
  misc_feature (1094)..(1094): n is a, c, g, or t
gagaccgttcttcgaccgagagtcgtcggggttgcctgctacaacagtgcttggacggaaccgggcgctcgttccccaccccggaccgatggaccatagccagccttccgtgcacctcttcagcgcaccctcggtatttggcccaaaggggccctgcgggtggattcaagtgcttggtaagacaatcacgacagaggccggcgggctactcttccattaggtcgccgcgcatgaaggacgggtgtgcaacactcgcaagggtgcgctgaaaagtataccaggccacagggcaatcatagtaggggcggctatttaaacgcggctacagaatcaaacgcgtgagtctgtttagccacatctatagtgtatatgactaggcgggtggtataacataggttggggaccgggaaggaattggtggtttaagcaaagaattgtgggcaaaggagtacgtttgtctattaacgaatagtgcttattgacgaggcgcaaggagaaactattgcttgaagaaatgtggagtatgaaatgctgtggaagacaccagaagtacgtgtgacgcagaaagtgtgacatcagaggatatataagagacctcgaagaggtgtgtgtatcactgtgttacgatcgcggtggccgaagtgctcgatggtaggtgtcgtccactcagtgtgggaacaatgatttgacatcagtcacttagtgcgaactggcagacactgtggtcggtgacaaagtggtgccccccatcgtgtggggccgtctctggaagacgatctttaactgtcatgaccacgttgtaagatctatccaggcactgtgggttgccacgttgaaccatatgtggcaatgatgggcacgcccagaagttgggtgtgaggacaatattgctctgaccgagcacccctggcagccggggtagtagactaagctgcgactattaccataggcgtgggtgtttccgggctacaacgctgtagtcatgggggtgctaactttaatgatggcagaagcgatcagtgtggtgtgactcngatagcagtgtccacacaaagacaaacatgtgcgtgtggtgaatacatggcggcggacgn

SEQ ID NO: 678209 - DNA, 419 bp, Homo sapiens
ttggggcttggtagtagcttgttcgtttgtttgttttttaaaaataattttaacttattttagattcacagggtacatgtgcaggtttgtcacctgggtatattgcctgatgctgaggttggggtatgattgatcacatcacccaggtactacacatagtacctaatagtttttcagcccgccctgctctttgtgtgtgtgtgtgtgtgtgtgtgtgcgtgtgtgtgtgtgtgtgtgttgagagctggagcctcaccctgtctcccaggctggagtgcagtggcgcaatcttagctcgctgcaaactctgcctcctgggttgaagcggttcccctccctcagactcccgagtagatgggattgcagatgtgtaccaacacacctggcgtcgccctctttatgtacgtgagtacccatgt

SEQ ID NO: 678210 - DNA, 2245 bp, Homo sapiens
gagctcctggggcaatgtggaccagagaatgatagtgggacttcctggctgagccttcaaggtctcctttgtctctcctccttgtcccctccctcacaggcctgcagcccactgatcatcttccagcccttggccctgccatggccactccggcctagacagctgcttctcagcaggaggtctgtccttgaccaggctgaaaggtgacctcggggtcctgtccatcaccaccttgtatgtccatcagcatttatcaataatccctagtcaccttgtttgcattcctcgatcagtttacctgcaaactagctgcttgctagttaacctcacgaggactgggggtggcttgcggtcccactgtgttcccagcttccagagtgacactgcacctagtaggcactcaaatatctgtgaaagggtggatgagtgaatgggttggaggaaacccctccctattcatgtccattctgaagataagaaaactcgctgcttctacctgaagggaaaaccttcctcctccaaaaaccctcctgttctatatgaggcttagaaaccaaaggcaaggacgtttctttcatctgcctttcatcctgcaaaaagccctccactcaaggcaagaaagggcactgaagtttattgagtgggagacagcggcaggtgggagaccggggagggaggagagaaagggaaattcaggaggaaggagtccagcgtggattgctccaaagctcacccaccacgccctgactgcaggtgtgattcggggcccccgtggctctgctgggtccaggtgcaagcaggcaagaggtgtggcgtcagctcgattcgcaggccctggactactgtctaaacaggacaggcccgggcaagcagggcaggggcgtctgcaatgatgggggaggactctgctgcttcttaagctccagcgtctcaagccagggcgagacagcccgccggccgcccggatctccacctgccaccccagagctgggacagcagccgggctgcggcactgggagggagaccccacagtggcctcttctgccacccacgcccccacccctggcatggccgaccagctgactgaggagcaggtcacagaattcaaggaggccttctccctgtttgacaaggatggggacggctgcatcaccacccgcgagctgggcacggtcatgcggtccctgggccagaaccccacggaggccgagctgcgggacatgatgagtgagatcgaccgggacggcaacggcaccgtggacttccccgagttcctgggcatgatggccaggaagatgaaggacacggacaacgaggaggagatccgcgaggccttccgcgtgttcgacaaggacggcaacggcttcgtcagcgccgccgagctgcgacacgtcatgacccggctgggggagaagctgagtgacgaggaggtggacgagatgatccgggccgcggacacggacggagacggacaggtgaactacgaggagtttgtccgtgtgctggtgtccaagtgaggccggcgcccaccatgctcctgggcgcccacgcggcccacagggcaagaacccggggcctcccgcctcctcccccatccccctgcctcccctgggcactgtggcttcctcctgcgcctggttgattcagcccacctctctgcatcccgcttcccgcgtctcttctctgcactcctgccgaccttcccacctgctcatctgaatgacacggaacgctcccactgcaggcaaaccgtgacgccctccccactcgggagaagcagagctgaccttaggaccgagcaccagggcaggttgcgctgactctgcggccctccaggacggacaccgggtgaccccttagggcacccaggcaagatccctaagaggcacccaatgcccaggccaggggggctgcagccctcagcccccgccaggattcccgcaggctcctggactggaagctccctccgcggtcggattctggagggtgggaggcatcttggcctgcagtaagcggtgctgacggggactctggccacagaggtcaggcctcctgaaaacagcactgccttccgcgctgccccagcttgccccattccttgtccgccaacccaccgtgattcatcttctgaagctgggagtgaaactgggtcagctgtaacctgttcctattcatctggaaggagggaggcttggatgagcaggggatgagagctgcagggaaataaatgagatattcgtcctta

SEQ ID NO: 678211 - DNA, 352 bp, Homo sapiens
taggccggtagataagtcaggtagtaaataggagagcaggagtgtgccatcagataatacagcatatgaggcggagaggaggaccaattgatcgacactgtggtggatttggcgtgaacaattatgtaccaaattaactggcaaatttctatgtgctgtcccatgtgcttctttattaaaatttccccaatgaaactctcttgtggactatttccagagctcagaggtgtaaggcagcgtgtggtgtctgagaggcaatagcgcatcatgggtgatttttattaccaggtccccaagaagcaggtgagaggctctgttcctgtgccgtctgagctgactggtgacctgtgga

SEQ ID NO: 678212 - DNA, 2749 bp, Homo sapiens
gagctcctggggcaatgtggaccagagaatgatagtgggacttcctggctgagccttcaaggtctcctttgtctctcctccttgtcccctccctcacaggcctgcagcccactgatcatcttccagcccttggccctgccatggccactccggcctagacagctgcttctcagcaggaggtctgtccttgaccaggctgaaaggtgacctcggggtcctgtccatcaccaccttgtatgtccatcagcatttatcaataatccctagtcaccttgtttgcattcctcgatcagtttacctgcaaactagctgcttgctagttaacctcacgaggactgggggtggcttgcggtcccactgtgttcccagcttccagagtgacactgcacctagtaggcactcaaatatctgtgaaagggtggatgagtgaatgggttggaggaaacccctccctattcatgtccattctgaagataagaaaactcgctgcttctacctgaagggaaaaccttcctcctccaaaaaccctcctgttctatatgaggcttagaaaccaaaggcaaggacgtttctttcatctgcctttcatcctgcaaaaagccctccactcaaggcaagaaagggcactgaagtttattgagtgggagacagcggcaggtgggagaccggggagggaggagagaaagggaaattcaggaggaaggagtccagcgtggattgctccaaagctcacccaccacgccctgactgcaggtgtgattcggggcccccgtggctctgctgggtccaggtgcaagcaggcaagaggtgtggcgtcagctcgattcgcaggccctggactactgtctaaacaggacaggcccgggcaagcagggcaggggcgtctgcaatgatgggggaggactctgctgcttcttaagctccagcgtctcaagccagggcgagacagcccgccggccgcccggatctccacctgccaccccagagctgggacagcagccgggctgcggcactgggagggagaccccacagtggcctcttctgccacccacgcccccacccctggcatggccgaccagctgactgaggagcaggtcacagaattcaaggaggccttctccctgtttgacaaggatggggacggctgcatcaccacccgcgagctgggcacggtcatgcggtccctgggccagaaccccacggaggccgagctgcgggacatgatgagtgagatcgaccgggacggcaacggcaccgtggacttccccgagttcctgggcatgatggccaggaagatgaaggacacggacaacgaggaggagatccgcgaggccttccgcgtgttcgacaaggacggcaacggcttcgtcagcgccgccgagctgcgacacgtcatgacccggctgggggagaagctgagtgacgaggaggtggacgagatgatccgggccgcggacacggacggagacggacaggtgaactacgaggagtttgtccgtgtgctggtgtccaagtgaggccggcgcccaccatgctcctgggcgcccacgcggcccacagggcaagaacccggggcctcccgcctcctcccccatccccctgcctcccctgggcactgtggcttcctcctgcgcctggttgattcagcccacctctctgcatcccgcttcccgcgtctcttctctgcactcctgccgaccttcccacctgctcatctgaatgacacggaacgctcccactgcaggcaaaccgtgacgccctccccactcgggagaagcagagctgaccttaggaccgagcaccagggcaggttgcgctgactctgcggccctccaggacggacaccgggtgaccccttagggcacccaggcaagatccctaagaggcacccaatgcccaggccaggggggctgcagccctcagcccccgccaggattcccgcaggctcctggactggaagctccctccgcggtcggattctggagggtgggaggcatcttggcctgcagtaagcggtgctgacggggactctggccacagaggtcaggcctcctgaaaacagcactgccttccgcgctgccccagcttgccccattccttgtccgccaacccaccgtgattcatcttctgaagctgggagtgaaactgggtcagctgtaacctgttcctattcatctggaaggagggaggcttggatgagcaggggatgagagctgcagggaaataaatgagatattcgtccttatttcatttcctttttttttttggtttccatggaaatgatccttgttaaattcagggttgaaacgaggcaggaatctccatttttgtgctttttgaaaatgcaatgaattcctatacgggggagcgggaaaggtgcctcagagagagacaagtctggatgagggaaatattgaatattctcaatcaaatggatacgctggcagcaaagagtggttaaagtccatcaggacttgaaagacctgagtccattacgttgagaagggacctgctgattgctttgattccccctggcaagtgctccctggttgtgaatgccaggcactagagatggtgaggggttggggggcagttgggcacacacagtgtaagagcaattcagagccgttagtcctgcactagccctcaagctgctggcaacacctagagaaggtcgaagggccctgccagagatcccttcaattctaaagggaggtatgttttgcgggatgggcactagacggagctc

SEQ ID NO: 678213 - DNA, 443 bp, Homo sapiens
  misc_feature (115)..(115): n is a, c, g, or t
  misc_feature (155)..(155): n is a, c, g, or t
  misc_feature (276)..(276): n is a, c, g, or t
  misc_feature (383)..(383): n is a, c, g, or t
  misc_feature (392)..(392): n is a, c, g, or t
aggagggagccggagggacgcgcccggaggaaagatggaagactaccaggctgcggaggagactgcttttgttgttgatgaatgagcaacattgtaaaagaggctatagaaagcncaattggtggtaacgcttatcaacacagcaaatgaaccantggaccacaaatgtatagaacaaactttaagccaatcaccaagctgggccttttacatctgacctgtgtattatgcagaagatggagctggattacacacagcaattcctgcttctggganagcttctactgacgggagctgcactgtgcatgggagaataagaccatgtactgcatcgtcatgcttcggactgtctatttgacctgcatccagcctatggcctttcncctttgtcnctagttacatcctctaaccaccagccatgaattcagtgctctttcactccc

SEQ ID NO: 678214 - DNA, 957 bp, Homo sapiens
ggataatgacagcggtaaatggacattcacggaacgcgcccaggacgtcatgaaagagccatgagacacgctaacacaagctagctaacgacagtataatcataaacctatcatagaatcaggacgagatattaccaacgacaactgccactacacccgacgacgacaaaggcgagcgctgaaacgcaatgctcgcaaccccactacgcggacacaagagacacatcgaggtcatagacacgtcaactcacctgattgctacacgctgatacgctagagagcacaggaagacgagagacaagcgagtagctagagactcaacctgtcacagagataaataccaaaaaaccgatctcttcctaactctcccccaagaagaagaattccacacttcactgaaataaagccatgaatccctgaatagctcgctacctatcgacgcaaaaacacaaaatctccaacaccatgatacccaacatcataacataaccaaactcaaaaaattcattaacaaacaaaataatgcacctattactcaatagaaacatcaaaacaaaacatataaacattcaaataaacaaaacataatacacacataactaacatctaaccaaaaaaacacaaccaaaacaaaaacctaccctaacaccatacaccctaaactcaaacaaactaacaacacacaactcaactattacactccagccccacaccctcgacaccaaccaactaccattatcacacaatcaatacatcacctaaattactaccatattcctcacaaacacaacaccacttccctacacaaaccaacataacaactcaacacttaactcacatctctccaacaacagaaaaacctctcatcctaaacacaacaaaacacatatactagaccaatcaacaaaccattccacaatctaaaatacacttaacaaccacaaaccatcacaaaac

SEQ ID NO: 678215 - DNA, 2169 bp, Homo sapiens
gagctcctggggcaatgtggaccagagaatgatagtgggacttcctggctgagccttcaaggtctcctttgtctctcctccttgtcccctccctcacaggcctgcagcccactgatcatcttccagcccttggccctgccatggccactccggcctagacagctgcttctcagcaggaggtctgtccttgaccaggctgaaaggtgacctcggggtcctgtccatcaccaccttgtatgtccatcagcatttatcaataatccctagtcaccttgtttgcattcctcgatcagtttacctgcaaactagctgcttgctagttaacctcacgaggactgggggtggcttgcggtcccactgtgttcccagcttccagagtgacactgcacctagtaggcactcaaatatctgtgaaagggtggatgagtgaatgggttggaggaaacccctccctattcatgtccattctgaagataagaaaactcgctgcttctacctgaagggaaaaccttcctcctccaaaaaccctcctgttctatatgaggcttagaaaccaaaggcaaggacgtttctttcatctgcctttcatcctgcaaaaagccctccactcaaggcaagaaagggcactgaagtttattgagtgggagacagcggcaggtgggagaccggggagggaggagagaaagggaaattcaggaggaaggagtccagcgtggattgctccaaagctcacccaccacgccctgactgcaggtgtgattcggggcccccgtggctctgctgggtccaggtgcaagcaggcaagaggtgtggcgtcagctcgattcgcaggccctggactactgtctaaacaggacaggcccgggcaagcagggcaggggcgtctgcaatgatgggggaggactctgctgcttcttaagctccagcgtctcaagccagggcgagacagcccgccggccgcccggatctccacctgccaccccagagctgggacagcagccgggctgcggcactgggagggagaccccacagtggcctcttctgccacccacgcccccacccctggcatggccgaccagctgactgaggagcaggtcacagaattcaaggaggccttctccctgtttgacaaggatggggacggctgcatcaccacccgcgagctgggcacggtcatgcggtccctgggccagaaccccacggaggccgagctgcgggacatgatgagtgagatcgaccgggacggcaacggcaccgtggacttccccgagttcctgggcatgatggccaggaagatgaaggacacggacaacgaggaggagatccgcgaggccttccgcgtgttcgacaaggacggcaacggcttcgtcagcgccgccgagctgcgacacgtcatgacccggctgggggagaagctgagtgacgaggaggtggacgagatgatccgggccgcggacacggacggagacggacaggtgaactacgaggagtttgtccgtgtgctggtgtccaagtgaggccggcgcccaccatgctcctgggcgcccacgcggcccacagggcaagaacccggggcctcccgcctcctcccccatccccctgcctcccctgggcactgtggcttcctcctgcgcctggttgattcagcccacctctctgcatcccgcttcccgcgtctcttctctgcactcctgccgaccttcccacctgctcatctgaatgacacggaacgctcccactgcaggcaaaccgtgacgccctccccactcgggagaagcagagctgaccttaggaccgagcaccagggcaggttgcgctgactctgcggccctccaggacggacaccgggtgaccccttagggcacccaggcaagatccctaagaggcacccaatgcccaggccaggggggctgcagccctcagcccccgccagtaagcggtgctgacggggactctggccacagaggtcaggcctcctgaaaacagcactgccttccgcgctgccccagcttgccccattccttgtccgccaacccaccgtgattcatcttctgaagctgggagtgaaactgggtcagctgtaacctgttcctattcatctggaaggagggaggcttggatgagcaggggatgagagctgcagggaaataaatgagatattcgtcctta

SEQ ID NO: 678216 - DNA, 2864 bp, Homo sapiens
gagctcctggggcaatgtggaccagagaatgatagtgggacttcctggctgagccttcaaggtctcctttgtctctcctccttgtcccctccctcacaggcctgcagcccactgatcatcttccagcccttggccctgccatggccactccggcctagacagctgcttctcagcaggaggtctgtccttgaccaggctgaaaggtgacctcggggtcctgtccatcaccaccttgtatgtccatcagcatttatcaataatccctagtcaccttgtttgcattcctcgatcagtttacctgcaaactagctgcttgctagttaacctcacgaggactgggggtggcttgcggtcccactgtgttcccagcttccagagtgacactgcacctagtaggcactcaaatatctgtgaaagggtggatgagtgaatgggttggaggaaacccctccctattcatgtccattctgaagataagaaaactcgctgcttctacctgaagggaaaaccttcctcctccaaaaaccctcctgttctatatgaggcttagaaaccaaaggcaaggacgtttctttcatctgcctttcatcctgcaaaaagccctccactcaaggcaagaaagggcactgaagtttattgagtgggagacagcggcaggtgggagaccggggagggaggagagaaagggaaattcaggaggaaggagtccagcgtggattgctccaaagctcacccaccacgccctgactgcaggtgtgattcggggcccccgtggctctgctgggtccaggtgcaagcaggcaagaggtgtggcgtcagctcgattcgcaggccctggactactgtctaaacaggacaggcccgggcaagcagggcaggggcgtctgcaatgatgggggaggactctgctgcttcttaagctccagcgtctcaagccagggcgagacagcccgccggccgcccggatctccacctgccaccccagagctgggacagcagccgggctgcggcactgggagggagaccccacagtggcctcttctgccacccacgcccccacccctggcatggccgaccagctgactgaggagcaggtcacagaattcaaggaggccttctccctgtttgacaaggatggggacggctgcatcaccacccgcgagctgggcacggtcatgcggtccctgggccagaaccccacggaggccgagctgcgggacatgatgagtgagatcgaccgggacggcaacggcaccgtggacttccccgagttcctgggcatgatggccaggaagatgaaggacacggacaacgaggaggagatccgcgaggccttccgcgtgttcgacaaggacggcaacggcttcgtcagcgccgccgagctgcgacacgtcatgacccggctgggggagaagctgagtgacgaggaggtggacgagatgatccgggccgcggacacggacggagacggacaggtgaactacgaggagtttgtccgtgtgctggtgtccaagtgaggccggcgcccaccatgctcctgggcgcccacgcggcccacagggcaagaacccggggcctcccgcctcctcccccatccccctgcctcccctgggcactgtggcttcctcctgcgcctggttgattcagcccacctctctgcatcccgcttcccgcgtctcttctctgcactcctgccgaccttcccacctgctcatctgaatgacacggaacgctcccactgcaggcaaaccgtgacgccctccccactcgggagaagcagagctgaccttaggaccgagcaccagggcaggttgcgctgactctgcggccctccaggacggacaccgggtgaccccttagggcacccaggcaagatccctaagaggcacccaatgcccaggccaggggggctgcagccctcagcccccgccaggattcccgcaggctcctggactggaagctccctccgcggtcggattctggagggtgggaggcatcttggcctgcagtaagcggtgctgacggggactctggccacagaggtcaggcctcctgaaaacagcactgccttccgcgctgccccagcttgccccattccttgtccgccaacccaccgtgattcatcttctgaagctgggagtgaaactgggtcagctgtaacctgttcctattcatctggaaggagggaggcttggatgagcaggggatgagagctgcagggaaataaatgagatattcgtccttaaaaaaaaaaagaaaaaaaaaaaaaaaaaaaaaaaaaaaagaaaaaaaaaaaaaaagagaggggcgggcggcgcctgcaaagaagagtctccccataggaaggggccgcacacgttagtaggccgcgccccccagtttttttggtacaagggggcgcccccccaaaagaggggcgcgattattacaataacagccgaggacgacgcgcggggcgcgcggcggttactcaacaacacctgcgcgcgacaatgggggcaaaacacacgtgcgtgacgcccagtgggggagaccaccagtggggggaaagaaggaagccccttctacctccggggggggaggggagcgacacaaccagtgtgggccacaaacatctccccccacgaagagactttatcaagagcgcctcagcgggggagaattatatataactattttgtaagaggggtgtatatcttcgtcgtggttgaaacaatccgcggggtgaaatatgtgtggtgcggcggggagttaagaaatggttgtgggagattacgagcaggagtattatctgattatctgtgaagaaaatttttattattatatcacgagaggagtcgtagactgagtacgaaaaaagagat

SEQ ID NO: 678217 - DNA, 991 bp, Homo sapiens
ctcctactcctcattgtacccattctaatcgcaatggcattcctaatgcttaccgaacgaaaaattctaggctatatacaactacgcaaaggccccaacgttgtaggcccctacgggctactacaacccttcgtctgacgccataaaactgcttcaccaaagagcccctaaaaaccgccaggcatctaccatcaccctctacatcactcgggcccgagcttaccctactcaccatcagctcttctactatagaacctcccactctcactcatactcccaaacacaccctgagattaatacttcgaccaacgcgtcctcctatttattctactccaactctagcctagctgtttactccaattcattctgatctacctgatcgtagcatcaaacctcaatactacaccctgatacagagagacaatagaaaaaaaaaccccaaacaatctcatatgaagtcaccctagccatcattctactatcaacattgactaataagtggctcctttaacctctccagccattatcacaacacaagaacagcctctgattactcctgccatcatgacccttggcataatatgattgatctccacatagcagagacaacgaaaccccttcgaccttgccgaggggagtcgaactagtctcaggcttcaaatgaatacgccgcagggccttcgccctattctttcataggcgaatacgcgaacattattataatagacaagcctcacacttacaatcttcaaggacaaaattgaggaatttccgaagtcaaacaaaaatttggacccagacctatttagccccgtcttatgagtgaccgcaaccccgagtcgtagacagtatactcaagaaatcacaccaccaccatcattgagctctgcccaaaatccaatcccagcacaaaaaggcggagactcggcacacacctaagcacgacaagaagcgaacgcagaaggcaagaagacacaaggcggcgcgaccg

SEQ ID NO: 678218 - DNA, 180 bp, Homo sapiens
gaacatggcgtgtaagttcaggggctcgtacggagagaaggacatcaagctgcgtacgatgcgagacttgcgaaagaagaagcgaggcctccggtgggcaggctgaagggcaggtagaggtaggtatcctggggctcccgccagaagaacctgtcctggaagagctcgtctatgatgctg

SEQ ID NO: 678219 - DNA, 2134 bp, Homo sapiens
gagctcctggggcaatgtggaccagagaatgatagtgggacttcctggctgagccttcaaggtctcctttgtctctcctccttgtcccctccctcacaggcctgcagcccactgatcatcttccagcccttggccctgccatggccactccggcctagacagctgcttctcagcaggaggtctgtccttgaccaggctgaaaggtgacctcggggtcctgtccatcaccaccttgtatgtccatcagcatttatcaataatccctagtcaccttgtttgcattcctcgatcagtttacctgcaaactagctgcttgctagttaacctcacgaggactgggggtggcttgcggtcccactgtgttcccagcttccagagtgacactgcacctagtaggcactcaaatatctgtgaaagggtggatgagtgaatgggttggaggaaacccctccctattcatgtccattctgaagataagaaaactcgctgcttctacctgaagggaaaaccttcctcctccaaaaaccctcctgttctatatgaggcttagaaaccaaaggcaaggacgtttctttcatctgcctttcatcctgcaaaaagccctccactcaaggcaagaaagggcactgaagtttattgagtgggagacagcggcaggtgggagaccggggagggaggagagaaagggaaattcaggaggaaggagtccagcgtggattgctccaaagctcacccaccacgccctgactgcaggtgtgattcggggcccccgtggctctgctgggtccaggtgcaagcaggcaagaggtgtggcgtcagctcgattcgcaggccctggactactgtctaaacaggacaggcccgggcaagcagggcaggggcgtctgcaatgatgggggaggactctgctgcttcttaagctccagcgtctcaagccagggcgagacagcccgccggccgcccggatctccacctgccaccccagagctgggacagcagccgggctgcggcactgggagggagaccccacagtggcctcttctgccacccacgcccccacccctggcatggccgaccagctgactgaggagcaggtcacagaattcaaggaggccttctccctgtttgacaaggatggggacggctgcatcaccacccgcgagctgggcacggtcatgcggtccctgggccagaaccccacggaggccgagctgcgggacatgatgagtgagatcgaccgggacggcaacggcaccgtggacttccccgagttcctgggcatgatggccaggaagatgaaggacacggacaacgaggaggagatccgcgaggccttccgcgtgttcgacaaggacggcaacggcttcgtcagcgccgccgagctgcgacacgtcatgacccggctgggggagaagctgagtgacgaggaggtggacgagatgatccgggccgcggacacggacggagacggacaggtgaactacgaggagtttgtccgtgtgctggtgtccaagtgaggccggcgcccaccatgctcctgggcgcccacgcggcccacagggcaagaacccggggcctcccgcctcctcccccatccccctgcctcccctgggcactgtggcttcctcctgcgcctggttgattcagcccacctctctgcatcccgcttcccgcgtctcttctctgcactcctgccgaccttcccacctgctcatctgaatgacacggaacgctcccactgcaggcaaaccgtgacgccctccccactcgggagaagcagagctgaccttaggaccgagcaccagggcaggttgcgctgcaggattcccgcaggctcctggactggaagctccctccgcggtcggattctggagggtgggaggcatcttggcctgcagtaagcggtgctgacggggactctggccacagaggtcaggcctcctgaaaacagcactgccttccgcgctgccccagcttgccccattccttgtccgccaacccaccgtgattcatcttctgaagctgggagtgaaactgggtcagctgtaacctgttcctattcatctggaaggagggaggcttggatgagcaggggatgagagctgcagggaaataaatgagatattcgtcctta

SEQ ID NO: 678220 - DNA, 119 bp, Homo sapiens
catcctctctcacgttaatcccttaacacataaatatgagtcatgatatctaagggctaccaccccacaacccatctacttctcgggtcgagatgagagcggcttcagatatcatgact

SEQ ID NO: 678221 - DNA, 1107 bp, Homo sapiens
tcctccggatacctgcaccggtcctactctggaccttctttgcggttagttcccgcctttgtttgacttctctcgcgcgcctgtggttgtcccgattgctatctttttcgttctcctccggtatctccgctgcgtcttggtgcttatgtgcctctgaggttgtaactgttgctaatggcgtgcgaaagtctatcccttgtcaggccgacagcttgcctggagttcactgtacttatagagtgcactgtagttcaggcgggaaactgtgaactagtggtacagtactcccgcacagtctacgtggacaaacgcctgtaaagactggcatcgtcacaggatgtcagcggtttaaatgttagtaaacttcttctttggggtgtttatttgtttttgttttttagtaaggaatgaggaaacttaccaccctctgggggtagtttacagactgagtgacagtactcagtatatctgagatgaaactctactaactgtgtttggagtacaaatgacagttccaatcagctatgtgtatatatgtgcatgtattttgtgtagaattaatagatgtcgtagttgctgtgttatatgaagaccatagaaggtagaaaatccgtactaacctggaacagatttgtgtgttattcactggcttgtgatgatcgtttccctattcagtacacctagtaaatgctgctaagcagagaggtcccatttgaacgtgcgcttgtgttccatgtgacgaaaccaaagatttgagcttacgagtggataggacctgacttgagaagtgttccaagtccaaatgaatgcatcacaacttgacaatgcgtgctcattgttgtgagtatctatgagattcaaaggttttctaacattatggaaagccttttgtcctccagaagatgagtagctagggatcactgtgtttaaaaaccagaaaggctacgatgtactgggcaagaagaaagatgggaaactgaataaagcagttgatctagcatcattggaacatggggacgagtgacggcaggaggaccagcgaggaaataccctcattaactaccctgttacacatatatcctcgcgtgggggggcgggggggggggg

SEQ ID NO: 678222 - DNA, 234 bp, Homo sapiens
  misc_feature (21)..(21): n is a, c, g, or t
  misc_feature (54)..(54): n is a, c, g, or t
  misc_feature (92)..(92): n is a, c, g, or t
  misc_feature (203)..(203): n is a, c, g, or t
ctgtgatgtatccccaacacnaatcaacacctcccctggaatggggcaatagcngcaggacctcttccacaggagtctatagaggaaaagcnggtaatacagctattataaatgccagccagacacaggcctcacttctctgcccagaaatgcctacttccacaggagcctatcattaagaaacacaccagtgagcttatttngctaatgaatctgggtgttgggcgataaata

SEQ ID NO: 678223 - DNA, 88 bp, Homo sapiens
tggactcacgcggttggactcatgcgcagcgagctgaggtagcacctttgcactctagcatgggcaacaatgaacgaaactctgtctc

SEQ ID NO: 678224 - DNA, 298 bp, Homo sapiens
  misc_feature (225)..(225): n is a, c, g, or t
  misc_feature (267)..(267): n is a, c, g, or t
ctaattgtgtggtgttatgacaggaagagcacaagtggtggtgcattctttatgggttccagattagtatcttggttcagcaagaaacagagttcgattgccctgtctacaggctgaagcaaaatatgttgctgctgcattcttgcttgcactcacacttctttgagatgatgcagaccgctgcagagattttcaacatcacattgtacacacaccatatctccnatcctcatgttatacatacacagtgcaatacagacatttcanaagaaccctataacaccacagggtttaccga

SEQ ID NO: 678225 - DNA, 715 bp, Homo sapiens
cgggcagccatcccaaatatggggccccgttcgtggctgccctctttccggttcttgcggtcgttggatgggtgttctggcctatcgattttgcccggctgtgatcacgacggtgacggtgtgtttttgttccttcctccttctcttgtttgggggggacgcctctgcacagctcttctctctaagcgcgagccctctcctggggcgattattctccgctcgctccctcattgttatgcggcgctctctttcatatcgcgtagggctacatcatctcgccatagggggggagaatctcctttctccccataaggggggaagtattaaaataatggagcatcattgcttttttattagttggtccgtggatgtggtccatggaaacaccccccgcctttgccaaacaacccaacgtatggatgtgatatgctatgtggtatgttgtatgtgtatggtatgttttgtttacacgcacgcacacacacatacacttgtgcatacacatacgtgcgtccacctattataagtgcggcgcgccacattttcatcgcgcggctcattatgtggacacacgccgcgtagtactatgttcattggataatattgtgtatgccgccgatcttccttataaggatagactctcttccacccgcgcgacctagagcaaggacctaacatataacagcttttatacagggacacaaattgacagaga

SEQ ID NO: 678226 - DNA, 248 bp, Homo sapiens
tagagtcgtatctagaggtatcccctcataggttcgcaggcacgagaacatgcctctcgcaaaggacctccttcatccctctccagaagaggagaagaggaacacacaagaatgaaacgcctggctgcagagctccaattcctacttcatggatttgaaatgcccaggatgctattaaatcaccacggttctttagccactgcacaacacggtaagttttgatagtgttggcctgctccacatgatcc

SEQ ID NO: 678227 - DNA, 599 bp, Homo sapiens
tggatgatggtgctatattatctctccagtgtgaatgacagaaaggtgccgactatcctggtgacggaggtggaaaatggatggctccttgaggcaagcaagaagggtgtgaaccttcctggtggctgcatgtgagacttgccatgctagtgtcaggagaaagagacataccaggatactagtattgtaaaggaggtactttttttttctgtaagataatagagtagataatgcgtacatatacaatccagcacaggacatctagatagtccatgaaagttaggaaagagtcctgaggagcagacagggtattttgaacatacacagcattaatcagcaaaatcatcgaagacaatcatgacgtgggcggtacgagaaggatatagaattgcaccatccctagagaagagcccaagttagaattggtgaataccattcgggttcgaggcttccggtcgagtatgactaactcaaggagacaattatagaaagaattataccctaggacaagaacaacaatgcgtacataaaacctatagaactacatgtaaagaaatgacatagacatatgggaaaccggtatgacaacacccgaaaga

SEQ ID NO: 678228 - DNA, 119 bp, Homo sapiens
actccttctgcccccgttcttctagtgagaggggcggacaagggggcggcgaaaagaggagaaaggagagaaacaagagtcgagggggacaggggagtcgaggtctgcatcccctcccc

SEQ ID NO: 678229 - DNA, 105 bp, Homo sapiens
tggagcacgatacgattgtgctggccgacaccatgcgctcccctattgagtgctctgaggttgtgcagcgctcagttacctataatcttattcaacaaattctta

SEQ ID NO: 678230 - DNA, 227 bp, Homo sapiens
  misc_feature (94)..(94): n is a, c, g, or t
  misc_feature (101)..(101): n is a, c, g, or t
aacaatattatttaagtagtatgtgaccgagctataaatttttgtttttgttctaagtagtatttaatttggtgaactgacaggacaatgtttnttaggcnttagcattttgtttaaaaacctttaaagaaacctttagtaagtgtacttagtacctcacatattaatgttgtagtaagtttctgtcttaaattttaaaaatggttttctataaagggtttttattg

SEQ ID NO: 678231 - DNA, 247 bp, Homo sapiens
tataccacatgccaactaattttaaaaatgtttggtagagatggggtctgctgtgttacccaggctgtctcaaactcctgggctcaagcagtccttccaccttggctcccagagcactgggtttacaggtgtgagccactgtgcagcctccttttatctaattgtccccacagcagacttgtcgggtcttggctattttccggttgttaaggtgtatggtggtatagggtggtatagggtggtatag

SEQ ID NO: 678232 - DNA, 137 bp, Homo sapiens
ctgtctgagattgtcacattatttgtcatagacttcaaggctgtctgcagcgtggctcccacgttacctttccagccttgtctcgtgtgtcccttcaagcctctgttgacatgtgcttccaccggccgcgcctcgtg

SEQ ID NO: 678233 - DNA, 435 bp, Homo sapiens
ttctccttgattactcctgccaatcagtgacccttggccataactatgatgtgtatcttccacactaggcagacgagcgcaaaactcgaagcccgcgcgttcgaaccttgcccgaagggcgagtcgcgaacttagtctgcaggctttctaacatcgaattacagccgcaggccctcttcgccctattcttgcatagccgaatactacatacatgtagtataatgaacaccctcaccacttacaatcttcctaggaacaacatatgacgcactctcgccgtgaactctacacaacatattttgtcaccaagaccctacttctaaccttcctgttcttatgaattcgcacagcatacccccgattccgctacgaccaactcatacacctcactatgaagttacttcctacaatctcaccctagcattacttatttac

SEQ ID NO: 678234 - DNA, 1360 bp, Homo sapiens
  misc_feature (391)..(391): n is a, c, g, or t
aagcctcagaatcatggtgttaggtgaaaggtacttcttacatggtggcagcaaaagtaaatgaggaagatgcaaaagtggaaacccctgataaaaccatcagatctcgtgagacttattcactaccacgagaacagtatgggggaaactgcccccatgattcaaattatttcccactaggtccctcccacaacacgtgggaattatgggagcacaattctgagatttgggtggggacacagagccaaaccatatcagtactcaatatttagctcccacttataagtgagaacatatgggatttgctattctgttcctgtgttggtttacttaggataatgtcctccacctccaccaatgttgctgcaaaggacatgacctcattcctttntatggctgcatagtatttcatggtgtgtatgtaccacattttctttatccagtctactgttgatggtcatctgggttgatttcatgtctttgctggtgtaaatagggctgtgatgaacatttaggtgcatgtgtctctataatagaacgattttatctttctctttgcctttttgaatgcctaagtaaattttatatttgaaagtgtcggaagaattaagcatggcggtacatccaatttaattgcctggaaatggccccaacctttccttctggtaaggtctggtaggtctctaatgaaaggctttgacgtgccttacctaggaatttgtcttgatttgcgagttgtctccctttgcgtcatcctcacctgactcgtcagcttcttctttcactgatacctctactcatcccaacggtttccttccacgctattttccagcgctcggtctcctttcacactcactcttttcttgtcacccctatctacacatagctctctccctacactccctcggcctctggcctgtcatccttttctctatccctcgtctcacgctgaccctctcttgtctcatcctatctctctcttcgctctctctctcctcctgtctctctccccacgtccacctcctcttctctcacccgacctctcttctctcttcgatctctcctacccttctcttctcctatacttctcgctcttctccgctcctccctacttctctcactcactccttccttccccatccttcgttctctctctcactactagactacctctctcgctccactcctcttcgttcacgaccgcatctcatctctttcttctctcttcgttctcttactccgtcctcactcgctcaccctcctcgtcccctatctttcctctcctcatctctctccatctcgtctccgcctagtagttctatctctcgtctcttgttcttttccctcacgttgcccctcc

SEQ ID NO: 678235 - DNA, 1725 bp, Homo sapiens
  misc_feature (384)..(384): n is a, c, g, or t
  misc_feature (428)..(428): n is a, c, g, or t
actatactctgtcaggttctgcatttcaagacttcatattggctcttccttgtgagtcaagattgatgtaagatcagttcggtagtaaggtgaggtcgtcggtcatcaggccgtggttcccccaggtctctgactgccatgacgcggttcatctgactctcataacatgaacctgcgttgcccgaggtatggacttagctagcttcattgctcttcgagatcatccactgaagatcaactagtgacttacaaggctgtcactatcgacacgacatccactaggtacctctggataagtggggcgttgatatgacatgggtttttacgcaattgattagacgctggcgctggcccgtttgcattcgtcacctgacccccatctanacgttgagctcgttgccctcatctctttttttggcttgctcccntataaaggtagcctgagagttaattacatatggttctgctagcaaggtctatctctagctggcttgctatggtcccctattggatatacggaggtaacttcactggtcataggacaccctttggtaggaagcatctattcgggggaaccaaccacatttagaattgacgcttgctcttagaattaccctttaaggaaacaacttcttggctcaaaccctcgtattgatttctctaacatgttgggcaaggaatattcccgtgtaacgcaggagttagcctgagttttgtaccggaacacacatttttcaaatatttcctctccttaaggtttaggttacgtatatttaggcttaaccttgttttgccactagttggtgtgccagccgatattaggctttaccaaatttcgattttggatgggatcaatttttattgaggagaacccttccgctttgtgtgaaccctaaagtctctttgagggtggcttgcttaccctcaaaaaggagttgcctgttttgggtgggggggactactgataatcggggagaaacgcaaccttaaattagcacacaccttcccttgaaccaaagacaattgtgggtgcacacattcaacttaatattatgaattttgtcggtgccacgacgggctttgtgtcaccacacgtagacatcgacagtgaactctctcacgctcatgtacactataggtacgccgccgcgacggcgatcctcgtccccgctattgcaaacagcgcaaatccgtccgcccttctcggtcgaggtgtaggggacccccgcacagaggtgttggttattcacccccactagtagttttacgccgcccgtgggcgttgttctattgtttttgtatcacccacaaaggtggtgttagggccgccccccgatcaagctaactggtagtgatgaggttcttcgcagcactaattcataatcaagtcggcgatgaaggtgggagacacgaatgaagtcgctagccgcgtggccttcatgattgtttgattgagcaaacaacactcctctcatgttgctggtagcaccgcgggggcgcaccacacacatcttcgttattcacagcgtggtgagtgcggaagacacactactagtcaggagcagggagaccacccccttcaaaactcacttgacgtggggtggagtgttgttatgaacccccattctacctttgtgtggcggagcatgacaagacttacatcccctagccagccgtgaatgacatagtttaatcagtaccacatgctggagtggagtaccacac

SEQ ID NO: 678236 - DNA, 266 bp, Homo sapiens
aatcctctgtggtggaggccgaggatcatgtgaggctgccttggataaagcagtccactggttacacttgcgcagcttctggtcgccacgggacaccaaaagacccgagcacgccgggcagccacttcctacttacttttgctcaagttctggatggcagcgaaggacccggagccaaggtacagcccataatctatcctcgggggcaccctggaaaacccaccggcggagtccttgaacaccagatctttctgcccactagggga

SEQ ID NO: 678237 - DNA, 143 bp, Homo sapiens
atcagacagcggtgcttacctcctaaggtagctggatacgaggcgccctgtctaccatgctcagctaatatttgtatttttagtagagatgaggtaacagtatctatggctggtcttgaactcctgacctcgtgatcgacctg

SEQ ID NO: 678238 - DNA, 267 bp, Homo sapiens
agaagttcactagcactagtaagaagtttcaggtaagaagctggcaatgacaataaaggtaaataacgtagaggtgtccctgggtatccatggggtatggttcctggaccgtccccccaacccacagataccaaaaatccaagtatactcaagtcccttacataaaatgacatatttgtatattaccaacgcacatccgcctgtatactttatccctagactaatacctaatgcaatgtaaatgctattgaaacttctaaaactagg

SEQ ID NO: 678239 - DNA, 311 bp, Homo sapiens
aaaagaatgtaaaacttgacaacaccctttttagtttgggtcaggaaaatgtcctttggaccaaaacaaatttttgtaaaaccaggtcagttttccgggagttgccccaaatgttccccctaacccaggttttttttagtcaacggaaactcccgttaagccctttgctcctggtgggaaaaggaaaaataaaccccctggggtccaggatttacttgggaaacccgagtttgggggggcccttttttgtgactttttaaaacagtgaaatactgtcccccttatgggcaagtttcaataaaactttgtta

SEQ ID NO: 678240 - DNA, 427 bp, Homo sapiens
aagctgtacacgcattgatccggtcaggggatcacgtaagtctaatggtccgggcagtgctccgtttctcatagcctcagtctcctcccagaaacaatggatgtcaagattcctatctcgtgtacctttctgtacagtgcccgcactgcccgcattgagtaatgcttgcgttatttcattcctactacagttgcgtcccagcatgtagggcagtgcttgcacgttccatctggtgcctgaccagatgtttgctgaagacaatgtgtgaccgcgtgctctagctcatgttcaacctccataaatgccacttacgaatccatgatgtaagattacgctccggcaccgtggatatccatttcttctaagccacattctgttcactgggatctcagcattgcattaatagcaaacatttacagagggcctg

SEQ ID NO: 678241 - DNA, 324 bp, Homo sapiens
tgatccaggtggacacgagtctgttttaataaagatccccagatggttggcttacacattaagtgtgagccatgctgctgcatgagttattagcctgaaggagtggctgtccgaaccaagtctaaatcaaaattactgacttgtcagatgctgctgttcaggattggctagtcttaacatatctcaagatgttgttgctcagcttcgtgcttaaccatctgaacttctaatcgccctcctcccagtaagaggagatagttctcccaagacaaagtatggggagtgaaacgtgatccaggcaagagcaaaagctatgtctttcta

SEQ ID NO: 678242 - DNA, 380 bp, Homo sapiens
gtaaaattgaggatctggacaaggagcttgacagacactcagtcggtgcactgcagaattacatcttgtttaaccgtaaggttgatcaaccagccccagctgttcccatataaacaagcaaaaatattctcaaactatcagatcttgaactctccttggcaatgcgttatgggccatagcaatgcttatcagcgtggattcttcaggttactacacacatgcacttgttttccatcattgagtaatttgaggaaatactagattaaactgtcactgtatatgtagaatatataatgcttacaactatgcaacaaattgtcattcactgcatgggatagtttcatgtaacatactttacacgactctagtgtcccagtcgc

SEQ ID NO: 678243 - DNA, 142 bp, Homo sapiens
ctcgagctcacaccctatccatgactacattggctgttggttatttgcctaattacctgatatgtagagcagtctgttggcaaatatcattagcgatgcgacttttggaaacattctggggatccttcttagtagttcgacc

SEQ ID NO: 678244 - DNA, 1716 bp, Homo sapiens
ggcatatcagaaacaacaggatacattaattgtttggtcagaagcagagaactatgatttggctctgagttttccaggcagcaaagctggctgtgcatgcagcatctgggcacaaacacatttgtccaggcacagcatgcagcaagtttttgtcctgcacagtttttgccaccaattcacaccagcatgcagagctcaccagcatgcatgcatcacaagcgtgcgatgaagttgggtgtaagttatgtatatcaagggaagattatgtgatgacagttatatcatcgagagcactatagcaaaggcatcaagagacagaggaagtggcaattttatgtcaaaaaacgagtgtggacaaagagagttgggggaagtatcgtgtcactgacatcgtgtgcaacagttggtaactgtgagcacatgggaatagatgtgtgcgaaagtgtcaagaaatcaagacgtggcgtcacaggcatagtcaattgtttcagtatcagtcgtgagagtcagacaaatatatcaggtcgcattcatagtgggatacccagaagagagaatgtgtggtacaggtggacaaaggaaatggcgtgcaggagcatgtagaggtgagtgaaccggaaataattatacgtgtcgtgtactataaagtgggatgggtacagtctgaagagcagaagtggagtccatggtgaaataacgatgaagtacccaatgaaggcgtgaggagagagggagacatgggtagtgcaagattaaaaggtgagggaagttgatgtttgcagagaaggtgtacatgagaagtttggaatcaagaggaaggaagaacgaatggacgtggggagtataagcagaggtttaaagatgagaaagagaggacggagaaaaaaacacaaggatggaaaagtataagcggtaaaagagatagtgtatggatagtcagaaggcaaatatggatagtgagcgaatggttaagttagagaaagaaaagacccaggcctatagggggacacccaaacaagtcgccttgccaggacaaggaaccaccatcgtcggttcaacacgacagcggggatcacaagtcaatacagaatggggaactaccggacagccgacaagagcacgcaaagcaacgaaacaatctgaggagcacggagagaaaggcgagatgcagagagccaagagacacagacgacgatcgattgcggcaccaagaaaaatatggaaccagaaaggtagaacatcgcaaaacatgtgtagggcggtagggacgaagatggagcaacgaacttagcatagaaaatcgagaagaacacgagaaatagactagaaaccacaagggacatagtggcgaataacaggagagacaggaggcaaggaaatgaaagctaaaagggaaaacagatgccaggggcgaagagataggccaaacgaaatgcagacactgcggcgaaaaaggggggcaggacaggaaagaaagagaaagggggaagagagaacacagggagcgaagcgaagacacagcggcaagcaggaagaaagaggacacacagaggcagggataaaggaaacgagcgacagagaagtaaaagaacagaggagacgagacgaacgaaagagagaaagaccaagagagaagcaagcgaaagacaagaagagaaaagaagaaatgaaagaggtcgtgaggacgaagatagaaaggaactaataccactatag

SEQ ID NO: 678245 - DNA, 938 bp, Homo sapiens
attaatcccctggcccaacccgtcatctactctaccatctttgcaggcacactcatccacagctgctaagctcgcactgcattttttacctgcagtcaggcctagcacaatcacacacatgctcagcttttattcccagttctaaccaaacaacaataaaccctcgttcccacagcacagctgccatccaagtcatttcctcacgcaagcaaccggcatccatcaatccttctcaatcagctatcctcttcaaccaatcattactctccggcacaatgacaccagtaaccaaatcactcaccaatccaatcactcatccattcaatcaatcatcaatgggctcatcagcaaataacaactcaggcaatcagcccccatttcacttctggcagtcccaagcaggttacccaaaggcaccccctctgaccattccttgccttgcttcttctcacatgacaaaacactagcccccatctcaagtcatatacccaaatctctcccctcaactaaacgtaagcccttctccgtcactctctcacatcttatccattcaatagccaggcagtttgaggctggattaaaccataacccagtctacgcaaacatcttagccatactccgtcaaattacccacaatagggctggcattcatagcaggttctaccggtacaaaccctaacgataacccattcttacatttcactactgtctattatccctaagctactaccgcatgcctacatactcaatttaactccaggcaccacggaaccctactaactattctacgacacttggaaacaaggctaacattgactaaacacctttattccattcaccctcctttcctatgaagcctgccccggaacacggcttttgcgcccatgggcctttcggcgattccccaaagcaatgctcattatcccagattatgcctc

SEQ ID NO: 678246 - DNA, 84 bp, Homo sapiens
ctagaagattcagcaaagtacttttgtgctcttggggaactgtccttcctagttcgacctcctgggcacaccgataaactcact

SEQ ID NO: 678247 - DNA, 799 bp, Homo sapiens
gccctggtgtgataaccgtcttgcagcggttgtgctcttgtacccagcggtccgcagaatctaccgtctggacgttcgtctccatagcttaagggtgcgtaggctgcgagcacgtagtgccatcatttggatcgcattacctggaggcatgatgcccgcctgtatgcgtgcccacgcatcgtagtctaaaaagaggattgccgatactaaaggaggcggatagacagtactaagtcaagctatactgagtgagtgaaggtgagagagaaagtgaggacaggccaggtctactctgtgtgagccagatggagaacacgccaaaaggggtgcctagtattgtccctccagggatagacgcctcggtgcaggttagcttttgaggaggctaaggcagggccaaccatgacattttcacgggaccccgggcaagggaccggagattacagagtttaccccactgagtgaaaaccttcggggacattatggtggtgaggcaacaggtacaggaacgcattttttcccccttaatggcgagtgcgtctccagggcagaaatattggcgaggcgacccaaggagtagcgcttctcgacactagtgcctcgaaataggtttgtctcgtgggtaacaactgttccgccacgggggttcgcctatagtaaattctcacagatagggacaccaccgtctaggtttatgaaggaaagaactttgacctgggagcgtcgcagaggcactagcccacgcaagcttccgggacgcaggcattcgacatgcacgccaagggcggagatacgagga

SEQ ID NO: 678248 - DNA, 264 bp, Homo sapiens
aataagcatgaagatgcctccctaaggacagaaacagccacgttaaagtcagccctaagctggtaccccagaaaggacctggccctggagtctgatccctatgggttcaaatcctgatattgccacttactccccgtgggaccttggcaatttacccagtctaagctgaagtttgctcatctgtaaaaagatgaccatatcagctttctcataaggctgccttgattacatgacctggcacaccacagaagccacggtcaacca

SEQ ID NO: 678249 - DNA, 178 bp, Homo sapiens
gatgtaaagagtcaactgtacactcacactcgcaaggtatgtatgagggttctagctgctctacatcccccccaaaacttagcatagttagggttgtatcataaattgggtcatatccattgggcctgtattgctatctcattgtgatttaaagttgcatttcccgtcggctaatata

SEQ ID NO: 678250 - DNA, 346 bp, Homo sapiens
gacatcgggtatgggatgaggaaaggaattgagcagaaggtacaggagcaatagcaattccctgtagctctcaaagcacattttgagctcatttttctttttctgcgagctcagcagcagaaatgccagagtcttccctggtagattgcggttccattagcgacgttctcctgcaatgcaggctgggtattctgcaatagcaagggcatgtttttcctttgagcctggatgctttggagcccaagctttcgtcccatgcaagggaaacaaacacttctgggatgtccgctgcaatctgctccgggggctgcaggaacctcatcagctcctgccaagacttgctcag

SEQ ID NO: 678251 - DNA, 1162 bp, Homo sapiens
atttctgacctcaagcagtgacacctggtggtgtgggacctggcccgaggccctggctatcagtcagcaggtggcagcagcagtgacaaggctggtcaacaagtgatgctcaccttcctgctattctcctgccctgcaccgcctgctggagagcacctgggagcagcggtgcctgcggtaaaccctggagtgggaattgtagcccccgctccgatgcagccgtgtgggcccgacccagctatgtcctgtgcgtttgtccgtgcttacctgcatgcgctcttcgtccgttctacccctccgtgagcttgcaagcttcgtgttcgctgctggaatgtggcttgggccgcctagtgctaccaggccaagagggtgactttccggctcccatactagtgacaggattccattcgcagcggcctatctgtactgtctagcttagatcacgtcacagacagttggtcgactgatgccaccagctacttgcggtgccacttggtgccatgcaacgctgtcgtgctttgtgcctgcatgccccccatctgaggcttgtgcatacttgtgatgcctcttctcagccccatctgttcccatacctgttgctctgcttgcgtggcgcgacatccggtctcaatctgccgtaggctccgtttgccttactttccacctgtgccttgccgaggccctgttcgggacgcgagccctcgtagctccgattggtagggcacctctgcattcgacggccgtttgccggcttcgcccgaggcctcccctttggcgcgattctgtctccccttttcgagtttcgtccaggacgttaccactccgagtgcgggtcccttcccctttgtccccaaacgctcgccatgggggcgcacggtggcacccaagcgcggattcgcttggctttttggccaacgcggagattggtctccaccagttccttgaatattccctacggggcccacaccacttcccctgtggaccccaagtttctcggaccaagatatccccggacacttggtcttaacaacagcgccagtaaatgtggtatacgttccacggggcccccactttatcaatttgctctgagtacaacgaacccatccccttgcgagcctcaccgtgggccgtttgtcattgagcacccctccccaacaacagg

SEQ ID NO: 678252 - DNA, 319 bp, Homo sapiens
tcccctgcagagatagtgatttattgtggctggggatgtagcccttgagggtactgggttgtttgaaactgtccaagactttgtaacagcagctaagattgagaaccatggggcccagggaaagagactcacagtggaaagtcaggtgactttgtgaaaatactcagcctgacacacgcaagcttctggatcagtacaatgaaaggggtggatctgcaaaatttttaacaacctatgtgtaaaatgacatcctattggtaaagaggcttttgtcaaataatgactgcagtagttctgttttcaaaaaaacagaaaaaaa

SEQ ID NO: 678253 - DNA, 337 bp, Homo sapiens
tgactagctttaatatcacagacaacctggagacataccctagagatcctgagaaagcagttgtatgggcaaaacatgtagctaagacaaatggctacttgggccaagccatccgcaaaggcctcaatgcctacctggaatgaacatggcatgcaggcttgctgaataatgtaatagcagcagaaactggaattggagtgtcacagacaaatatagcacacatctgtgaggagagggcagaactggccaggagatacttgggtgtaactagtgtaaggagatactaaaatctctctgttaaacaaatcgatgctccttcctttgcatatttgcggat

SEQ ID NO: 678254 - DNA, 571 bp, Homo sapiens
  misc_feature (409)..(409): n is a, c, g, or t
  misc_feature (458)..(458): n is a, c, g, or t
  misc_feature (571)..(571): n is a, c, g, or t
gtggaaatagatcatcatagaggtcttcatccttatcttcaccttgagcagactgacgaggaagaagagggattagtcttgctgtcttgggtggcacagttagaagaaaatccacatataagtggactttcatccagttcaaactcatgttgttcaagggttgactgtatttacttttctgaggcaagttcaaaactttgatcagattctcagtcacccctgaaaaagttagaatcattgtttcagaatggatagcagggaggccatgggaatctggtttctggactttacccacttagttacatttccaacaaacttatttattgatttattttttagagacagtgtcttattctgtcatgcaggctgagcacagtgacaccatcatggctctcactgcagccttganctcctgggctcaggcaatcctcttgcctcagcctcttgagtggcatgcncctgtaatcccagttactggggaggctaaggagaatcgcttgaacctgggaggtggaggttgcaatgagctgagatcgcaccactgcactccagcctgtgcgacagagacccn

SEQ ID NO: 678255 - DNA, 771 bp, Homo sapiens
  misc_feature (45)..(45): n is a, c, g, or t
  misc_feature (85)..(86): n is a, c, g, or t
  misc_feature (90)..(90): n is a, c, g, or t
  misc_feature (93)..(94): n is a, c, g, or t
  misc_feature (100)..(101): n is a, c, g, or t
  misc_feature (103)..(103): n is a, c, g, or t
  misc_feature (108)..(108): n is a, c, g, or t
  misc_feature (118)..(118): n is a, c, g, or t
  misc_feature (120)..(120): n is a, c, g, or t
  misc_feature (122)..(123): n is a, c, g, or t
  misc_feature (127)..(127): n is a, c, g, or t
  misc_feature (141)..(141): n is a, c, g, or t
  misc_feature (148)..(149): n is a, c, g, or t
  misc_feature (156)..(156): n is a, c, g, or t
  misc_feature (163)..(163): n is a, c, g, or t
  misc_feature (165)..(165): n is a, c, g, or t
  misc_feature (184)..(184): n is a, c, g, or t
  misc_feature (195)..(195): n is a, c, g, or t
  misc_feature (205)..(206): n is a, c, g, or t
  misc_feature (227)..(227): n is a, c, g, or t
  misc_feature (277)..(277): n is a, c, g, or t
  misc_feature (316)..(316): n is a, c, g, or t
  misc_feature (322)..(322): n is a, c, g, or t
  misc_feature (336)..(336): n is a, c, g, or t
  misc_feature (338)..(338): n is a, c, g, or t
  misc_feature (346)..(346): n is a, c, g, or t
  misc_feature (348)..(348): n is a, c, g, or t
  misc_feature (354)..(354): n is a, c, g, or t
  misc_feature (388)..(388): n is a, c, g, or t
  misc_feature (402)..(402): n is a, c, g, or t
  misc_feature (411)..(411): n is a, c, g, or t
  misc_feature (425)..(425): n is a, c, g, or t
  misc_feature (456)..(456): n is a, c, g, or t
  misc_feature (459)..(461): n is a, c, g, or t
  misc_feature (471)..(471): n is a, c, g, or t
  misc_feature (477)..(480): n is a, c, g, or t
  misc_feature (494)..(494): n is a, c, g, or t
  misc_feature (539)..(539): n is a, c, g, or t
  misc_feature (542)..(544): n is a, c, g, or t
  misc_feature (546)..(547): n is a, c, g, or t
  misc_feature (551)..(553): n is a, c, g, or t
  misc_feature (555)..(555): n is a, c, g, or t
  misc_feature (557)..(557): n is a, c, g, or t
  misc_feature (568)..(568): n is a, c, g, or t
  misc_feature (574)..(574): n is a, c, g, or t
  misc_feature (583)..(583): n is a, c, g, or t
  misc_feature (637)..(637): n is a, c, g, or t
  misc_feature (651)..(651): n is a, c, g, or t
  misc_feature (661)..(661): n is a, c, g, or t
  misc_feature (663)..(665): n is a, c, g, or t
  misc_feature (676)..(676): n is a, c, g, or t
  misc_feature (692)..(692): n is a, c, g, or t
  misc_feature (694)..(694): n is a, c, g, or t
  misc_feature (703)..(703): n is a, c, g, or t
  misc_feature (768)..(768): n is a, c, g, or t
ctcgccctcctcctcctcaaactccccttgttcgtcgaccgtagngtcctggtactactggtactcggacaccaggacgttaatnnaganctnngcatcnnanaaatnaatctcgtcnanannctcncccgtataccagtncaggaannccttgcnccggaananggccgtgaactgctcgganatgcgcttaancagctcctcnntggccgtgctgttgccgatgnccgtggccgacatcttcaggccgcggggcgggatgtcgcacacggccgtnttcacgttgttggggatccactccacgatgtagttgttntttttnttctgcacgttgancnttttctcntncacttncttcatggacatgcggccccggaagatggcagcnaccgtcaggaaggnggccgtggngcgggtagcaggcngccatcatgttcttggagtcgaacatctgcnggnnnaactcgggcncgtgannnnccggtactgctggntgccccggctggtaaggggcgcgaccggggcatgaagaagtgccngcnnngnngggnnncntnttcaccgccancttgcncaggtctgngttaactggcccgggaagcgcagccaggtggtgaccccgctcatggtggccganaccaggtggttgangtccccgtangnnnggggtggtcancttcagggtgcggaananatgtcatanagggcctcgttatcaatggagtaggtttcatctgtgttttccaccagctggtggacccgagaggntgg

SEQ ID NO: 678256 - DNA, 423 bp, Homo sapiens
  misc_feature (125)..(125): n is a, c, g, or t
  misc_feature (423)..(423): n is a, c, g, or t
tctcttcagccacttccgggtcttccgtcgctccggaagcccgcagattccggaagtgagggcgacccagatgcggccacggaatgcccagctttccggagattgtttgagaaacggccgtgcgncgcccgggcgtcccgcagaccccgcaggagacatatgaaaacccactgatgagctaaccaaggatacattccagcaactcctgctgaaatcgttctccaagactctcagcaagaccataagccaaggagttcacatctcgggtcttttgcacagcctgttcctttttcctaactcttggcaagtatgaggtaaaggcctcctgaagcagctgtgcagcagaactctctatcaacttcttggtaggccgctgagtgctgcaggggccacgggaacggagcacagccttttgttttagan

SEQ ID NO: 678257 - DNA, 184 bp, Homo sapiens
ggtagcgaatgaagtgaagacatctcagagggaggatcttgttgtggattttgcaccatggcttatgaggcaggagtgaagtgaccaggcttagcttgtggagtttatgggccaccaggtttggggaaatcaccatcccgcgagatgctgtgacctcccgttctacgagagatgcaggcagatg

SEQ ID NO: 678258 - DNA, 1510 bp, Homo sapiens
gatcgtgactcgatcacttagaatcatgacctgggaaggcaggtccatcaccatgcgacagatccaattagatccactcagatcgatcatacatccaactcaccaaggctcatcctactcgacttagagactctatcattcggatggctgcatgcgtcgtatcaggactccatgtgtggttctcccgcatgcagatgtgtgagagtagcaagatagaggggcacacggagggggaactgtgatagtggagtggaacgatgagcgaacttctagaggcacaaagaggctaccctcatagaaattggacacagataactgcgaatcccgcaagatctcaagcacagggaacgatctcgagagggagtagacagactgggcacggttggtacttataagacgcacgtctatataatagggtggaatcaaaggacgctagagtactagatggtctttcacgacacgattgatgcaatagcgaaggtacagttcgatacaccggtttacaaggagagatatatgatattgcagattggaaacgtcattgggaggatgaaacctattctaagtagggtttaatcgaaaggccatggagattaacagtggctgttggtgcgtaagcacaaggaggagtgagaagaccggaagaattgtttggaacttaaatacgcttaatggaacatttctggggctttaaaatagttcattctacataaccagggcaatagcgaattagcgtaaggacattttctacaagtggaatatatccagtctccgtgtcttgagtcaagtctgtgagtgaaaaggatacggttcttaaacataggctagctaatcatgggagaaggttctacacaaagttgtgacccctggtgcttagtgcttgacaggtgaaaacttacttatacacgtaagatttgaatgctgggaaaggggagaggggttgagactttctgtgtttcactcacagaggaatttcaaaatgtgtcctacctatgggagcacggcgagacaggataaagcaacgcgtgtgtgccactaagggtagtcctaggaagcgaatgggaaaggtccccaagatattggagattaaccagaatatgtcgattggatatgtcgcaaaaaacaacagaatggtacggcacgtaaggagcggacacacttgaaatttagtttggggcggacatagagctcattgcgagccacttgacggcagagcaccacggagacagttcaactaccagcatggggaacaccgcagcacagcaccctggatgcaggccagactgacaccgacgacccaactgcgggtgtgaacaccctgaccacgagaatagagagacaaccatcaccagcagacctggtcagggaacacatcgggtggtcccacatcaaccagaacgatgagcagaaagcgagcggacaacgggagacacaccgaaccagaagataagcacgcaaacaacgaaaatcctctgacgagactacgacaacaacatcacagacagcacag

SEQ ID NO: 678259 - DNA, 454 bp, Homo sapiens
  misc_feature (300)..(300): n is a, c, g, or t
tcgagtgctgactcttgagagatccccaagcagccatacagactcaacatatagttaatgtttgatggctgctttgaagaaatcaagttcagtactccttccctggtaggtattaaatttttgatagccacgaattacatatcaccatcatgtaaaagtagtttattattaaatacagctataatttattatttttttgagacggagtcttgctctgtcacccaggctggattgcagtggcgcgatcttggctcactgaaagctccgatccccgggttcacgccattctcctgcctcagnctcctgagtagctgggaccacaggtgcccacaaacacgcccggataatttttggaattttcagtaaagacaggttttccactgtgttagccaggggtctcctgacctcgtgatccacctgccctgggctcccaaagtactcggattacaggcgt

SEQ ID NO: 678260 - DNA, 431 bp, Homo sapiens
gtcgaccaaggcaaacggatcacgaggtcaggagatcaagaccatcctggccaacatggtgaaacccatctctactgaatacacaaaaattggctggacatggtggcgcatgtctgtaatcccagctactgtaatctcagctacttgggaggctgaggcaggagaattgcctcaaccgggaggcggaggttgcagtgagccaagatcgcaccactgcactccagcctggcaacagagcgagactctgtctcagaaaaaaaaaacaaaaaccagtttaggctgggtatggtggctcaccagcacttatgggaggctgaggcaggtggatctcttggaggtcgggagtttgagaccagcctggccaacatggtgaaaccctgtctttactaaaaatacaaaaattagccaggcatggtggcgtgtgcagtaat

SEQ ID NO: 678261 - DNA, 381 bp, Homo sapiens
tacgtcgcacagcaggcggcggaactggcacgcaaggatggcgaagcccgtcttgaagccttgaagaagagcggcagcgccgatggcttcggcccgatggagaccgtgtcgcgtgccaaggctgatggcgtctcgccgaaggctgtcgatacgatcatgcgtgccgatgcctcgaagctgccttcgctcgtgggtgtggacctcggcgcggatgggtacgcgatctaccgtatcgccaaggttggcacgccgccgcaggccaacgcaaaccagcgcgaggctgacgcacagcaactgggcctgatggccggccagacggaactggcagcgttctatgacgtgctcaaagccggtgcgaaggtgaagattctgcatccggcc

SEQ ID NO: 678262 - DNA, 574 bp, Homo sapiens
aaataaaatttttaatttttcaattaattctatctacaatctaaaaaaaaaaaatcaaaaaaatcattcaaccaccatccacatgtcgcgcccccacacttcaacaacaacaaatcaatcccaaaaacctttttaacaacaaaacaccctcccatacaacaacctactctatcttcccaccattcacacaaccccccctttccttattaaatcacacaacccccccattcttccccccataacaaacaaaaaaatctatttgctctcctctccacaaaaacctttaaaccacacacctcccccccctcacaaagccaaaaacattcactccccaccacccaattcaaaacaaccatcctcccaataacacccctaccacaccaaactagcacacaccaccactcaaccaaccccccacacaataattaacaacctccctctctctctccgctctataaatttaaaaccaaacacaaaaccactctctcccaccaaaatactttaatccccccccacacaataaaacataccaccctctcccctcctcgaccctctcacataaaaaaatacaaac

SEQ ID NO: 678263 - DNA, 344 bp, Homo sapiens
tttaagggggccccaggggggggaatgccctccctttttttccgggccccagggggtttttgggggccccgcctttcacccccgaagtcaagccccccctttttttccctttgttgggattatcccccccccaacgtttgggggcccccattgggggggggggccaatggggggcccccttaatttagggcccccctttgtgggggtttgggggggccccccgtccggccctccgggccatggggcccctagggggggggttttggttttgtttttgttgggtttttttttgggttttgttttttgtttttttgtccccccccataaattttttttttttgtta

SEQ ID NO: 678264 - DNA, 517 bp, Homo sapiens
  misc_feature (2)..(2): n is a, c, g, or t
  misc_feature (9)..(9): n is a, c, g, or t
  misc_feature (103)..(103): n is a, c, g, or t
  misc_feature (322)..(322): n is a, c, g, or t
  misc_feature (376)..(376): n is a, c, g, or t
  misc_feature (387)..(387): n is a, c, g, or t
  misc_feature (391)..(391): n is a, c, g, or t
  misc_feature (405)..(405): n is a, c, g, or t
  misc_feature (420)..(420): n is a, c, g, or t
  misc_feature (476)..(476): n is a, c, g, or t
  misc_feature (498)..(498): n is a, c, g, or t
tnttttctntttttttaggaggaagatatcttgtggtaatggttttagctgttaacattgacatctgtatacttcaaaaaaaaaaaaaggatccagacccacncaggatcatacattccctgagagctgatacattaaaataacaaaaggcccttgtaatgattctctgagataaaaagacaaaaggaattcaagagttaagaatagtataaatagaagtggctgaagtccctgcctttacccttctggaggagaacacgaatctttgggaactagttcaggaaggtaaaaaaatttttttcttctaaagtatgccagttgntttctttctcctcagctctaaatactctgaagtccaaagaagtgtatgttgggngggctcccttnaacnttaacatgggaagngcttctgtgactttngtaagtgcttccatgttttagtaggggtggaatccaatttactttctcccaaatangaagcacgctccccatttgaanggggtccccctttgctttc

SEQ ID NO: 678265 - DNA, 178 bp, Homo sapiens
ggttctgctatccctctatctaacatccatgtagtcttgggaataattctttaaggtaggcctctttttctaggttggggaagttctcgtggatgataccctgaaatatgtcttccaagttgcttccattctccctatctctttcaggacatcagtgaattgtagattgcggtgtttg

SEQ ID NO: 678266 - DNA, 155 bp, Homo sapiens
  misc_feature (51)..(51): n is a, c, g, or t
gattcgatcgagctctgtaccgactgcatctgtgctcgtaaaactcttttntaattgtaacacacagttcagaaaatggcactaaaataaagtccaggataggcacagtggttcatgcctgtaatctcagcactttgggaggcacagattgcagt

SEQ ID NO: 678267 - DNA, 864 bp, Homo sapiens
tgggtttggttttggttggttttttggttccattgggaagttcatctgccttttataacccatttcaccaaaattttcacctgtgtaacaagcttcaccaatgtgaacttttcagagcaactcggcttatttaacagaccttaaaataactcctataggcaagctcagatggaaaagtgcttcgtgcgggctaagggaatcagaggtgcgtccatttaacgggcatagctatttcaaaaagtagaatctcaaatctcgggcaccgaagcattgctaattgggtttgacgggtacctgggggaggctttccactcataattttaacaccgggggtattttttaagaaacgggttggggtaatatatatgggggatctagggatactacatctcaaggcttaatttataatttctagtgtcaatacaaaagttcccctcacagacttctcaaaacagcctcaagcaaatatttgggttatgggcaaatccgttcgcgtggacggcgttaaattactttcaccttcctgggctttaagctggccaaaccaggttgtttcagtttcgttggtacatcagacaaattttttcccgggttttcaacctcattgggggtctcccgtggagcccgtttttaaacccccaagaggttttttctggcaaagttgggcacccaatttttttgaaaggtgcggtccccaagcgggggcttccaacattaccttgggttgggcaaaagaaacacagtctaagcgctatatgcggggccttgctccaggcgggggggcccacccccccacagggtgcccacctgcgcactggcgggggtcccttgcctacacactgccgcagatgggttgtttcgcca

SEQ ID NO: 678268 - DNA, 981 bp, Homo sapiens
  misc_feature (981)..(981): n is a, c, g, or t
ggtggactcgtatgtgtgtatggttgggtatcctgattcggttgttctggggatggaggaggagaaggaagaggaggaagaggaggagggctaagaggcggagtgggaaggagtgggggaggaggggaaggagagggaggagggcgggcttggctatcatacatcaattccgagtcggtggaggttaccgagaggatggcggtgccggtgtccgcgcgctcgtaaaacccagcccatgacccctaacaggggccctctcagtcccctccataatgactctccgggctagccgatgtgatttcacttcgcactcgcataactgctcctcatactaggcctactaagccaacacactaaccatatacccaatgatggcgcgatgtagacacgagaaagcacataccaaggcaccacacaccacctgtccaaagaggccttcgagacgggataatcctattgattacctcagaagttgttttcttgcgcaggattttggctgagccttttaccagctccagtcgtagcccgctacgcccccaagttatggagggcactggccccaacaggcatcagcccgtaagtcccctagaagtcccactcctaagcacatccgtagtactcgcatcaggagtatcaatcagctgagctcaacatagtctaatagaacacaagcgaaaccaaataattcaagcactgtcattacaattgttactgggtctctatttagcctcctaaagctcagagtacttcgagtctcctcacatttccgacgcatctaacgcccattttttgtagcacaagcttcccgactcacagcgtttggtccattccagatctgtcgtcgcatagaatcttatcaaatccttggctcagcccgcgatgattgaaggaaatggccccggggtgaaaaacaccaaaaacgctccgggaaaggtctcccgagccgcagaacaccggccacacattcctcacccccacggn

SEQ ID NO: 678269 - DNA, 258 bp, Homo sapiens
cattggagctcggcacccatccttccttctctcacgcctgtaatcttgacactttgggaggccgaggcgagtggatcacttgaggtcaggagttcgggaccagcctggccatcacggcaagactccatctctactaaaaatacaaaaattagctgggcgtggtggtgcatgcctgtaatcccagctactcgggaggctgagacaggaaaatcgcttgaacccaggaggcggaggttgcggaggttgcaatgagcccag

SEQ ID NO: 678270 - DNA, 435 bp, Homo sapiens
tacatgggggtccttctttaggggggtcttgggcgaggagggccccgggggaatcggggctcatatatcccgcgaatacattattcggcctcacgtggtcataccgtgggttctccgtgacacccgtggttgtgctcagacacccttcacataatattctcccgggcaccgagggagggtgtgggaaaaatagcgtggggctcgaagcgcccccaagagggtctcttcgcgacaagtgtatagccacagggggtggggaacacccttttcgacgcgtggcgagaatgagaggcgcggagcgaatgaggtaggggcccgggggcccttctgcggggagagacaatcattctgcgcgatataccctctgacgattctctgtatgtcccgcccaatctctcttccatctatatatcgcgtgggataaacatatgcgcg

SEQ ID NO: 678271 - DNA, 147 bp, Homo sapiens
tagaggatccccatcatctacattggctccccaccgatgaaggctgagcaagggggaggaagatgaggatggttggaccttcatcagaccactcccttcccccatcctccaggagagggggcaagggcaaaccaccatctactgtgt

SEQ ID NO: 678272 - DNA, 816 bp, Homo sapiens
  misc_feature (377)..(377): n is a, c, g, or t
cagcctttaaggttccaaacactctgctagaagaggaagtgcagatttaaactgagtgaggctgtggagtggtgggaagttgatctgggtctagaccaaagaacttggcaggaacttgcccagagaccctgcgtgcaatcagacctacaggcagtacatggcaggccgtagaatgaataggtggtcacgaagaggggtggaacattcctgcagatggtcttcaatatatgcagatgtcgtctgatatatggaatgaaattaccgtcttttggaacatagttaaataaggtcaaatatacttgagagctttaaacacattaaagcggatgatgacgaatccagaagcatcgcatatattcatgactagccaattgacnaaactcatctagcagatggagactttggacaccagtggcctatttcgcacatgagggagcgtcgggctcgcatggatagtagctccccgaagactagagcgaaaatcgagctgggcctcgtctaataacattttcaacactcgttgtatggagaatggatctagcagaggatgaacggtcgttggagacagggagcgaaaccgcaataagggtcgccttgggtgagtagtgcgagagttcctgaccgtagcctctgggatgaagacctctagcgataggagaagataaatcaatggatagtcgattatggggcgatactaacttacttcatgggaaagtttaacccccttattttgccggctgtcatattcgggggttactactaattccggggggttcaggtcaactgttttatttaattttcaggggattcccttgc

SEQ ID NO: 678273 - DNA, 359 bp, Homo sapiens
  misc_feature (220)..(220): n is a, c, g, or t
aagcccaagatcccaaagggtgtcaaccgcaagctcgattaacttgcctacattgcccaccccaagcttgggaagggtgcttgtgcccgtatttccaaagggctcaggctttcccgcccaaaggccaaggccaaggccaaggccaaggatcaaacccaggcccagggtgcagccccagcttcagttccaggtcaggttcccaaaaggacccaggcccctncaaaggtttcaaagtaaatatttttgccaacataaggaaaaaaggggtggtgcccccccccccccccgcccctggggtaccatttgaaagggggtggggtcctcctttgctttttggtcaaataaccctggggccggga

SEQ ID NO: 678274 - DNA, 160 bp, Homo sapiens
gcgatggggcgtctgtagtccagctactcgggagctgaggtgggaggatcgcttgagcacaggagtactgggctgtagtgcgctatgccgatcgggtgtcgcactaagtacggcatcactatggtgaactcccgggagcgggtgaccaccaggttgccta

SEQ ID NO: 678275 - DNA, 206 bp, Homo sapiens
ctcgtgcgctgtctgctgccggtcgttctacgacggactccccgacccgggtgactgcggttggtgacctgacacggacgtttgacactttaaccgcagacactgacgtgaccgtacttgcgtgtggaacgcccggttgtcccggactgactggggaccgttcttgcttgacttggtgccgacctgacccgacggtgaccgtacgg

SEQ ID NO: 678276 - DNA, 848 bp, Homo sapiens
gcagcgtttcaaagtactgggattacaggcgtgagccaccgcgcccacccggaggtcccctcctttaactccggctggatctatccgcgaggtggggtgggcgccggaataactctctaagggatgtgactgagtctgtttttgcccgtgcacatagacctgcattttatgcagttttgttcacttttgaaagggagtcacgacaaagggagatttggaatgaggcgaggttagttatctcgtattggttgatactgggtggtggaggtttgacagactgccaaatcaggtctgtctagttaccaccacccgcttgttctacactagtgtctcctgcatgacgtagccactgactcttagggaacgtaaacattataataaagatcatttatttccgttatctgctaagcacagtgctaaacctttacacgttttatatctcgtttagtcctcacaataatcctttacttaaacaggtgagagaactggagcccaaagaaggaactgaagcccagggtaaacgagtcagtagatagaagccttccactagcagaaagacgaagaaagaaccacacagaacggcaaagagcagagcaacgcacctgaggggggcacgccacgccgcgagcgtagcggcagcaccgcgcgcgctacagacccagggggcaagcgaggtgccaaaaaggaggggaacaacccgaggaagacgaacatagtattgtgaagaacacaaagaaggggggacaaaaaatgcatgccggcgggaccgcccgcacatatggcgagcagcaccgactataaaaaagtgcacagagagccagacgagggagcacacatgggacataaag

SEQ ID NO: 678277 - DNA, 129 bp, Homo sapiens
cacagtggaaatcatggttaactacttagaatcatccagtcagcgtggactgctcctattttatacagaccagcagattccacagaggaaatgagcagagacaatcagttcccagtgtacactatagtc

SEQ ID NO: 678278 - DNA, 502 bp, Homo sapiens
  misc_feature (2)..(2): n is a, c, g, or t
  misc_feature (61)..(61): n is a, c, g, or t
  misc_feature (71)..(71): n is a, c, g, or t
  misc_feature (75)..(75): n is a, c, g, or t
  misc_feature (103)..(103): n is a, c, g, or t
  misc_feature (110)..(110): n is a, c, g, or t
  misc_feature (112)..(112): n is a, c, g, or t
  misc_feature (115)..(115): n is a, c, g, or t
  misc_feature (137)..(137): n is a, c, g, or t
  misc_feature (189)..(189): n is a, c, g, or t
  misc_feature (194)..(194): n is a, c, g, or t
  misc_feature (253)..(253): n is a, c, g, or t
  misc_feature (272)..(272): n is a, c, g, or t
  misc_feature (293)..(293): n is a, c, g, or t
  misc_feature (296)..(297): n is a, c, g, or t
  misc_feature (341)..(341): n is a, c, g, or t
  misc_feature (366)..(366): n is a, c, g, or t
  misc_feature (370)..(370): n is a, c, g, or t
  misc_feature (377)..(377): n is a, c, g, or t
  misc_feature (384)..(384): n is a, c, g, or t
  misc_feature (396)..(396): n is a, c, g, or t
  misc_feature (435)..(435): n is a, c, g, or t
  misc_feature (484)..(484): n is a, c, g, or t
anggatgtctcatgaccctggtccggtgaagctctcctctgcacacagtctctggaagggnagcagggaanacangacgccctgagccaggaactccacaatnacctccncngancccacctccagctctgcaggangctgcagcgccaccaccaccatcttctcgtcctcgatgatcaggttgcgganttgcnctgccgcgggttgtagttctctacccggtcgtggatctccatgtgcctccgcaggtggncctgtcgggtaaacttgtngccacactcggtgcactcaanctnnctcacccccttgtgccgtctgaagtgcacacgcagttgctccanggctttgaaggtcttgccgcatatntggnagaagtngggccgnttctcctgatgnttgtttgttacgttccttttgttgtgtcccttctcagtnaagcgctgttcacagaactcttttttttttgtctttttttttttttttnttcggtttttctttttca

SEQ ID NO: 678279 - DNA, 508 bp, Homo sapiens
atagacggaagtcgttcacatcattccactgaaactgcctttctaattgcaaaatctaaagagtcctttccaatacttatttcaaacaggcgtctctgggtctttttcaaactccctcccactaatgcctttcaggcatcctccccagcttagcctcccctgggaccagcttcctgccagtcctgaaatgcccacatacacggggaagattcctgcttccacatgaccagcccccagtgacatctccctcagactccagacctcgtctttttttctttttcttttttcttttttttttttggaaacagagtctcactctgtcctaggctggagcgcaatgttcccgtggcggctcactgcagcctcgatctcgcaggctcaagtgatcctctcgcctcagcctcctgaagtgtgggaattacaggcgtgacccaccgcgccgggcctaacttccatctcttgagggctcccacagccacttctcacatgacccagtcagcataaccca

SEQ ID NO: 678280 - DNA, 106 bp, Homo sapiens
ttagagataaccccatcctttacattttgtgcagtagattatttaattaaatgtcttctttcatgttagtagcatccaggagctcaatgcatccaggtgctcaatg

SEQ ID NO: 678281 - DNA, 141 bp, Homo sapiens
atgtacgtagagaggagcttcagtgagcgcagtcgtagcacgtagcactccatactgagtgacagagtgagactccgtctcacgaaaagaaaaagaaaactgtgaattacagttcgggtgtacgtggatcacggcctacag

SEQ ID NO: 678282 - DNA, 120 bp, Homo sapiens
gagcatggtatcagccccgagggcatcgtggagtgagttcgccaccgagggcactgaccggaagggacgtcttttgtctaccagcgcagacgactgagcacatacatcccccgggtccgt

SEQ ID NO: 678283 - DNA, 923 bp, Homo sapiens
agcgggagttgctggtagtgcccgtggtgcttggttcgaggtggccgcttagtatgactccgcggaggtgcatctccctggtattacccgtcctaacgtcgactcgcctttcagtcaggatgtctgcccgtggccccggctatcggcatcgacctgggcaccacctattctgtgcgtcggtgtcttccaacatggcaacggtggagatcatcgaccaacgaccatgggcaatcgtcaccacccccagctacgtggccttcacggacaccgagacgtcctcatcgacgacgctggcaatgaaccaggtggcccatgaaccccatgcaatgactcatcttcgacgccaagaggctgacttggtacggaaattcgacggatgccacagtgcagtcggatattaaacactggcctgttcctgggtgagctgcgcgatgaggacggcaagcccagagtgcaagtagaagtacaagggggagaccaagaccttcttcccatgaaggagatatcctccatggtcctcacgaagatgacagtgagatcgctggaagcctagcctggggggcacactgtgcacatcgcgggtccctaacggtcccggcctatttcaacgactcgcagagccaggccaacaaggacagcaggcaccatcacatgggctcaagtgtgctgctgcatcatcgaacgagcccacggcggcggcatcgcctacggcctggacgagaagggctgcgccgtgcggcgacaagaaccgttgcctcatctttgacccgggggctgcgccactttcgacgttgtccctcctggaccatcgaggatggcatcttcgaaggtgaagtccacgggccgggaaaaccacctgagccgttagaacttcgaccaagcccattggtgagccacctggccgaggaattcacacgccacga

SEQ ID NO: 678284 - DNA, 382 bp, Homo sapiens
aacgctccacccgacggggtgggacgtgcagagaggtatagggtaaaggcaatggaagcagaggatgagaccagcaggccctgggggcttcaggagccttgaccacacctctccggccagagctctcagcgccgcttccagacacagcctcccgcgccttgctcagctccaacatggcaaaaatcttcagccctacagagactgagcggtgcatcgagtccccgattgctgtcttccagaagtatgctggaaaggatgtttataactacactctctgcaagacagaagtcctaagctttatgaatacagaactagctgccttcacaaagaaccagaaggaccttggtgttcttgaccgcatgatgaaagaaactggacacca

SEQ ID NO: 678285 - DNA, 105 bp, Homo sapiens
caaaaagtgtggactcagcgactggtaggaccatcactctcgaagtggagccgagtgacaccattgagaatgatggtcttaccagtcagggtcttcacgaagatc

SEQ ID NO: 678286 - DNA, 302 bp, Homo sapiens
caaataaaaaaaaaggaaggaaaaggaatttaggagggaaaggaaattcctggccggacttccaaggccccccttgaaaggggccctcctttaatttaattccccatcccacccaggggcaccgaaaatttttggtccccctaaaagggggggcatttttttttcaacctccagggcccagcggtggggaaaaaaaaaaaccctgcttaaaaaaggggcctcccaggttggttaaatcagccccactgggccggttcaacccggaaccaaagggcccaccacccaaaacacacggacttggg

SEQ ID NO: 678287 - DNA, 228 bp, Homo sapiens
ggctgtacagaggatccccatttactattggtgaatatgtgctataatggtatggaaatttctaaaatggccacagaaccagttcaggtactgccattgtggtcagaaaacagtaatgatcctaactcttgtgggataatctgtaatattcctggaccttggatttaattcatgtgtcccaagattaaaattaaattatgctatggaacctcctaaaactaggtgggg

SEQ ID NO: 678288 - DNA, 452 bp, Homo sapiens
  misc_feature (452)..(452): n is a, c, g, or t
gtcccggttgagggataggaggttaatggcggataggtgtctgaccgtcccggatgatgcacttatgacacactgatgtcatgattatgaccctccaagtagtttttccccggacaagctcttggtcataaggccccatcacgattgcgaccctgcctagtgatcccctttcatgctttccggcctgctctctttataaccagattccccccatgcccgcccctgccccccttcttaccgtaagtaccaactcactgcccaaccatccgccgcccattcttacgaaccaaactgccaaaacttcctctaggcttcccccagcttcttatgaggccaccagcactctgtttcaaagagatccccctccggccttctgcgtcagactcagagcctgcgctctcctgtgtttgcccctctataatatccgatgctaaaaaacgtcccttccccan

SEQ ID NO: 678289 - DNA, 335 bp, Homo sapiens
cccagctatgcgggaggctgaggcaggagaatcacttgaacccaagaggcggaggttgcagagccccaagatggcaccattgcacttcagcctgctgggtgacacagcgagactctgtcaaaaaaaaaaaaaaaagggaagggaattaaaaaaccccttcaaaaagttgggcgctatggcccatgcctggggtcccagcattttgggattttgagggggggggatcacttgacccccaaatttcggggctccagtaaggtatgtttgccccattgcactccagcctgggaaaaaagggcaaaatctggtctctaaaaaacaaacccaaaaaaaaa

SEQ ID NO: 678290 - DNA, 345 bp, Homo sapiens
  misc_feature (11)..(11): n is a, c, g, or t
  misc_feature (51)..(51): n is a, c, g, or t
  misc_feature (97)..(97): n is a, c, g, or t
  misc_feature (120)..(120): n is a, c, g, or t
  misc_feature (176)..(176): n is a, c, g, or t
  misc_feature (242)..(242): n is a, c, g, or t
  misc_feature (264)..(264): n is a, c, g, or t
  misc_feature (314)..(314): n is a, c, g, or t
gggcagctctngcgtgcgcgaaggctggctgcgcgagcggcgcgtgcgctngggaccaagatggacctcccggcgctgctccccgcccgcgactgcncgctgagggcaacattggcggcngcgcgccgggcgcgcggctgcgcgccgagccccatgctgcgcggctgcgggcgacngccgcgcggcgcagcgcggcgcggcctgctcacttgttctgggcccttaacattggcgggcccggngcgcgcccggggacggcctccnggccaaacccgccggcccgccgaggagcgatcaggctagcgggcgatctncttttcttccgttgctcgctcggaagttgcc

SEQ ID NO: 678291 - DNA, 329 bp, Homo sapiens
  misc_feature (119)..(119): n is a, c, g, or t
gtttccctaccctgggtttgccatcaacctttaagggcctcgattaagccttttttgggaccccttcagcccaggtccccctcagccttggccttcccgctgtggaaacaaccaagggncctttccccccccttagggccccgggcctctttggggagtggccggaaagctcccgggcctttggcctgcagggcagccccagtcattactcagacccggtcccccccttagctgccccccctcgagagcccgatatttttgtagtttttttgcccttgggttttattaaaaagggtagtgtgttcccccccataaacttgttccttaga

SEQ ID NO: 678292 - DNA, 666 bp, Homo sapiens
ggtggatgcggctgatcaaggagttctccatctacatgacaaaagaatggccgcatctctgtggcagaggtcacctccatgcaacgtgggctaccttgcccatgccattcaccaggtcaccaagtaatgtccctggtgcgaggaacaacagagacaatcgctttctgtcttcagcctctgctattgagagcttcgacacagacaatgagagagggtggatggtggtgatgtggatcatttctttgcagcccacagtgtgtaacactcaggcatttgaatgtttctcatgaaaagtagacatgtagtgacacagtgggcataggcatccatggctggcgtctggtaatattaagaccaaactctccccggtccttttttctccaacttttctcaaagagtttacatgtgcaaatgaaagtcagtcgtcacctaaatagaacctgtcaaattagtgccattgcaagtatttcatgaagctttaagctgaagtgtcacggttcctcgtgagaaacgagcgacacgttagaggctttgagagaaggcctaggttctgtctatgaggtagtcggctcgtgtctgtcctcccatcttggaacaaccttatcaacaggccgcactgcagaaatgatgttttatgaaagagcaatgaggctgctgacactccag

SEQ ID NO: 678293 - DNA, 554 bp, Homo sapiens
  misc_feature (40)..(40): n is a, c, g, or t
  misc_feature (444)..(444): n is a, c, g, or t
aacatggatggacctggaggacactatgctagtgaaatangccatgatctcacttggatatggaatcacaaaattgaactcacaagcagagtgtagaaaggtggtttcatggactggagggaggggataaatggggagatgttggtcaagggtacaaagtttcagttaaacaggagtagtacgttctggagacctgttgtgcagcagggtgactagttaatgtatacttgaaaattgctaggagtagatctcaccaggagaaatgaatatgtgaggtgatggatgtaactagcttgattgtggtaatcaatttcgcaatgtgtacatatatcaaaacatcacattgtacaaaatacatacagtttttgtcaatttaaagatatcagaattctagaatatgataaagttgtgttttcaagcaagtaaagatagattacttaaaanaaaatatatattaataattttattttaaatacttgtggggggtccttgtacccattttgttcctattatgagtcttattcaaatttattggccgttttttttacattctt

SEQ ID NO: 678294 - DNA, 444 bp, Homo sapiens
  misc_feature (315)..(315): n is a, c, g, or t
  misc_feature (344)..(344): n is a, c, g, or t
  misc_feature (383)..(383): n is a, c, g, or t
  misc_feature (396)..(396): n is a, c, g, or t
  misc_feature (413)..(413): n is a, c, g, or t
  misc_feature (431)..(431): n is a, c, g, or t
  misc_feature (439)..(439): n is a, c, g, or t
gttatgaaaaacaattaggaaaggataggtaaatgtaaaataggtgaagggtggggcttaatcacaagaaagcaagccaaacgagaaaatagcttctcaatctcgtccgtgtattttacttgtagcttggatttcgggctttcaactgtctttgccttgtcttctagtaattaagtatgtaccttggaggtagggtttcaccatggacccaccttcatctgcctaggcatttggctgcctcctgccactgtcactgggaattttagcccagagtgccctctttgagtcattcccttcagggctcaatggcccttnactccaaagctggcaggggtttgcacttncttgtggaggaaaggggaggttggccagtttcacactgncaggaagcctccntcagtttgaggaggacnttaattaaggcaatgggntgtttccnttgtt

SEQ ID NO: 678295 - DNA, 685 bp, Homo sapiens
tgctttgaacacatcttctgctgaacattatgtagcagacctgcttaacttggacttgaaatgtacctgatgaacaaaacttttttaacaaaaatgttttctttggagacccttggctccagtcctatggcagaaaacgtgaacattcctgcaaagtattatggtaacaaaacactgtaactctggtaaatgttctgtggtgatggtaacattccacagattctacctttggtgttcgtctttttttttacaatggtttaaagccatttcaggtcccagtggtcaagataagggaaatggtgataatagcggtttcatcatggtctccaggagagctttccagagtggatcatttcccctcatgggtactctggctcagcaagttggccacgtaggtccaggtggtagtcggtcacttttttcgagacgggagtctcaactctgttacccaggctggattgcacggggcgacaatctgtgggctcaattataacctcacattctccgttggtgccaagcaattcccctgtgccttgtagactccgggagtaggctgggactatacagcgcacaccacacacacagcgcccagtaaggtatagggatccaaggaacagacggggtttcaccatggcaaaggcccagtgtggcaacgtaggttctcaaaggcaagggggcgtagaaa

SEQ ID NO: 678296 - DNA, 482 bp, Homo sapiens
aatctcgaggatccccccgccagcccttaaccttacagctgcgactcctcatacaggcagctcagagagtgaggtgagactcatggaggacgctgactatgctatgctgccctgcagagggagagccactcctgcacagattgtgacccacactatacacaactctaagcaccgccggcgaacagtgttattggtgttgctttaattgacactgttgatgaaggtgctgagcatacgatagactcaaggtttacaaggctagaggcccggctcgttggcctccagaaagcggtcttcaccccaaaggtaaaccctgacccattccatctatcttggctctgcaccacagcctgtgatctgtgtgtcatctccatgccagacacttgctactctgtgctctagactgcaaatcaaagcaggtggctagtgagaatagcctttctaatggagttccgtcacgtttggcttaagtgccaaaaccc

SEQ ID NO: 678297 - DNA, 662 bp, Homo sapiens
caaggaagtcgagacagcctgggtaacatggcgagaccctgatatcaatattaaataaaatttaagagatagattctaagactaagtaagattggtttacgcttattttagctagctgtgacaaggacctgacataaaataaatgatgtctttctgactcacaatataaaactggccgtcatatcatatagagtagtgatagaggatttcagcaccctgggagatgctaaatatggtatagctgctaagtcttttctttgctgacaaagaattttatatcttaggagataaagaagagagtggtcataagtttaatctgtaagaacaaattgcttggtgaagtagaagtgattggaagtttttgggaacaggaaccatgacccaccccctaaagtttattacagcagaaatgaggagttctgagcatgtactttagggaaacagattttaaaatgtaaacatcattccaccctctgcaattttaaaaaagataatccttagagaaaattgaaagattgtcaacaagtaaaattatgattcactgcaaacaatactatgagaagaaaagttgccaggtggtgctgctactggtctggggaccacgctttgggaggtacccatgtatccattggctttgtgactatggtaacacttaactctat

SEQ ID NO: 678298 - DNA, 123 bp, Homo sapiens
ttttttggttgagtcaaagcgtcacattggttttgtttatggtttggtttatctcatcttggaccgccggttgatgtgccgatgacctgcgggccccgctcctctgctggcattctaatctcg

SEQ ID NO: 678299 - DNA, 377 bp, Homo sapiens
gtatcagatttgatatataccaaacaacaacactctcataaaacagaacatacctcccccgtgaacaggagatgcttcttccccaggcctgacatctccctactgtgagaagttcaggtcatacaactccaggcttctttctgaccccttagtcaacctgctaaggatgtctggatgtatgtccgttaaaaactcatgtagaaatgtgatccccaatgttggaggtggggtctactgggaggtgcctgggttatggtggcagatccatcatgaatgtcgtagtaccatcttcatcctggcagtggcaagtgagtatgcactctattagttcccacgaaagcaggttgtgaaagaacctggcacctcccaacaacctc

SEQ ID NO: 678300 - DNA, 213 bp, Homo sapiens
cataatgcatgtggcacttacggtccaaggtctccagagggtgcaagctggagtcagtcaatgtcctacgtgagacagcacagccaacctagctagcaacatgtggtttagtctgaacaatatatccttatagaatccagtcaaagatacacaatctagaaacagcttcataggggtggcactctacacagtagtggccaaattgttttcagc

SEQ ID NO: 678301 - DNA, 646 bp, Homo sapiens
actagttctagatcgcgagcggccatcctgcacttcagactatatgtcggagcacggatctagcactaacatgtcagtatgagacaccccttgccccagccaaatagagtctatagagattcaaagtccggatatggagttactcatttccagtggctcacaggtagctggaaagtaaattgtaactgtaaggaagatcagtacacactaacagacattccaggattgtggttgtaaaagcaattctgtaactatccagatatttagtaatgtaattacttgttacttcagattttaggtaaggaggggtggagacaagtagtgaatatatgaaactggtggtaatactccatgttctgaattattagcaagttgctctaatatactcatgatattgtaagtattggacatgtaggagttaaagaatatctataacaatagtcaattcttaagatactttagtcttgatttttgaacaggtatctatgcctatattaatattttggaatcaattggtctagtgactctaggatcaatgaatatacacaacgaaatactcatacagcatattgagacatctcatacaaagaatttgcacccgtatagagaaaacctaatattttccaatactagcttgaaaaccaga

SEQ ID NO: 678302 - DNA, 645 bp, Homo sapiens
aaaataaaaaaaaaaccagggggggtggtggcctcgggtatctccaccttcccgtgggctcttaaaatgagaactgggtttttcccagagaggtgaacctccagtaagcagaattaccccccgcgctcaacattgtgggcaaaagagagaaccccctttataaaaaaaaaaaaaaaattctgagctttttcttctcccggcctcaatattggtacgaatatgaaattctcccccaaaaaagggggttggggtaaagatttccttttttcccaacaaaaaatggcctaaaaaaaaaacgggttttttcccgaattttgttaaaaagaataaaaagggccccttaaaaggtatttccccccgctgcccggggggggaaaaaaaaaaaaaagccattttttttttagaggttacacccctggtaacgggatttttttaagtatgtccccgccccaagaaaaaattaaaacttttggactagggcagtttgtgcaaccttttgggcccctcacgcaaagggggggtaaatttcaaaaaccccggggggccggtttaaaatttttatggagggccggtttattttcaaaaaaagggggggcccccccaaaaaaaaaaaaccccccccttaaaaagtatggtttaatggca

SEQ ID NO: 678303 - DNA, 1409 bp, Homo sapiens
tagggctcgcccgtgcgggggtcgcgtgtgtggtgcgggcacgtcttgtgggtacgcgttgggtttgtcgggttgggtggcgccctggcgtggtgtggggggtcgcttgcgggtgcgttgtggccgttcgttctgttgtgggcccgcggctgggtgtgtgtgccgtgtggggcgcgtgggggctctctgagcgggttttctggtgctctgctggggagcagggggggggggtgtggtgtgtgtggtggggtggggcgtggggtaatgttcgtgggggggtgtgggggcggggctgttgtggggacggtgttgggggggtgtgtgggggggcgcccgctttatgcctgcccgttggggtgtgcgtgcccgcctatccggagttttggggtggcccgccgtagttgggagctcgcgtagggatccgcgcccaggggtggtcccccagtgaggccagggcgtgggtgtataagcggggcgggcccccgttgtagtgagtttaccgggtcccttataggggttattccgaaggcccctctggggttgtggccgagagtttctgggcctaccgatggggccacccctttccccaggggaatatccccccggggcgccccttttgtggggcgccggagttcccaggccgttttccccccggccgggaggctctctcaagggaggcctgcgttgccgaggatggagagcttggcgccccctggggacccccggcctcgaggtttttttccggggaaatttgtggagcttacccacccacaaatgtgtcacgcgaggtggttgttcttggagcacccccgaccccaggtggtctggccgcagaggttggacctcttttgtggcgaggtgatatgtggcgcctgtcacgtgtgccgttgcctcttggtcttcttatctgtccacccgagggtatctgtcacaaggagcttgccccccctcacagagggccccccctttgggtctcccggtatgccctctgtgcgtcacccggggggtgtccgcctggcctttcgcggggcctggggcacttgtcgtgcgccaccaccgccccttctctatcccttcttcttcctcgtaacccctcttcacaattctggagacttggcccacggttctttctgcgagtccacgcgtataccccactctttatccctatggagggcccacagaagaatttgaagggctcccttcctcacggatgcccacgccgaaatgaaggggtatgaagcccacttctggggcccacgcctgcctgccgcaacccctgtggcctcccttgtggaatgggaagaaggcgggatctgctctgaggccctcgaggctcacccgagcgtgcccccatgagacccccatgggaaagggcctatttaactccttattaaaaactggcctccaga

SEQ ID NO: 678304 - DNA, 1200 bp, Homo sapiens
  misc_feature (340)..(340): n is a, c, g, or t
  misc_feature (497)..(497): n is a, c, g, or t
cgggacgcgtgggtgcactgttcagaagtaacagagagagctgggttctcaagggtcggccacccaagtgataagtcagctggtggtttcaaggctcctgatataaggtccgatgcccaatgtttttcaaaccgaagacgttggggatgacgtagaacgaggaacatgatgagttggtcattgagagcgatcttgcagagagaatcctgggtagtctttactcgtgtctggtctcgttacaggccccgaagcacgaatagaatgtttacaacgttatggtatgcccaccatgctgattagcgatacaggttggcgagcggttggtaagctccgtgataantggtatctacgagtagcgagggggtcaagcttcctctgaaaaacgcataaaatcaaagtcactagtaagacaagctaaatgttcagtacatgccgttcaggaacgtggtgaagttgcgttttaatcggcttggatgcacagcaaacactagcctggntttccaaaggagcccaagtgcgttgttgtccgcgataaagccatcttgtggtatgctgtgaaggctatagtctatgcaacttggaggagatagcgtaggtggagaacgttaatcggaggaccgtagcaaagatacgacacgtgagaaacgatgagtggacgatggtaagccctttagcttgtgcttggcaactggagtgcagcaggtgtgggttcatgactggcgttatgtgatgacactggaactcatgtactggtgattttccaagggtctgactccatgcgtacgaatgggccatgagaccgaatagtagggcctagggtcagatggcgcattgcgcgcatagcactttcataataggagagggtgctaatggcacccactccgggataagatccctctgggctgtaaagggctctcaaaagcatgggaacctgcaggtgaaaaaaaaacggtggaaaaagggggacaataatatgcggtaaaagagcgtttaatccgcgtgattagagatggggtaaataaaaacacaagaagagtattacaaaaacaacaaggtgaagagcatatactacaaaattaggataataactagttaaggaaagaatcatatgaatgtagagaaatgattgagagtaagatagtaaaaaataatatgtagctacgaagatgactatagttttatttatatattattatatgg

SEQ ID NO: 678305 - DNA, 117 bp, Homo sapiens
agagcatcctaacagtggtgctgcagaaggtgttgaagttttcatactcgggcatgtcctggtagccggctttacgccactgggctatggtctcaccaagataaatgacaatttgaa

SEQ ID NO: 678306 - DNA, 301 bp, Homo sapiens
agacacaggctcaagatggctagtttctggaggatttttatcatgaggggatgctggattttattaaaagcttttcccatgtctattgagatacacagatggttttaattctgtttatgtggtgaatcacatttattgatttgtatatgttaaaccaaactcgcatcccacgaatgaagcctacttgatgatgatgaattaactttttaatgtgctgctgggttttgttgctagtattttgttaaggatttttgcatctgtgttcagcaaggcattgtgtgtcatgtggatcttagttacc

SEQ ID NO: 678307 - DNA, 201 bp, Homo sapiens
agattgatatatgtctgtaagctattaaagaattagaggatgtttgtttctctataaagattagccttttacttgcaaaaagaaaactacaaagtttatagatatacttgctaatttttaaactttctgaaacgattagctgtagccaaatatgtggtttacgtttgctacattagaatttgaaatgcaatatgtgtggta

SEQ ID NO: 678308 - DNA, 606 bp, Homo sapiens
agagagtcagaaagaatcaaggtaggtatgtttaaaaaaccaaatgaaagtgagacaattagtaatttccaggaaaacaaaaaagcagtacaaaaaacaagtctgcttataattacactacctgactcaactgtgaataatatttaccatttaatgatgtaaatactgaatattaatctaacaaaaaattaagatatacactcctggaaggatgaggggatgataatcgtatgtaagagagcaaaaccccacatctttcatagtaccaagtcattaaacagctaaaactataaatgaaaatacagcagtaaaaaagcttccttggaaacatagggaaaatgccaaaagaaagagttaaaggcttgaaattactcctcatagaagtaagaatcctaggttcagaggggtggggaagattactattttttcttatgagccttgtagaatcatttttctttttatttactgtgacaagtataaatataaaggtgaagaaaagtttaggaacattacatgctaataatgatggaagttacttgtccaaggccattcagctgaaaagaggcagggcaggatctaaattctttactcattacaagtcacgtg

SEQ ID NO: 678309 - DNA, 286 bp, Homo sapiens
tctgtggccacagatgcatattacaagcccatccagagccattatgaagagaaagtggcaattttattctcagcctgagaaatccacaccaatctagtctgggtttccaaggatctgccgtttaagtcacttagcctctatcctttccgggaacaacctgcccctagagagggtgaacgagaatcgtccccagtgcctccaacataacaaacccaatcgccctgttaactttaaatcttcaactcgagaaaaaggctcatgactacttctaaccatgcccaaaccc

SEQ ID NO: 678310 - DNA, 443 bp, Homo sapiens
  misc_feature (329)..(329): n is a, c, g, or t
tcagcctgcctacaaatacatagactgctgctggtagtgagaggggacatcatggtgttactcgtagtgagcatctgcatgagctcatcgttgtactgttgaggttgtcggcctggcccagtgttctgttggccgcagagtgataaaggaaggggcgggataatccatgccagcggatgctcctctttgaggtcttgtccagtctgcgcgaccttgagagtgtctgccttatacttaaacttatctgggacgtcttgctggtttagtggaaagagccggacaaacttgaaactttctgcaaccacatagaaaggtttgttctgtgcttnggcacacacagccatctggttggttccaatcttgttaataattcctccgttttcaactttacaccagcaacagctatgacaaatccttactccatgatgtagacgacagcagat

SEQ ID NO: 678311 - DNA, 417 bp, Homo sapiens
atttatttcccggcaaaaggctcaattcctagtgcattgcttatctcatggtagggaagcaaataagatttcctgaaaaaatacataggtttttcaaaacttcccaactttttggcctccaagagcttaagtatttccattttcattctcaagttcattttatgggccaaaatggaaatgaatagtcatctaaacgtggatttcttccaacctgttcatttcaaatataaaagctaatagtaccttttatttaggacccattgggtgcaggcaccaagctaaaagcccttcccacatcatctaattaataactctatgaggcagatacttttattatttccatttcacagattagttagttgaggcaagttcatgcagctatgaacgggcaatgccatagtttgaacttagccagtg

SEQ ID NO: 678312 - DNA, 323 bp, Homo sapiens
tttttttttgggggggttttttttttataaaaaagcctcaaaattttttccccagagaagtttttttcgcccttttttaaaggggacccacaccccatttttggcggggtatacacaccaaagtttttttttctcccctggggggttcttggagggtgttttcccccctgggggttttcccccaaaaaaatggtcttcaaatttccatttgcctccccggttttccccaaattgttagccaaaattttccgggttttttaggttttaatgccctttgccctgcctaaatgattctggcttttggaaataaccttgatgctcaa

SEQ ID NO: 678313 - DNA, 980 bp, Homo sapiens
gcgcaagtagctagagtgtgaaatttctttcgctttagcttcaagtgctaacatacgatgcccacgcgtattgagccttttttacatttgtctgcgcgaaagcgtttctgccgggtttcgaaactcttgctcatggcggtttctccctgatagtaaaatttggcgcaacctgagaaatcgccccccaggccgaattagccacactatggggggaccacacaaccaaacaggggggacacaacgacctgcgaaattcccccaccggtatgatgggggacccaaacatcttactccttgcgggcatgacccgttctctacaccgtccctggtctctggccccccccctcttgccgtgggcaactctgtcctccatagctccgctgtctttttcctagtccttggtcttttccccccccgttgttgctcacgcgccccgggtggctcccaacaaaggcttttgtggccccccctcgccccatctcaccactcgggtgcgacaacacaggcgccctattattttcgtgcagcggggacccacagcgaggattcttccggctcgccgtgcctactcccctcaggagggtcttcccatgctccttaggcacgcgcttcctgccgtgatgaccccgggcatactgttggactcccccttcctcccctgcggaagacataccgcgaaaatgtgctcttggggagtcctcacaagggagggcacagacattcacagcccgggcgtgattgagtgggcgacccacctggttctcccaatggagcaggagccccacacagcagatatgtgccacggcggggagtgcaggcggaccaccccggaaagacaaaacacgcgggggctctacacacaaggagcccaccaaacgagcaaagggatcaatcaacccccgaaggctgccaggagcagaagccccccagttttttttcaggtttaaacccaaaaaagaccccttttcccccaccaaaaa

SEQ ID NO: 678314 - DNA, 458 bp, Homo sapiens
  misc_feature (453)..(453): n is a, c, g, or t
gggcaacccgctcgggtccccttccacactgtggaagctttgttcttttgctctttgcaataaatcttgctactgctcactctttttgtccacgctgcttttatgagctgtaacactcaccgcgaagatctgcagcttcactcctgagcccagcaagaccacgagcccaccgggaggaatgaacaactccagacacgctaccttaagagctgtaccactcaccgcgaaggtctgcagcttcactcctgagccagcgagaccacgaacccaccagaaggaagaaactccgaacacatctgaacatcagaagggacagactccagacacgccaccttaagagctgtaacactcaccgcgagggtccacggcttcattcttgaagtcagtgagaccaagaacccaccaattccggacacagtgctgagaatcatgccttgaaatctagcagctctngttaa

SEQ ID NO: 678315 - DNA, 615 bp, Homo sapiens
acttccttcctgtcctgttcaatagtgatcttacgactgcatcaggcagtgtagaccttctaatccgccatgaaactcctccctggaattatacacatactatcaactctactatttgatcatcctcagtatcttgaatgggcttgccacccgtgtaggccccttacatgttgtctactcccaaattatcgtactatgctaaatatggaattgagtgtgaaaagtgcctcctaagccaatctgtttctaatacatgtacatagtagtaagaaaaaacatgggggaatccaataaggaaaaacccagtatggtgtggtatcagagggtcttgttatgatgagtctactgggaatatattatgtagagtagataggttattgtaaatggtctttttctcagaggagatcagtttctttaattgtttcattccttgaagggacaatgtcaaagctgttgagcccaaaaacaccccctttgactcatttagctcacatggacaaattttccctaaagaatgcagaaaggaatctctacaaagcaattaattaatcctcttttgcccaactgcaagcagtagcacatgagccttggcatttcctgtcactttataacaaa

SEQ ID NO: 678316 - DNA, 279 bp, Homo sapiens
cataataaacatgtaccacatcatgtataagtgtacatcatgtctcagtgtcaaatataggtaattattgcaacatttcaaacattctcattgtctctgctatggtgatctatgatcagtggtctttgatgttactattgtaattgttttggttagccacaaaccacaacaatataagacagcaaacttaatcgatcggtgttgtgtatgttatgaatattccaccagctggccattccccatctctcttcctatcctcaggcctccctattccctgag

SEQ ID NO: 678317 - DNA, 479 bp, Homo sapiens
tcgctctgaggattccccgtattttgctctacaaagtttccggtattcgaaagagcaaccagcagaaccggggacccatcaattgcagcaaccggtgcacagaattagtggagtacaccagcaaagatgaggttgctgttggtatttgggtttcccgggccctgattatgtttgtcacattcagaacacacatacaactttaagaagtttggctgaagtcactaaagtcgttgtccgaaacttgaattaaaattattgatataaactactatcctgtaccagaggcattcctatcaattaaacgccatcgccccattggattgggggtacaaggtctggcagatgctttattcctgattagataccctttttgagattgcagaagcccagttactgaattagcagatctttgaaactatttattttggtgctctggaaaccagttgtgacctttgccaaggagcagggcccatacgaaa

SEQ ID NO: 678318 - DNA, 892 bp, Homo sapiens
tcgcagtggaggaatatatgcgcggtgtggcggggaactcattcgcgcccgctgtggtcgcccttgacgttcctgccgggggtgtacaaccttttgttcatggaacttgaccgcccttcctatggccgccgagctttttgtggccccccgccgtgtaatgtgaacttaggaacatatttggtcgcctcctagaagtgtgtcgtggaacaccccctgcattgggggacaactccccccatgtgttgagcaaccgccccctcatgcgaaacaatgggccccacgctggttttggccgctcgtggtgtcctttaagcggctgtgctttaaacgtacgcgcttaggatgtcggtccatcccgaaacgggtaggcgttgagcatgctgtaaagtttttcccgggcgccttttttgtgcaccgggagcatccctttggccacttaagtggcccacaaagtgcgttgccccccgtggagacactcagtcacaatcaatgataacagaaagttgctttgccaaaaataacaattgttcttggggtttaacagacccgtaaaagtagggtcctccaggcgtctgtgtgagaagccgtgatcctactaaaaggggcaaaaaacatcagaaatattgatccagggcgtgtcctttcacgggaaaataaggagcgagtctatctgcaccgccgaaatcagttcatgaggggaactagtcgggagacatatgtttgcgcgcacttctctcttgcattggcacgatcaggagcgagtccccttctaattggggtgtttaaagcgcagcattcctccaatgacgccctgtactgctggggggctttcacaatctttgcggagataaaaaaaatttttacaacaacaaagttttcaaaccacaaaaca

SEQ ID NO: 678319 - DNA, 130 bp, Homo sapiens
acctgtaaaaaggcacagaggctggagagaaggtgcatgtcccagactgcatgggctcggggtagggggatgcgaggtctgaactggcatagtggccaggatctcgagctctactccatggacagggggg

SEQ ID NO: 678320 - DNA, 282 bp, Homo sapiens
gaccagaggactcttcagaggcaccaaggaggtgtgagcatagatgctgtgtacttctgcattggggagtgtgatggcttaatattgagctgtcaacttgattgaattgaaggacgcaatgtatcgtcactgggtgtgtctgtgaggcgtgttgccaacaggagattaacacttcgccgtcgcgtggcactggcgagcaagcacgacccaccccatccttcctttggctgccctcctgggggctaccggagcctcgaacttcgctaactcactggctcacta

SEQ ID NO: 678321 - DNA, 192 bp, Homo sapiens
cgtgctcgtgttgttgctggcccgcggagtgtctgctcatcctctctgcttcttactcctcagtctgcttctgggttcagctgccaaaccaaatactcacagcttcctggatgcaaggacccgctaggctgcaggtctgacacccacaggcctccaagccggtcccaacaagcccctcgccgccccacaggc

SEQ ID NO: 678322 - DNA, 229 bp, Homo sapiens
tcagcggcctgcacagtgatgacctcatgaatgactatcctaaattgaagtatgcagttctctatttgctgggtttatacagtgctggttcatcgtgagtaagaagcctgccttgcatgtacctgggcagatgccatagttttcgtatactcggctgtttggtagtagatacgtggtctgtgatatagtggaataggagaacacacgtagtcggtgctatctgggtagc

SEQ ID NO: 678323 - DNA, 212 bp, Homo sapiens
attaaaagggttttttttcttcccccaaccccaaaaggggggttttagccccccgggaaggggccccccccttttttaacccccgggggggccttttttttcccccccccccccctcccaaaggggtcctctttccgggccctttttttttttttttggccccaaaattgggggggggggggccccaaaaaccccaacccccccttttttga

SEQ ID NO: 678324 - DNA, 115 bp, Homo sapiens
cgctctagaggaccctgttgctacggtggagtgcctggcttttaagacagggtctccgctggcacggtggctcgcgctgtaatcccagcgcttatgggaggctgaggcggtgaat

SEQ ID NO: 678325 - DNA, 254 bp, Homo sapiens
ttctggggatattcagaagctgctaaaaaacggatcccccggtttccgactgagtttggggattttggccttgttgaccctcctaggtgccctgggaattgcaaacagctttttggatgaaaatttgggcctcaatattgccaagaaactgagggggcaattttaacttttttttttccctttaaagcttgcagaaactgttccccccatgaaggtaatatgggatcatttgttaaataaaaataaagtcttta

SEQ ID NO: 678326 - DNA, 492 bp, Homo sapiens
gtgtgcgcagtgatctagaggatccggggtcatcgatgcactccacatcactccggcttaagaactattctctctttttaaaaactaactttacgtgggcggggcacaggggctcaggccggtaatcccagcacttggagaggccagggcaagaggatcactggaccctaggaatccggacagccggggcgtggtctggcaaaaggcttccaaagccaccttagccggttctattcagcggcaaccccaaagcaccggttaagactccggacccccaaggtggcatgcagcccccaggcccacggggaccgggtcagcacagatctggatgacttcccttgctagggcagagggggagggtatccaggaatcgggcccggccccaggggcgttttcaggcggtacagggacctaaagtgggtaagatggtcataagggaccagtccaggtgatttcagtatatacaattccaccagacccctccaacccgat

SEQ ID NO: 678327 - DNA, 308 bp, Homo sapiens
  misc_feature (170)..(170): n is a, c, g, or t
  misc_feature (252)..(253): n is a, c, g, or t
  misc_feature (296)..(297): n is a, c, g, or t
agaagacggtagatgagcgtggacccttgccgctctcgtccgcacttgtgagtgtgtgtgcgccgcagacgcacacacacacacacatattctctctctctcttatgcacacatccatccacatcccaacaattgcaggtgctaagtttggacataacccagtggactcnttcccgtgacttcgtgtcgaggtccgtggaaaggaagcaagtaataacatgaagacggcagctgggacgtgctcagatgcanntctctcctcttccaactgaagaagcgggcaagagggggatccnntctagagtcga

SEQ ID NO: 678328 - DNA, 1117 bp, Homo sapiens
  misc_feature (333)..(333): n is a, c, g, or t
  misc_feature (562)..(562): n is a, c, g, or t
gagcgcaacggcgggggagcatgaacgccccgtccagccttcgagatcgttacttgctcttcgagggcgagaaggatcactcattaatagaggacacgcatagggttaccgcatagtgcgccatgtattattcaccgagtgaagctgatagaagtacccactacgactggtgagaaccatcgatataaatcgacggtgcctggctgtcccctgtgccgccttctggccgtgcatagtcgagtcttcactgaaggcctccaccaggccgatcggctttcctggtacagtgctgactagaacctgtaggaacttacgccttgccctgacagaggnctagcggagatcgaaggacggatacgaggacagcacggtctccctaggataaaggcaggctggtaagtgcacgtgagtgaccatcttaggcgtcagctgcaagcgcatcgaacctcccgaggctcgaggtgatcctccacacgcatcaggtccttaaaggacagcagtcgctaacattcggcggactcgttgtgagacgaaggtagaatccaacgagggtcagacgttnaggccggtgcatacgtccctttggggcacggctaggtatccttgtaggcttgcccctgccttccttcctgcgatgcacctcccttggtcaaggctgctcctgggtggtgtcgggcgcggcggcgtcaagtcccaagtgccttggtggtttgggaacctggtgactggttcctccgttacagtaggacccgtacctcatgcgtcgatggaccgagtactctcaactgggagctgagggagatttcgtgtccacccaaaaacttgtccgaaacaggaaaggtttctggaagcaccggaaaggtggcgataggcattaccagcacgggtggccataccatcggacgaattggccacggtgacacccaaggtttgcaccctttatggcccacagggacagagaaactcacacgatccattggggggaaggcccctcacatggagggggattggaaagaccagcctgcgaaacgacgcgggacaagggggcaatcgacaccgatattgcggcacaacaacggtgggacaccggttttgggccccgggcgcacaaaagggg

SEQ ID NO: 678329 - DNA, 323 bp, Homo sapiens
  misc_feature (13)..(13): n is a, c, g, or t
  misc_feature (43)..(44): n is a, c, g, or t
  misc_feature (108)..(108): n is a, c, g, or t
  misc_feature (171)..(171): n is a, c, g, or t
  misc_feature (263)..(263): n is a, c, g, or t
gatccatagcgcnttctcaatgtgtgtcacccggaaccctgcnnggggagggaacactggggtttaggaccacaactcagaggctgcttggccctcccctctgaccangcttatcctgagtttggtggctacttccctctggcctaaggtaggggaggccttctcagattntgggggcacattgtgtagcctgacttctgcaggagctcccaattccaggaaggaaaagagccaaggccccacttttggggatcagggtgggncctgatcactggggcccctacctcagcccccctttcccctggaagcacctgcccacctgc

SEQ ID NO: 678330 - DNA, 1398 bp, Homo sapiens
ttgataagttgaaacacccttggtgttgagagacgcccatctgcccctctgcttgtcctaagagagatgagggggttccccacccagccccactacaacggcgaaaatttgtgtgtggacagatacttgtcgtgggagaacttgttcccgtgggcatattagagtgacacgttccttccaccttctgtgagaggattataatttcctgcgtgcggagaaaattaagcctactgtgtgacctctacttgcttttaaggggccctcaccggccaaggattttctgttgcgggcttttgtgggttaatgaaagaaaaatgaaaatagcattgtgtggccttctcttaatgtttaaccttggggggggtttcacccagagcaacatgtgtcccagcgaagtattttcttaaggttcttggggtttttttaagaaaagtcccaccttgtgaggaaaaatgaggtctgtgactatccccgggggatctttggtcacagcgcattttttaaaagatgcgcggtttgtagaaagatgcccccagtcccccgtatttggtctctgggcgccttcgtggcccgatagaaaagtgttgcggtggccaactatggcgccttgggcccctcctttgtgcggtttgggtgttttaaaacaataggcttgttcattgtccttggcgacccacaagagcctctgttgttaaagtaaaaattatctttacaggggggaggccccccccccctctttgggggagagtcttttgagatataagatacccacaggtgtcaacagccccctgttgtcttctccccctctcaaagtacataatgatatatatgagaccctctgtaacacgatgtctccataagagacatatatataggtaaatttctctgagaatgagattgtaaaattttgagaggagatattgttataataacacaataaaaatacccaagtgtgatcacaaacctttctgtgcccacactcacgagattgtcttttctctccacatcacatggtaaccttatggttattttctccacatgttaaccctaacaccacctgagttttgtaatggctaactccctctggtagaaacccacaaatttctgggtttgagactcacggtttttggggtttaataaaactctttggaaatgggtaaccccgctgttaatgtgaaagaaattatgagcctaatcacgtcaataagctaaaataagtgaaacctcacaaaaggggtaaacttttgagctaattcacatgtgagggtttggtattttgcacatttaatgtaacacatggctgtaaaattttgggcactttactctgtatttatgttattttagctgacttttacttgaattgttccaaattttataacaatttaaatacgctcatga

SEQ ID NO: 678331 - DNA, 234 bp, Homo sapiens
actatcatactacatgataactctagataataatagtaatatatacttcaaaactgatgaaagtaatttaaatattctcatcaccaaaacagttgagaaatacttttcatgaaacacatggcaggtcataaataaggacaaatttatttgtagattcataattaatgtaggtaagttaaaaatttttatatcaggaactaagtatttcaccctaagggagaggggaaagagtct

SEQ ID NO: 678332 - DNA, 183 bp, Homo sapiens
  misc_feature (17)..(17): n is a, c, g, or t
ggtcagataagatgaanaggtatcatgccagggggctgtgagtctaaagattagggtgaaagaacacggcatacagtcaccctccatatcttgcatcaaaaatattcagggaaaaaaacaaaacacaaaaaatagcaatacattactaaataattgccaattttttaaaaatttagtattttt

SEQ ID NO: 678333 - DNA, 171 bp, Homo sapiens
gtccccccccccccccccccccaaggtaaaaccgaggttttttttaaatttttggttttcccccggggggggtgtttggggcccccccccggggggggggccctttttttttgttggggtttttttccttttttgtggggggtggtatttataaaccccggggccccttta

SEQ ID NO: 678334 - DNA, 265 bp, Homo sapiens
  misc_feature (110)..(110): n is a, c, g, or t
  misc_feature (127)..(127): n is a, c, g, or t
  misc_feature (200)..(200): n is a, c, g, or t
  misc_feature (261)..(261): n is a, c, g, or t
aggcaaagcgggaaagaaagaaggaacgagagaggcgatgacggcggaggcgacacggaaagaaagggggcaggaccttcgggaggggaacaaaccagaaagagggaagnagagagcttacacgcangacggaggagaaaaccacgcgacggaccagcgcacgaccgacgacaagagaacagcacagagcgcgccggcangcaacacacgaacagcagcgacggagcgcagcagcgacgacacgcggcgcgagccacgcgnagcc

SEQ ID NO: 678335 - DNA, 235 bp, Homo sapiens
gaaatgtttatattttcttattgaacctttatcattatgtagtgatgcctccatttcaaatgcttcttctctttttgtatcatactaacagagccacaccaacttcctttttgttgacctaatatgctattttttacacttttactttcctactcttaacccctaggctagcctgcttctctacacttttactttcaaacatttcatgtcattctgctttgctgtagcttttgga

SEQ ID NO: 678336 - DNA, 794 bp, Homo sapiens
agcgggagagtcccggtggtgagcggggatggtggttgtagcggcggctgccggctggctactcggctctgggcggctggggctgatggggctctggccgtcggcttcctggcgcggtggctgtgcgcggtggctttattgcagcacctgccgaagtactgtccgaggatgctgcgcctagcaggcggccaggtgtggctccatttttacttgtccatgcgcagatccggtgagcaccgcaggatagataccgaggcgagatactcgatggacaagagtcgacattctattttccgacggtcttgttacaccaattgtcgcgcttgagcatgaagctctatttggcgcataagcatgcgctacgtggagctagagtagtttggctgcaacgatgttgctcttttgagtggacgtctgttaggatgcacttgttggcttgccgatgacaaatatggcaaacagatagagttattaataaccccatttgctgtgaagcataggacattgtctggcatttggaactcggaatagcagccactggagctactggcattgcggaaattcagtcttgcagattactattttgccctgcatttgatcagcttgttaatgaagctgccaaggtatcgctatcgcgtctggggatctttttaactgtggaagcctctactatccggtccccttgaggctgtgtgggtcatgaggctctctatcattctcagagtcctgaagcatttttagcccattgccccaggaatcaacgtggttatacccagaagcccttttcaagccaa

SEQ ID NO: 678337 - DNA, 297 bp, Homo sapiens
tgcctgaagtccacgtaggcaggaggcagacagaaggagaatcacttgagatgggaggcagaggtcgccgggagccgagatggggccactagcactccagcctgagtgacttggacacagcaaacaagaaaaagacgcattgacatgaatagaacaaagaactccagtatatctcttaaccagattcaccgatagttaacatacagccccatttgctttatcatttatgtgtgtgtccatatatcaacaatttaattgagatataattcgtatacctacctatttcacaatcgggga

SEQ ID NO: 678338 - DNA, 187 bp, Homo sapiens
ctgacgtctggcccgtcagaacatgtgaactcacactcctgggcttccagaaatctaagtagaatggtaggctccctgagattaagacttcctgtcaacggttgcagtgacctggaggcatagctgtcaccatcttgcagagcagagagctcgaacaagaagccgtctcgatgaccctagcttgcat

SEQ ID NO: 678339 - DNA, 157 bp, Homo sapiens
tgatggacatcccaataacactgatttgatctttacaaattatatgaatgtattaaattatcacatatatgcccaaaatatgtacatctattatgtatcaataaaaaataaaattaaataaaaaggctgaggcaggtcctacaggcactaaaagtta

SEQ ID NO: 678340 - DNA, 1070 bp, Homo sapiens
  misc_feature (133)..(133): n is a, c, g, or t
tataattggaaatagggtcttaactcttgtccaggcttggaggacgtgcagttcgtacagtcagtggctcactgaagtcttgaccccgttgcctcagcctcccaaatagcgtggggccatagggtgtgcaccnacaagctctcagctaattttcaaaatttttatatagagggtggggttaacatatgcttgtccaaacgggtcttaaactccggggctcaagtgatccccctgccttggcctcccaaactggtgaagattacagggcatagagccaccaacaacttggcctgaaatctcttacaaggatgggagtgtcagatgacaggcaccttggcatcgttgtgcctaacctgggagacggaagaaagcacgccagtgggaagtgtctcacccttggggcacaacgtgctaagtatttgtggagcccatagccccttgagatagatggctacttgtgcctttcttctgtgagctgtcttgcgactgtggacttgggggcgtaaggtggtcttgaagggactccatttagtcaccctcaaaattaagacttttcacttcatcttactggggcctgcacctccgaagataccaaaggaagaacgcatggctcgtgccaaagaggtccacaaccagttgtgccttgttcaactggcagccattgtgtctgttatgacctgtggcgttgtcgttgtgccccaatgacccagggtctactaagagaatccattcattttgaacgtgttcaagggctgtcacagtccaggcaatggtttctgaaatggtaagccacctcatcttgaaccgcctctattatacttctctcagggcgtggatgttgcaagctccacttttccccagtgtgacatttgttgcctcttccgacgcccaatgtggctgcgtgaaaattggaccgtcctgaataacacgaggtccaggacaccgaaaactcccacgccccaaaatgagaaccgttcgctgtgtcgtggaccacaatgaactactccaccaaaagccctgattagagagcgcgcagcgttcatcggaactggataaacacacgtctgtct

SEQ ID NO: 678341 - DNA, 582 bp, Homo sapiens
gttactcatacctctgctcacatgaaaacaattctgtaagctgaaagacagtgtgtgccagtgtgttttagaatgttaaggttcagttagcaaatctttattgacttactatgcatgcaccaattgttggtgctataaggttaaaatagactgatagggttcctggaagggcctccctagtagccctttgaaaataagtaactgcacctctacttcccatgtgagtcctaagttgaattcagtgttgccctaaacagtggcttgttagggtgggttttactgggtggatttgtagctataaagtactgtgtcttgaatgactgtatacaattcagaactaaaaggatgtaagtggcatctagaattttttttttaaatttcagagtagtattagaaaggcacattaacaattactcataattcttatgtatcagaaattaatcacagtgttttgcatatagtaagtgcacaataaatgtttgtaaattgtgactttttattcttatagggaagtttgtctggtttttaatgtttttttttgtgatgataaaagtttttaagactttgaaaactggatttaaa

SEQ ID NO: 678342 - DNA, 297 bp, Homo sapiens
tgcatgcgtgtcctaagcagagtgctgagccagtcacgtttcagcaccactgggagtctgagtgctgattcagaagatgacgcgggaacattcgcgtcctaaataaaccgtgtcctaggccatagcagcgatgcctgcacttatctggcttctgtacacaaatgcgtactatgagacgaaacttttaaaaaacagtgtttgtcctctatactgcactcaaaccttaagcacaccaccaagaggtacacaatacaaccactctggcgaaacactgcgtgtcctgtgaatgagggctac

SEQ ID NO: 678343 - DNA, 657 bp, Homo sapiens
  misc_feature (273)..(273): n is a, c, g, or t
  misc_feature (288)..(288): n is a, c, g, or t
  misc_feature (291)..(292): n is a, c, g, or t
gtggccgggtcacggtggcatggccctgtattccaaactggggtaaagggggtgaaaaggagggggcaggtcctagggtggaggtttctcattaccaagtaaggtgagggctcaagtaatttgcaccatcacattttggcccgggcaacagtggacccctgaatcagaaaattagaacaggtcctgcctgttgacaggtcacaccccggggctaattgtttttgtttggaaaaatggggttttcccatgttgccctggctggtcatgaactcntgagctccggtgatntgnncacctcccctcccaaagtgctgggattacaggcctaagccgtggtgcctgccccaaattaaatgtttaaaatacaaaatacttaaccttttatggcttgctaaggctcaggtttttccagactgaattttgtcacccccatcttttaattttgtggagatcattggtttgaaaaccaggaagatgccagagactttaggaatacagatttttgtgaattgtgggtgtgtgtctgtggtcttagctacttgggaggctgaggtgggaggatctgttgagcccaggagttcgaggctatagagtgcaattactgcacctgtgaatagccagtgcactctagcttgggcaacagtgtgagactctgct

SEQ ID NO: 678344 - DNA, 1609 bp, Homo sapiens
tatctgtctgcgtgagtccatacgatagtatattgtcttcttgatggttgtagtgtctctacctctctgttgtatatagaacagtatggatgggctgggtgtgagtgttcttcccccctgttgtgtgctctgtctctttataatagtcagcgccatttgttgttatgtctccctactttccccctgttgttattctttctgtgtctcgcgtgggtgttttgttcggtgagctcagcaattctggggtctctttctccctttctgggacaccaaagcgaagggggggtacaactacgtgggcgtggggggcccctggcttttgtgttcccccccgccccggggtgccgcccacccgtcgccaagaagttggttgttgtttctccggctaactatttggctcgccagtagggagtagggttgcgcccatatttgtgattctcacatggaaaaggcccccccgggggttaaaattttttggggcgtggagaagtttgtggagagacttgaggttgtgcgctggcttgtgggtgttcacacagccccaataaagtgggtcacgccttgataatatgctcaatagacgccccgagaggtttcctttggttgaacacaacctttggggagagtatcccacggtccaaccgtgcctttgggggagttgtaaccccccttgtttcgctcagatggtcccggtggtagaggggccccctgggcggtttctcccccgtaaagcccccccccttgtggctctttgtgttgggagggccccctcgcccaaagtgtgggcgcaccaatagtaaatgataatgttgtacacttttctcgctcaaacaccccccaaagaggggggccacacacaaataagaagatttctctggcgttctaacagcccgcacccaaggggctccccccctaaggcgtctctgtggggaaaaattatcatgccatagggccttgggccccactgttggcgctgacacagacgcttttatgggccacacctctgtacccccctcacaccgcactccctatggcgcgtagcacaccctgtttttggagacgcttatatatatgagttgaaatatgtccgtctgagatctccacgagatatgttgtgtggttgtgcgccccccttgatgattatcctgtgttgtggtgtggtcgccacacgtcttcttgtgttaaccctgcacatttggtgggagcaccaccaagtagttccctgttcccaaggcgccctctcggcacagtggagttcacctcgtgtccttatcaccccctaatatctctcagcacctcggggagcacaccaccccctataattcacctcttgagagcctcgggagaaaataagcctccctcacactaccacttcctttctttataacacctccttcacgcagaaaatctgccactttctattttctcacagtatataaaactaggaatcctcccacccacgggctccctcgtgaataaaatttcttttaagccccacgattttttatttgagggttttttgtttttttaaaaaaaacttggaccaagactactaatgactttgtttgaattatccaccatgaaaattaagagccctagtttccaaaga

SEQ ID NO: 678345 - DNA, 322 bp, Homo sapiens
gctttttaaaattattattattatttgagacaggatttagctttgtcccccccggctggaatgcagtggcacgatcatggcttactgcagccttaacctcctgggctcaatctatcctcccatctcaccctgccaagtagctgggaccacaggtgctcatcaccacatccagttaaattttgtattttttgtagagatggggtttcaccgcattggccaggctggtcttgaattccaggcttcaaatgatccatctgcttctatctcccaaagtgctgggattacaggcgtgccccctagttctagatcgcgagcggccgct

SEQ ID NO: 678346 - DNA, 204 bp, Homo sapiens
  misc_feature (77)..(77): n is a, c, g, or t
  misc_feature (119)..(119): n is a, c, g, or t
cttcaggttatctgaattcattggagtatgaatgctgttctgaatttgtatcttaagggaaatactacaaaatgtcncaaaagggggggggggggtatctaaagttcaaaaaggaaaanaaccacacgagctggagattcaggaagcatcagtagaagtcaatggccattaataaaaacattttttattaaaatattgaatctg

SEQ ID NO: 678347 - DNA, 1732 bp, Homo sapiens
  misc_feature (1467)..(1467): n is a, c, g, or t
tttttttttcacaaatgtattcaagggcttaattgggggccgccttggttgcccctcaaagggttgcaaaaacccgtctggtcttgctgttgccttggctcttgggtgggcttgaaatgagaaatggacaagagggatgagaccaactttattctggagaaataaagaatggccacattcttgggtggtctaaaaccatggtggtggcgagaagacaagattatagggagaggggagagggccttaatataaagagggctgtggaaaagtggagaaagtgggggcttgcctctcctgtggagagtgtggtggtgttggttccacgagagagtgtgtttgtggtattgtgagtgggaagggaaaagagggaaagaggggaagcgtcacaccaccacagaacagttctgaggaaaaaaagtgtggtatttgggcggtggggctcttctgtgtggtcacactgtgacaccatttgtgtgccactgtgctcccgagtggtcccaagagaaggtgccaaaggtactatagggtctagtgggcccaaaaagagggggtgtggctcacctgtgggaagggaaaaactatgtggcagacaagtggtttcagacaaacaaaagggctgtgacaactccggtgagaaggagggagggtgcgttgggcccccaacagacccaaagttttcccggcagggggggggggcccccaagagcgaggccgcccacaaaagtgtggcccccaagaccaccacacagatggtcgcagcagcggcggctaataatcatctttttcggttggcgacactaatttctctccccacaacgctcttgtggttgttcccccgagtaaagtgcacacccgccgtggtgggcggaaataataacgacgagcgtggggcaacagcactgtgttgccgacaaggggcggacaagatgtgcgccccacagaggggctcccacaaggggggtcacagagcccccccctttgggaatgatctcacagcgggggacatcaccaggggggaggagagcgccaccaacaagaaggtgggtgccgccggggtataaatattcccaccacggttgttgttttttttccccagtgttcacaagggacagcgggatatcacacaccaaccccaattttttggaaaacggggcacaaaaggacgcgtttgtactttggtgtgccccccagatgtaaaaaacagtgaaactttcccaagtgatggcccccacagcgaggggtgttcaacacacgacgaggggggtgcccccccaccaacatgacagaacaagttacgaacgggcgagggcatggtgggtaaggactcacacaacaagacggagtcctccagaacgaccccaacacacgggtgcggaccgtcgccgtgtggcgcaacacagtgtgggcgagacagacgaccacatctgagcgtgggtcggtcggcaaccctgattcattgctaccacncccgacgaaatcttctgtctgtgtccagacaacttccacgagaaaagcggcgtcacctggagagaaggagtggttcccccccagtcgtgtccggttatagctggacgggaagagagacagcgggagggaagaaaaaagagtctcaccaatcatcaatcaagacactgtttgtgttgtgtcccccccagccaaaaattagagcgggaggtcgtcatcaacacactcacaccgagaggtgaaggtgagagggcagcgtgaacgcaaa

SEQ ID NO: 678348 - DNA, 275 bp, Homo sapiens
  misc_feature (67)..(67): n is a, c, g, or t
cttccgagtgaggccctggataccatcccagtgtccttatagaacagagcacaaaaggcattagcanacactataaaacaaagccatgtcgaagaggagcaaagagaatatggccacaagccaaggaatgctgacagctgccataagctgaaagaagcaaggaatggactctcccctacagcctccagaggcaatgcaaccctgccaacactttgattttagacttctggtcctatgagaactcgagaaagaataaatttctgttcttttcagct

SEQ ID NO: 678349 - DNA, 149 bp, Homo sapiens
tgtgctgtgagaagtttgctgaggaagacaaaaagctcacgagcgcattgatactagaaatgagttgggaagctatgcctattctctaaagaatcagattggagataagaaaagctgggaggtaaactttcctctgaagataagcagca

SEQ ID NO: 678350 - DNA, 692 bp, Homo sapiens
  misc_feature (656)..(656): n is a, c, g, or t
  misc_feature (662)..(662): n is a, c, g, or t
aaattaatgaaagtagctacactggtcaggcatggttgctcacgcctgtaagttcagcactttgggaggctgaggcgggtggatcacctgaggtcaggagttcgagaacagcctggctaacatggtgaaacccaatctctactaaaaatacaaaattagctgggtgtggtggcgcaggcctgtaatcccagctattcaggaggctgaggcaggagaatggcttaccaaggagacagaagttgcagtgaacggggattgtgccattgcactccagcctgtgcaacaagagtgaaactccatctcaaaaaaataaaaataagaaaaaagaaagcagccaaaccaaacaacagattttcaataaagacaacatagacttctattgtaagaagatataatctaggactttcatagctatagagaagtcagtcaatgcctggcttcaaagcttaaaaggacaggctgattctcttgtagggactaatgcagacaatgattttaagagaaagccaatgttctttaccatttcaaaaaatctagggcccttaaagattaatataaagtctattcagcctctctatgaataggaaaaagcctagatgaccgcacatcttgttgaaggattggttacggaatattttaagcccatttgtggactnactgcntgatcctctttataactactctgacgggcg

SEQ ID NO: 678351 - DNA, 592 bp, Homo sapiens
gcaggaggatcacctatgcctgggaggttgaagccccagtgagccatgatcacgccactgtagtccagcctgggtgacacagcaagactctgtctcaaaaaaaaaaaaaaaaaaaattcctcatgcaaaaagggaaggaccaagtcccattcccttttgcctcatttcaaagcctggggtagggcctacttggtggcataggaaggggtctgcaaggtgggtgggactttggcaggtgtttgggaacgaggaattaggggtggcaagttttcacttggtgaaaagacaggctgaggggttgtggtggaaaggctgggggacgaaacggtgagaagtgatggggggggctccctgattgagtcctcatggagggtgctgaggcaggacacaggtgtgcagggacagatgatcagggccctggtaccttgaccactttgatgatggcattctctttttaagattgcccaagttttgccgcatttatatttccttttatttcggggccttagcaaccctttacccaacccaaaaggagggtcagatggccaatgcgttgtgggcaatgtcgctcaccaaacaaccacaataaagg

SEQ ID NO: 678352 - DNA, 336 bp, Homo sapiens
ggttacgctgtacccaagcatcactataaccattaaatcgaattttcggcactttattactcatgtttgcctccaaataattgcttagctgatgcgataatctcctggctatcttctgtgactgctaaatcactaatcatcgctaataagtcagcttcactttgcgcaatgtcatgattaacatcaacgagatcctggctaacagcaaccaaatcaactggatcttcttcttcgaaggtgtccacataacgtgggatgttgaggttaaagtcgttttccttaatctcttcaaagctcgcaacgtgcgcatacttgtccacgtctttccgtttaaga

SEQ ID NO: 678353 - DNA, 148 bp, Homo sapiens
cttcttatcatatgggaaagttcataaatgacctaattttaacttaattacagtctttaaagaccatatctccaaacacagacacattctgaggtactgtgtgattatgatcttcaatatgaacattttgtgggataaagctcagata

SEQ ID NO: 678354 - DNA, 436 bp, Homo sapiens
gcgtgggcccatacccggccgtctgccggcagtcgagagtggacgggaacggcggggacggcgcgcgcgcgcgacgcgtagtgctgtgcgtcggaggagcggaggaggcgagcgaccggcatgacgaaacaacccgtgaggcctattcacgactgacttcagctactagatgacggagaggcgtacgacagacaagcgcgaaagaacgaactacacacgctagaggcccttattttatgagaccatatcccagagcataccatgctaccgacgacgtgcgcgtcacccaattagaggacagtaccacgtgtactaaggcctacgagccaccgaggacgccaagaagctcaacaacagatccgtccactagggaaacaaactgcgccaaccccatccacacaccaatgagaggcacgccacaacccataaacctgcc

SEQ ID NO: 678355 - DNA, 233 bp, Homo sapiens
atcttgactatagaagatctacaaaacagtctgcccaggcaaggcataggataatgagtggtaaagtcaaggtctgagggaatgttggaactgttgaatgggcggatcctatagaagatcctgatcctgaggttatggcagaggtaaaagtgctgtttgtacgcaaccttgccaatagtgtaacagaagagatttcagaaaaggcatttagtcagtttgggaaactggaacga

SEQ ID NO: 678356 - DNA, 729 bp, Homo sapiens
cgtgctggctcacgcctgtaatcccagcactttaggaggcctaggtgggtagatcacctgaggtcaggggttcgagatcagcctggtcaacatgatgaaaccccatctctactaaaaatacagaagttagccaggcgtggtggcacatgcctgtaatcccagctacttgggaggctgaggtacgagaattgcttgaactcaggaggtggaggttgcagtgagctgagatggcaccactgcactccagcccgggcgatacagcgagactctgtctcagaaaaacagaacaaaacaaaacaaaataaacaacaacaacaaaaaacaaagaatgagggatgtggctgggaatggtggctcacacctgtaatcccagcaccttgagaggatgaagtgggtggatcacctgagatcaagaatttgagaccagcctgggcaacatagcaagaccctgtctctacaaacgaaattcaaagaattagtcaggcttggtggtgcacacctgtagttccagctactggggaaactgagatgggagcatcacctgatcctgacaaggtcacaggttgcagtcgagccatgactgcaccactaatcaactccagaagcctgggggtgaacagaagttggaggaaccccttggtcgtcagcacaacacccacgacacaaaacacagaaaaaaccagcacagagcaacgcaagcgcagagccccggaagaacgagacacgaac

SEQ ID NO: 678357 - DNA, 989 bp, Homo sapiens
tccctgtcgccgcggagggggcgggggcaggacgcgcaactccggcggagctgtccgggtcgtgagccgggccccggcttggttggtggcgccccctcgcggtcccagtagtgcagaacgcatcggagtggactcgaggtcctccaagcccaggctcgggaaggaaggaccgaggtctgcgcaaagcgggagacctcggggagccctccaggacgggggccggggcactagccgccaaggggcgtcgctgaccgcgtatgtgacgcagccctttcttggcagcggcagtgacacgggggtcccccgagatggcggtcaggtctcgaacaatgggcaatcgcctgattcaaagcagaaaaccacccgggagaggcacgaaagcacggggaggcccaaaagcttggtaggtgacctcttgagttagggaatgcccccgcgtgaatggcaattccagtggccccccagcggcccgagggaagttgatgtgagaccctcgactctttatgggcatcccaccccagtgtgtggccataagcctcacggcccgagaggagtcgccattaggcagctagtgagtattccagccttgcccgaagaacgggtattttagagaaaccgtaggaacgagtatacttctgagcgggaatcacgcgggtagcccgaggttgtaacctttagatcgttgcacgtccccagggtgaccaccatcattgggtgcagtccgtgtgacgtgtccggtctgcgagtggagttcctacctaatcacgcattcccctgtatattttcccgttgaagtgagagattgttgtccaccccaggcttgaagacgggatgcctccagtgacgtctcgcccgcagagatggtgttggacggggctccgaaggtatctatgtgcccaagcaattagcacacttgggactgccacacttggcggaagaggaaggcttgcaggagaggttacaccgtgggtaccagcggcacgctaggc

SEQ ID NO: 678358 - DNA, 774 bp, Homo sapiens
  misc_feature (545)..(545): n is a, c, g, or t
ataagagactattatgcaacatctctatgccaacaaattggataacctaaaaatgtataaattcctagacacatagaatctaacatgaatcatgaagaaatagaaaatggaactaaccaatagcaagtaaagagattaaaacagtaataaagtcccccatcaaaggaaagcccagcacctgatgacttcactgtactcaaactcttaaaaaaaaaatggaagaggaggagggaatactttcaaactcattttatgagaccagcattactctgataccaaagccagagaaggacactataagaaaaaaaaaaaaaaggattttgggccatggtccttggggcactatccttggccaaattattaacaaccggaatttaatctacactttaaaggggtcctttcaccacggtcacggcaatttacccctgggatggcaggtggtgcccattttcagtcacaaggtgggtaccccaatttacagatgggggggcacaacactctttaaaaacttcgcggaaaaggttggcggatcagaccccacaaanacggtcgccaggtaggttccccccacaagggtcttatgaagagcccgtacactcattgaggggcaaagatactgcgccacaattacacggggcggggcaaaacacacttacgacgacaacacgagggcaatgacgaggcaggttgatttgtaattctctctgtcctccttgtctgcttatatttcactataccctctccccgccagcaaaacaaacagaaagaatagaa

SEQ ID NO: 678359 - DNA, 431 bp, Homo sapiens
  misc_feature (17)..(17): n is a, c, g, or t
  misc_feature (93)..(93): n is a, c, g, or t
  misc_feature (198)..(198): n is a, c, g, or t
cccccctaaaaccccgntgtagggacagcccccccataacaaagaattaccccgcctcaaaacatccccacagtgccggggcctgagaaaccncggatttaaggaagtcacccttgagtcaagcagccctgtttgtaaatattgtcctaattgccctgagaagatccttattcattagatttacagttttccccttgnctaggggtttgaagtacttacgaaaatcagatatgttaaatttatgatgatggtttgaaaaacaacgtctgaagaaattttatcaaataactggtccaaaatacgtatttaaatttaatctgcaaaatgtatacactgagtattaaagaaacaggaaatgtgtgtttttagtcttcacatcaaaattgctctattaatgaacaaataaaagattaagttacaaaaaaaaaaaa

SEQ ID NO: 678360 - DNA, 766 bp, Homo sapiens
  misc_feature (1)..(1): n is a, c, g, or t
nctaggtggatcattgtggctttgctttgaatcatcctaatcagttcttttgtgagagccaaagtattctaaatggtggtaaagacataaagaaggaacctatccaaccggaaactcctcaacccaaaccaagtgtccagaaaaccaaggatgcatcatctgctctggcctctttaaattcctctctggaaatggatatggaaggactagaagattactttagtgaagattcttaggcagttttctaacccattttcctcaatagcctgtttcctgtttttaagattttgcctttgttgttgataaagggtttcactctgtcaccaaggcttagtgcagtgacacaattacagctgattgcagccttgaccttcccagctcaggtgatcctgctacctcagcctcccaagtagttgggaccacaggtgtgtaccccatatccaactaatttttttcaattttttttttgtagaggtgagggtctccctatgttgcccaggcagatctcagactcctggactcaagcgatcctcacacctcagcctcccagagtgctgggactacagttgtgagccactgtgcctggactttctttttttacctttttgtttaacttctctcttcattgcatcccaatccatctaccggcatgcacacttattaggaaagcaggcttgagggtacaacagagactttcactatattttactttgacagaaggaaagacgaagagtttctattaaaatctgtcatttgagtgaagctc

SEQ ID NO: 678361 - DNA, 515 bp, Homo sapiens
cacgaggtgttcgcctttggctcggtggccgtcaccgcagcaaacgtagtcacggcggtggtcacaacgacggttcctatggcagtcacggaggcggccatggcggtagacatggctcccgccactgagcggcgatgaaggctcttggcgctgctgcggacagtacgtggcgtcacaaagtggccacctcttccggcaaactctctgccgtcaactcaacatctaggagcaaacaatgaaactcaatgtgcttgctgccgttgccatgacgatcctcgcgaccccggcgctggccggtgccggtcactgcgatgccgatctcaaggagatcgatggcgcgatggcgaaagcgaagctgagcgatgccgacatggcaacggtcaaagcggcgcgcgccaagggcgaggaactgcacaaggccggcaaggaagaggagtgcgaaaagtctatcgccgacgcgcagaagctgctcgggattcaggagcagcacaaggaataatcatcatcctggagct

SEQ ID NO: 678362 - DNA, 415 bp, Homo sapiens
gttatctagagatccccccaggctctctaccgcgagggtggcagtgcctatccgacagcaggaactcagatgttggcggagtgacggaggtgccacttaggccggcccccgaaaaatgctggtatggttccttcagctgcctaggcagagggcacctgtacgggctagggtccagtcagaacacagaagccacacagtgatgtgaatatagttccatgaagaattatcaccaggagactgaggaaccgggaactgactcagggcggggacagagccctattggataagaagattgaggtacggcactcagggacggaacaagctagaacagaggtccccagggttggggctgagacacgggctagggagggtgtggctgaagcccattggacaggggagaggctcccgctgaaca

SEQ ID NO: 678363 - DNA, 1538 bp, Homo sapiens
  misc_feature (301)..(301): n is a, c, g, or t
  misc_feature (683)..(683): n is a, c, g, or t
gctgacagaagattagctccgatttggacgggcgacccggtccctaaacaacgctttcagccgatgtggccagtgcctccctgagtcacggcctcgatggccgcttgtgaggattggcctacaccggtgaatacttcgatgagggcagctactcgacgtctatcgctttgctgggagaccggcggagcgtgtcagaagggctcctgttactgggcgatggccactggactcttccgccaacagtctactaaaggctggactacgcttgtggaccatatcatacgatcatcagatctgtgcntgggccacgagatgatccagtgtcctccgagcttgccatgcgaaccgttcattgcgtccaactccttaccccacgcacaagctgtgttgccgcacgtgcacttttccgtgtctcgggccatttgccgcatacgatccgtttgtggagttgggaaccaacccaagacggctaggacagagatggcatggttggcaaagggacccctatatagcgaccaaaggcctccagaagtctaacctaggctctaaacctacgactcaattcagtatccgcgccagcagaatccctatacaaggcgagtccctgacgtgagcattcagcagggcgtggttacgaatgagtcccatccgatgtgcgtcagaggcctcgagagataagcccntgagcaccccaatgacagaagcgtttggagccactagtcagtccacgcccatttccaatcctgagaacttcgcgatagatacccacttgaggcagatttacctcacccgaattctcgtgggctattccatctcgtgcttcaaacgaaattgattgccacagctccgccctgcgaaatgcgtgaacagtctcgtgccattatggttacgcaagtattcgatttctcctagcaaatttggttcctatagccctaagcggaacaagaagtcgcgccaataccgaaacttagtgactcccattgcgcgaacccatgaattctccaggtgggggattggaacaaaggttgcgtgcaaaccccccggaacgcacaagggcatggctggaaaagccgaaccttgtgtgtaaagcccggcgtgaggaaaatagagcgcgaaacaccttgacggagatttccgacttcttttaacataccccgaaccactttccctttctccccaagccgaggatttcggaccgccgagcattaccaaccgtacccctttcaggactggggcgttgggttcaaccattaattgctctagagagacactttaggaacagtggggacgcagaaagggcactctttgggaggaaagaagggaccaagggtgggccctgcgcggggaacaagggagagcgcatctggtgtgtaagaccccctgtgccttcagagcaggaacagtcgtgtaggccacacgacaagtcctttgaaaaaagcatgtgtacccatgtagcgttccaacgaccctttggggaaaagaaagcctaaaatctttccgcagaaaggacacattcttccacggtggcgtgagacccc

SEQ ID NO: 678364 - DNA, 698 bp, Homo sapiens
gagggatcggaagccggcttggggtgtggagaggtgtactcgctctagggagattcttcaagcaatcactatgtcaacagacacaggtgtgacccttccttcatatgagtgaagatcagggatcataacatcgtcatttgcgagagaagactgaaagaggcaccattcgtacccgtgtggcaatagccgggtttacgcaagacaattgtctgcattatggagttatagtaatactgaaagagcatggggtaaatactaaaatggttccattcatctgatccacatgcgtgtgtgaagcccataggattttgtgtagtacggagtcaatgacatgttggatatggagtctattactcattgtatcggtggaattctgggtcaaaatctaagaccttagaagcaagagtatgctgtccttggtcttggttggagtgagcttgtcattataggttaagatgtctttattattaagatgttacctattattgttggaaataaatctaattagtaatgggttctagatggtaagatggcatttctgaagattgggctgccttttcttggaggcttggattggttggtgaccgaattactagtgactagtttgaactaataggtcattcaaggaagtcaagttaattaacatgtcacctagatgcgcttgatggtgttgaaatgtccaccttcttagattaaga

SEQ ID NO: 678365 - DNA, 337 bp, Homo sapiens
ctccataatgtgtgcccatgactaatacattttattgtaaatggcaacctaaataacaaaaagagagagactctctaaaagcaaatgatacttatttcagaatggggcagtgggaatacatatgccatagtaaactatgtacatatttgtaaaggaagacaacagcctttgtttgtgtgtttttttttttttttgggggaatttttaaggagggggggaaaagttttggggggggattctaaagcctcttttggggggggagtaaaaattctttaagccccctttgctggggaaaaggggggcccacattttaggggggggcgcggacacataatgg

SEQ ID NO: 678366 - DNA, 713 bp, Homo sapiens
atctataaatctttgtcaacattttttctccttagaaacagagacctaggccaggcgtggcggctcacgcctgtaatcccagcactttgggaggacaaggtgggaggatcacttgaggtcgggagtttgagaccagcctggccaacacggcgaaacccagtctcagctgggcgtggtggtgtgtgtacctgtagtcccatctacttgggaggctggggcaggagaatcgcttgaacccgggaggcagaggttccagtgagccaaggtctccccactgcaatccagcctgtgcgacagagtgaaactccatttaaaaagaacaaaaacaaaaaacaaaacaaaaaggaaacagagacctagaagtggtattacagcaaaggttttgaacattttaaggcttttgagcgccagattcagacactcagtagttttacatgagagtgctacaacatcctcactaagtagtatttgggttcatcataattttaaattattttggtgtgtcaatttgaacactagagtgatataaaaactaaaaacttgaattcaataattttacaattgtattccatcttaaaatattttatggtaaacttggataaagtatataaataatccaagggtgtaaagtagaaagtgaaagctcccttctcccagttccagccccctgatgttgccaatattaaacgttgtatatccttgcaaaaaaaaaa

SEQ ID NO: 678367 - DNA, 290 bp, Homo sapiens
atcccccgataggagagcccagaggtacaggtgccaggagccaggcaaaagggtggaaaaacaaaacgaacgataataaaaagaaaaagaaaggtcactccttcctctgcgcccgaggctggcccgtgcccctttgcgtggtgagcaccaggaaagtcgagtgtgcggtcgtggtcatctggccgttaccagtcccttttggaaggggcggtgtcgtttggtccgggtctcctcttagccctgtctgttctaattctctctgtactcctcttaatgctgctaagaccatg

SEQ ID NO: 678368 - DNA, 1510 bp, Homo sapiens
  misc_feature (136)..(136): n is a, c, g, or t
  misc_feature (760)..(760): n is a, c, g, or t
aacttggggtgggtagttctatctactctactagcttttctactatattgtttagtacccgcgcgatatgtggtctcggggggaggaggctcggtgtggtgcatccccccaccacaaccaccgctgttttccctcntgggcctaaatatagattgaattttttgttgtaaatatataatatgggtgggtgaactcccacacaaggagacagtagtggttgtatctccctatcgccctgccctcctcttgttattgtatgggaacgaccacaatatcctttttttgggtgggtgtaataacagcatcctccatctcttcttcctgcgtgctctatgatagaacgaggaagcgttttttatataaaaagggggctatggactactcccctcttggtgggtagaataataaattagtccgtgttattttttctttcgcgtgtgtggaccaaccaccccgctgtgggggggtgttcccatcaacgagtgcgcccgacaaatttattcctccacgggatcaacatcataacgcccccccccccctgtgtgtgttgtaattagtgttgttcgtccttgtcggatattgtaccgctggcggcccgtgtgttgctttttataagtagatctctctctccccccacttcgttataaaggaggcgccaccacaacgaggggtgttacacctcccgcggagactaatataagaaggagggttctcctcctccgctgatatctctgcgctgacgtattactcaccgtggggngtttcttcttctcctccgtcgccactcttgttataatgattggtgggagaacacaacgtagtgttgtgtagagagaattattatgaggggtttttggagatatttctacacaagagagatgataaatgtttttctcgggccacaaatggtgccccctcttgggtaagctactatatatatatatatcctccctcgccacagagagcaccattatagagggcgcgcgacgctttacactcactgagatatagaccgcctgtctgtgagacacactctgtgtgtgtgtgttgtgagagagagagtgactctgtgagatacgcccctcggacacacgtcgcgcgctctgagggggcgtctcacagagaatattgtggtgctctcacacacacactaggtgttctcacgcgcgtatacacacgggtgttatagagagaacaccacgcgctgtgtgcgagatatataccacgctcttccccgtgggccacatctccctcggtgaggggggtgacacgcttatgcacttataccgcccacacacctccactctgttatgtttgccctaaagccttgcctgcgcctcttcctcgttataagttttttcctcgtaaagcccaaagagaatggaccactttccaaggagagttggagaagtgaaagtttatatagagatgggaaacacctttgcctccctgtgtactgggttataaaccgaaaggaattaactgtaatttgtactttagaaacacgtta

SEQ ID NO: 678369 - DNA, 106 bp, Homo sapiens
ggtgactctgaggatcccctgagtgtcactgtgttttgtttttacttttttctttttgagacacagtctcgctctgtgcgcaggctggagtgcagtggcgcgatct

SEQ ID NO: 678370 - DNA, 124 bp, Homo sapiens
tctgggtagctgcactgcagtacactccagtacatcctggctaattcttgtgtcttaatacagacaagatttcaccatgttacccatgctgatcttgaactcctgggcttaagcgatcctcccg

SEQ ID NO: 678371 - DNA, 317 bp, Homo sapiens
  misc_feature (303)..(303): n is a, c, g, or t
gtctggtttgcctagtttagtattgtcattataaaattgtttctggctgggcacggtggctcatgccctataatccccaacactttgggaggccaagacaggcagatcacttgaggtcaggagttcgagaccagccctggccaacacagtctctactaaaaatagaaaaacagttgagcatggtggtgcaagcttataatcccagctacttgggaggctgaggcatgagaattgcttgaaccctggaggcagaggttgcagtgagccgagatcgtgccactgtactctagcctgggcaacagnagttggtccgtctc

SEQ ID NO: 678372 - DNA, 352 bp, Homo sapiens
  misc_feature (253)..(253): n is a, c, g, or t
  misc_feature (279)..(279): n is a, c, g, or t
ctgtttatggctcctgatgaacaacttctggcggtggaacgtcaaccaactttctgcttaacaacgcattgagtaaaatcgcgccaaaggttgctgtaccaatccctcccaacgtaaaaccgcccagcgtgagagcaaaatcacccgcgcccagcactaaggttactgcgaccataatcaaattaccgttctggcttaaatcgacacggttttgtacccatatccttgcgcctgcgacggcaatcagcccgancacaacaattgatgcaccaccaattnaccgcggccggaatggtatgaatcaagcgcaccaaattttcggtgaaaagcccaacaggcatgggcgagtgac

SEQ ID NO: 678373 - DNA, 136 bp, Homo sapiens
aggggtacaggtctgggcaaggcacttacattcatctctgaacaactcctaggagtgtgcactgaaattccatatcagatgacgagactgaggcccacggtattcacataactactccagcgcagaactgggtcag

SEQ ID NO: 678374 - DNA, 765 bp, Homo sapiens
tataaccgttttatgatttacttattaaaaaaatcttttactattattataagtattttttaaccaaaatcttgatcttaggaagacttaagacattgtgcattattttaaatattttcattccagtaactattaaaaataaattcacaatttagggtttcaaatgtcctaatcatatctagtttggtctcatttaatattttatcactcccatcatgtgcatacagaggttaaggtgatgtataaattttatatctctcaaacaccttgatgctaatcagctcttgatctaattgctaatctcatttattcagagatagcatgtagacattaaaaaccaatgccttacttttgaaaataaccctttggctaatttacccccatactatacagcgtgttatataaaggttcagccaacaccaattgggtcactactattatgccagtcttaaattatttttactcgtcaacaaggcttgaaaatttcccgggggttaaatcttcttgatggaagtaacgtaatcacacccctctatgcccttttaacttaaaaaactatcccttaaggccaagaatccctatacacgacactcgacagggacaaattgcgaggaaaagggccctctcctccattattaatatatggaagccgactgcttcttaatctaattccctatgatagtactatgttgaaacacaccccggtgtatctcttcccgctttcattataactctctatttcccgggggttttttatgtattttg

SEQ ID NO: 678375 - DNA, 692 bp, Homo sapiens
  misc_feature (1)..(1): n is a, c, g, or t
  misc_feature (6)..(6): n is a, c, g, or t
  misc_feature (26)..(26): n is a, c, g, or t
  misc_feature (135)..(135): n is a, c, g, or t
  misc_feature (193)..(193): n is a, c, g, or t
  misc_feature (264)..(264): n is a, c, g, or t
  misc_feature (327)..(327): n is a, c, g, or t
  misc_feature (384)..(384): n is a, c, g, or t
nggggnggtgtctttttttttttccntcacccttattctttgtctctggtctaggtggtggggtgtggcttaccccccttcctttttattttttgggtgttggtggtttttgtcattccaaccagagggggtggnaacaactaccgttgtggtgttttttcttctctccctctgtgcgggtttgggaaagggnaagggagtttttatttatccctcccccccccttgccaccttttttttttttttgggggcgggggagacccntggttacactttcccctctttcgcgattatgtggaaaaaaccggtaaccgttccggcgttgtngaggtttttttttttttctttccccctttttgtgggaattttgggacatggggaaanaaataaaaaccccccccccccgtttggggggggggggtctttttttttttttttttttttcccgggcccacgggaggggggaaggggggggattttttttttttttttttttgccttggggttgggggcccccccacacccaaaaaagctttttcttttttcctttttttttggttaaagggggggggggccccccctcccccggtttttgggtttttggggggggggtgggggggttccccgttttcctttttttttggttcccggggggggattttgggacccccccccccccttggggcttggga

SEQ ID NO: 678376 - DNA, 881 bp, Homo sapiens
tgtgcaccccgcacgctgtaactggcagcacggggaatgcgcgcgcttgtgtgcgaaaccgctgtagtgttttttcagagaccccagttgttggcacacggggggaaaccaaaacttggcttcggacgcaagttccggccatggagaattcgggggcctaaaattggccccggcaggcgtgtgtcatgttcgccccaatttatgccccccccgaggttttaattcttccaatgacgcgccccatgtgggaacaacatcccaagcagaaggaagacagagggcccccaagaaatattctaggcgtaactcctgaccccctttcgacctcaccgcgacgctttctaaccccaggttcttgccctgccaggccgataattctcccttccctcctccccagggaaattaaacaagattttctcccgcgtgcctgacaaaaatgcattctcctaggagtctttttatcaaaaaaatcagaattcttctctcttcccccattgattacaagatcattccttagacgacaattattttagaagaagaccgtgtttgcgcccccaattaagtataacatgttaccgcgggacccccttacaaagaggcgttttcgggggcttgacgcctcttctgggttcccccgagctgtagtgagctcctggacgcgcctccatgaagccccagcacgccccgggagtaacgaaagcacccaagtggtcagagacaaaaggtatgccgccgcgttgcaaacagtctaaatcacgagatatcctcgtcctacataaagagatgaatcagaggcaagcttgttgttcatcacaatataagagaaaagagaaaatattttctcctttccctaatgaggaagggcggcccccatgacacaa

SEQ ID NO: 678377 - DNA, 202 bp, Homo sapiens
actagaggatcccggtaagagcggctattacctgaacacctggaagcatgaagagaaagggcaaagcgctaaggtaggacacaatcgtgtatgaagtcgagcccctgaacatcaataatattgagtgagtttcccaaatgccatgtgactttcttaaccccacactgtgtcagctggattttatctcggcttaacagagaac

SEQ ID NO: 678378 - DNA, 951 bp, Homo sapiens
attggcacgagccaccacgtctgggagggaggtgggggggtcacgcctctgtccggtcagccgccccgtggcggcgatggacggtggggggttcagcccccgcaccggccagccgacccgtccgggacagggcggtcggcggggtcacggcccccgcccacacaagccgcaccgccacgtaccgtacacgagtgcccactgcccacatcagccccctacctaggacacatgcgggggccactctcgcccagcgcagcaacccatcttgacaactgtacccacaactactctcacttgagcaccgtggcccttgcggtataaagcgtcggctctcgctgggcacatagcacacatgtgcgcgccactcctgctctccccccctcacttcatccactcagcactgccatttcccctctatccatgccctctcatcgcacgcttcaccctcggcccacctctcttccaaatctacgtttctttttacctccggccacccacgtcgttccttgccccttctttcaatcccctgtctacattcctgtacgaccgttacccgccgcacatctctcctgattcctctcgaaatactacatgatgattgctgttccacctccccggcttcgcttgcatccatcgggcagagtccaattgatgtggctatgcgaatcagacccctccatttaacgttccagcactccactgtgacgtacgtcatcttatctccctaagtagtaacgcatcgcctgattgtacaatcacccaccgtggctacggggcccacggtactccacgtgccatatttcgatagcaatagtcgcttttgttcaggttatatcattctgtctatcgctgcccctagcgtaatgctccttgcagagtcgttgtctcattcctcctcatggtataacgcccgagtccatgtgaacttcttctctttctcattttcctctt

SEQ ID NO: 678379 - DNA, 114 bp, Homo sapiens
ggcagggttaagggctacccgggactgaggactcctgttttatcccatttcaagactttggctgggtgaggtggctaattcctataatcccagcatttgggaggccgaggtgga

SEQ ID NO: 678380 - DNA, 1290 bp, Homo sapiens
tttttggtgtctgtggttaccccgttgctcctcatcgctagtttggttgtttcccccctatattttttgtgggggcggcgcctcttcgtgtgttctcttcccctggggtggtttttttcttctttggggtgtgttgttctctcccgcgctcgggcgtttttgtctgggcgccctcccccctctctccgtggggtgtgttaaattatgtgttgtgcttaggtgtgtaggtgttcctcccactgttgtgctgcgcgcgtgtcttggcgcgctgcgggagggggggttggcgccgcgtctctctcgtttgggtggtgtttttcttgtggtattctcgctgtgcgcgcgcgtctgtagttaatatcttgcgtgggaggagagagatagaatgttgtttgttctctcgaatgtttctcccccgcggtgtgtggtttcttcttctcgtagatgtggcccccgcggggggctctctctgcgtgtgtgtgtgtgggccgccctctctgatagaggaggctctgtgtggagatgttctctctctctctgtgtgtgtgtgtgtcgcctctctctctcttctctctctctctctctgctgtgtgtgtctccctctgtgtagattatattttttcgcgctgtgcctcccttcgcgcgtggtgctctctctccccgcgacttctgcgtctcactgcggctggtttctctctcccgcgccgcgctgccgcgcccgtcgtgggagagcacatcatcaggtagagagatcttcttcgggtgtgcatccttcacgtgattagagtgatgatgtgttgtttgtctctctctgcctcgctctctctccgcgcgcagtgtgtgttgtgtgatatacacacccgcgcgcgcgagagagtgttgtctcgcgcgcgctgtctctctttattttgtgtggcgccgccacgctgagagagaagcgcgctccccccctctcttttgtgtgtgtgtgttaagagagggcaccccacacattgtgtgtgtgtgtgggcgcccctctctctctgtgtgtgtgggggggcgcctctctctctgtgtgtgtctcttctccaccccgcggtgtttaatatatatttctcctcccccgttgttaagaaattcgccccccctgtggggccccccgaggcttgtgtgttttgttcacaccccgcgtttttttttagaacccccaaatattagcgcgggagagaaaaccaccaccccaagggggtcaccccctccccccctttccccccccccttttttttttcccacaaaaatattgttttttta

SEQ ID NO: 678381 - DNA, 810 bp, Homo sapiens
cacaggtcccttttgcaggtctatttgacatagtaatctagtgtgttggggaggggtagccaagcaggctgcagtgtctgcaatgcagagggcttggggaggtttgggtactctctgctgccactactgggatgatattcagaagagagaggacctcatactgtgactggacccaggaccctccctggaagagagctcagcccagctgtgtgtgtgtgtgtgtgtgagtgtgtgtgtgtgtgtttgtgtgctgtgctcatgtgcacctgggtgtaaaatgactgttatctggttgtgttactcagggtgggctggggactcaccagaagaatcccccccagcctgcccaagacaggtttttcccttgtaccatcttcagagaggtcaggggaagagggtccaggtgggttaaggggggtcgctatggataaccactaagaccagactgctgccaggaggagtgggggataatgaggtggccccagggtcctggcacctggctttggttttccgtcttctttcctcaggacgcccctgaggcctgggacctgtgcctggcttcgaggagcatctgtggctgggtgatccagctgctggtgtgatcatgggcttccctcctctcagcagggcaggcgctcctgccccagagactgggcaactggctgtttctatgacgtatttatttttacttgtgtttcatgtcacttttttaaaaaaaagcaaacagaacaattgtaagtcagtataactgcctatcagttttctttatttctctttttgtaaaataaaatttaaactcaagaaggcaaa

SEQ ID NO: 678382 - DNA, 263 bp, Homo sapiens
gtatgtgatcgcccaacactcactatgcttcgtaatttctccaagatctcctcatcagacattttaggcttcttcttctgcttctcagttattccgggtcaaagcatctggtggagtggtgttattttcacgtaagtgaaatgggacgatgtagccacgtcccgagtttggagtgacaggaagtggttcaatcacagaccgtgtgtatacagatttggtgtgctctgggcgtggacgcaatcactagggttggggactacata

SEQ ID NO: 678383 - DNA, 159 bp, Homo sapiens
gaataccttctgcataatgaattaactaggaataactttgcaaggaggagccaagctaaggaccccgaaaccaggcggagtacctgaggacagctaaagaggacaaccgtctatttaggcaataggtgggaggttataggtagaggcgcaacctaccgg

SEQ ID NO: 678384 - DNA, 102 bp, Homo sapiens
  misc_feature (6)..(6): n is a, c, g, or t
  misc_feature (23)..(23): n is a, c, g, or t
  misc_feature (42)..(42): n is a, c, g, or t
  misc_feature (60)..(60): n is a, c, g, or t
tttccnactactgacttttattnaaaagagtactattagatngaaatagttttcacactnttatattaaaagacccattttacttaccctaaggctaagatc

SEQ ID NO: 678385 - DNA, 430 bp, Homo sapiens
  misc_feature (10)..(10): n is a, c, g, or t
  misc_feature (19)..(19): n is a, c, g, or t
atataaaagnctaaaaatnaaaaactatttacctctgggcctgtttttcttttgggattagataaagcctttctacccatatcaccaaatactcattaaaggctaacacagaaagctttttccaagttaataatttctaaaattaaatatcagggccaggtgtggtggctgacacctgtaatcccagcactttgggaggccgaagtgggtggattacctgaggtcaggagctcgagacaagtcaacatggtgaaacctcatctctgctaaaaatacaaaaactagccaggcatggtgatgcacacctgtaatcccagctactcgggaggctgaggcaggagaattgcttgaacccaggaggcggaggttgcagtgagctgagattgcaccactgcactccagcctgggcgacagagtgagactctgtctc

SEQ ID NO: 678386 - DNA, 241 bp, Homo sapiens
  misc_feature (58)..(58): n is a, c, g, or t
acggtgaattctcggttcacaatgattggaagagacgcagcatctgaaggatcaaaanagcgacagtctgctataaacgcttgagcggcacaaggcagttatacctgtgtgtaacttttctcgacacctctctgtgttaaaaaccacaaaagtcacgaaggatctgtgaaggcccgcgtttcacggtctcggattcgtactgagaaatccagatacaagcgaagcttttggccttactggt

SEQ ID NO: 678387 - DNA, 167 bp, Homo sapiens
taattcaggatcatccaaacttggattaaatagaaagagttggcctttaaaatgtttgcaaattgcctttttttttttaaaaactggaaagaaaaaatattctgttgtgtcctcatacagtgcttaggatgtctttcacagagcttaattaaaaagatgaaacctga

SEQ ID NO: 678388 - DNA, 561 bp, Homo sapiens
attcaccaaccagacactgagcacgaagcacacgtgtcagacacagtctgtgccctccagcacttactcaggctagagctgttcctctggcggggtacactcaactcagtcagcagagaggccgctggtggactgagccactcgggcagctggagctgggtgtgggcctggattcctgaagaggggctctgggacagtgccattcccgtcagcagttcatacagtagagacccaaagctccaccagtcacaggcttccgtcagctcggaaataccacccacctctggggcgctgtagagattgtccacgggctccccgcagcactgggggtccacctctgaacactgggccaaatatgtgagccggatgtgaactccagtgtgtgggaggaaaaaggaggtgacagattgaggacaggtgatacaggggagggggttgcagggcttcccccaacagtcatgcggtaggagccaatgggccttctgggcagaaactcggcagggtcacagcaccctccacagaggcacacgcactctgatggccacagaggccacagggtac

SEQ ID NO: 678389 - DNA, 482 bp, Homo sapiens
ggaggtcggggtggacggatcacgagatcaggagttggaggccagcctggccaacatagtgaaagcccgtctctagtaaaaatacaaaatttagtcagacatggtgggcaggagagagcatatgcaggggaacatccatttataaaaccatcagacctcatgagacttattcactaccatgagaacagcatgggggaaactgcctccatgattcagttatctccacctggccccacccttgacacatgggaattgttacaattcaagatgagatttgggtgcggacagagccaaaccatataattcttccccggcccctcccaaatctcatgtcctcatatttcaaaagcaatcatgccttcccctaagtcccccaaactcttatttcagcattaactcaaaattccatagtccaaagtctcatctgagacaaggcaagtcccttccacctatgagcctgtaaaatcaaaagcaagttagtt

SEQ ID NO: 678390 - DNA, 277 bp, Homo sapiens
  misc_feature (78)..(78): n is a, c, g, or t
  misc_feature (95)..(95): n is a, c, g, or t
gtggaagcgagttgaaaggaagtatttccattctgttactgttttgtagcactttgtccatttattgatttttaaagnagatatttagataccanccctgccctcccccgcccaaaaagaaaaatgttattgtcctcctaatctatatgcctacacctaagaagctgacagatgagctcctaaaacatgaggatgaataaatgtaagacctgtaatatctcctcattcccacagagatttgggtttaaaaaaaatggctaatatttgtaggcctgaa

SEQ ID NO: 678391 - DNA, 255 bp, Homo sapiens
  misc_feature (15)..(15): n is a, c, g, or t
  misc_feature (96)..(96): n is a, c, g, or t
  misc_feature (130)..(130): n is a, c, g, or t
  misc_feature (145)..(145): n is a, c, g, or t
  misc_feature (166)..(166): n is a, c, g, or t
  misc_feature (180)..(180): n is a, c, g, or t
  misc_feature (241)..(241): n is a, c, g, or t
ggcgccatcgcatgngctttggggctggggctccggggaggttccggtagggcgttggagaggccgctctttttgcaaggcccgagacggcggccntgcgcaggccgccctattccgcgccctcaggtcnagtatcagcctgagntggatacccccgcttggcccnggatgccccgctgncccggagcatcctccggcgctgccctcccagagccacgcagaggctgaggtggcgcggggncggccccggcttcc

SEQ ID NO: 678392 - DNA, 111 bp, Homo sapiens
ttgtctggtcaggaaagggtccccacaggagagagcgtcgacgctctctctgtgcgggtgcagtaatcatcaatccagtccatgtgcgtccgtggcgctacctactcacta

SEQ ID NO: 678393 - DNA, 135 bp, Homo sapiens
tgggctgaatttttaaattttttttaaaaacttgaaacaaaaccttgtaatttgtgtaaatgacaagtgtaaaatcctcccataaaatgctaaaaaaatgccctgtttcaaataaaaccaaaaaatgcagcctta

SEQ ID NO: 678394 - DNA, 954 bp, Homo sapiens
agggacatgcgactataatgatctatgaagcctacagattgtcctatttgtctcgcctgcttatacaaaatctgttccaaagtctgccacatgccacgtttgacctattggatcattctatacactattttccgtatattctattccacctcttagaagtctactgtatatcttgatatgctataagctacaacactggattctctatagacctattcatgagatcctggtggtaattaactagtttggggtcgtcatttctcgtatacgcctccaatggaacagtattcggtacgtagctaaccaaagataccagactaattactgaggagtaggataaacgccagtatgcttccttgggtggataagaggtacactacttttggggtatgtgaagacgacctagatctgacagtcacccacgagccgtgtggtcattccatgtatattgattacgttattgtcaggtcaatccaatagttgtgacatacaattcattcgtcaggtggactatgacgatggtggaatactgcgctattatcagtttagttataatgcagctgtattgtgaacagcttaaccaatttcaagtgtaattgtttaattattaccacttagtattcaacttattttttccaccaaggttacaaaattttaattttctagcagaaataacattcgtgaatcaaagcacacctgttatgttcagtcaggttgaacttattgaaacacgtgtcatcaatgttcagttcaaaaagcctgaaagtttagatctagaagctggtaaaaaatgacaattatcaaatcacattaaggggaaccaattgtttgtcttccacttaatccatgtagcacttatttaaaataagcacaccaagttacactgggcacgcgaatattacttgcaaaatttttataactgaagggggtgggcaaacccttgaggatgaatgc

SEQ ID NO: 678395 - DNA, 1214 bp, Homo sapiens
tcctacgggtactagagtcctgcatactctctactacccagagcctccgttagggggtagggaaaggactttgccataggtacgctgaggccaccatactgctctcttactaggccaagggcgtaaaaagatagtcctacccatatagctagagagcaaaccccagaaagcctaattggctagcgccgtaccgcgggcctatggtaccgctatatgaaggcgggtctagcggctagcgagaggagggcgtggcgggaggctaagctagttgtacgtaggttagctacggcaggcacgtagtagcagtacccggaccgcggctgaggggacaactgctccgctgcgcgccgcgggaggaggaacctgccctggtcctattaggtgtccgggcccggccgggccatggattcaatgcctgagcccgcgtcccgctgtcttctagctatactatacccttgctagctagctagctagctagctagctagctagccggccccggagctagggcccgagccaggccggagctgaggagaacgactagggtatacgcctgcccagcaaatagcgaagggactatgcggttacatcgaagtcactgagaccatttagcaagaggctcctggattatagcctgcacaaggaggaggaccggcagccaatcgatttagccaagggccatgtcagagacctttgagcacattacacaaacctggtacaccaagggggtcaaggtaggtgatggacattcctctatgaagctgaggaacgagactatctgcagcaggtggtagaccttcaagaacagtgtagatgtacctggtggcacagaattagacgagggaacacgaagacatgggtacagaaaccaccaagaggaacacctggctgatttcacttggacaaccagttactactggaacagacccattgctgtcagaaccttggtctgggacaaaatgtgatacaactattgtccttgcagtggaaaagtctgagagaaaacactgacacaagcaatagccgacgaggtagacctaaacacgaacgtacagcagaggtgatagtaaggcaacatccacaagagataacgtctcaagagtcctctactcgacctcatattataacactgaactttgtcgcctacaacacagctaatgcagtggacgcaccacgactatattgaaagaagaaagattagcctccccacgaaaaa

SEQ ID NO: 678396 - DNA, 132 bp, Homo sapiens
gcacgtcctgtagcatactcgggacgtcgttcgggtcgtcacgacgaccctggcggatctgctcgactggactcgactcagtgccgccggccctaccgactacggccctcgcctgttgcggggattcctcta

SEQ ID NO: 678397 - DNA, 263 bp, Homo sapiens
atggcacagagcgaacgtgacatttgagctctcctttctactctggggaaacccacattcctcaccagtggggacttggcagggaaggccaccactcctgccccgttgctcagcagcaccctctaggggtggggctctgaagcctgtgcgtccttcagaggcaccatggggaccagagggtgtccggcagcagggccctttccagaagccaaggaacagtaggagagaatgtgcaggcagagggagcctgtgcggaaggggta

SEQ ID NO: 678398 - DNA, 127 bp, Homo sapiens
tgaggacccaccgtaatatgtaccatctcatgtatgtgcttcactgtatgcatttcccagatattgtgtgttttatttttttaaaacaaatggaaggttttggcaaacctgcattgaacaagtctgt

SEQ ID NO: 678399 - DNA, 133 bp, Homo sapiens
actccgcccacctcacgcctcctaaagtgctgggattacagctgtgagccaccctgaccggacacttttgtatgatttctaatgtatttgtaatttaactaacaaattgcctactctgctatgttaatgtatt

SEQ ID NO: 678400 - DNA, 870 bp, Homo sapiens
  misc_feature (112)..(112): n is a, c, g, or t
agtcccgtgtccccgtgcctagcttgtgtcttcctgccgggtacttttggtgggcgcctccccccgtgccatggtgacctgcaactttcgcttcccttaagcggtcgcgccnacacaattttccccgggcggccccccctttgctcttgggaaacccactctcttggccgacgtaaaatgcgtaattcttggggtgcccccctatgacccctcctccatggcgctcttaccccccgtgggtccccgcgtgcaattagttccttgcctttccccggggccagtgtttaatcgccctggtggtcctcgctcccggggaagcccccaaggcgggaccccttttacagcgccactcccaatggcggtggcgctccccaaacagcgcccttcaagtatggcgggtaaacacctcccccttcccagagcatatagctccctcagggcccctggggcgaaatagtattttcttatgcgcattatttcctattgctattcgccaccacgagcccaggggtcgtgttctttggaaaccccactcgcatgtgtggagcctgccaatgtaatccacctacagttgcactagctccgacccccacaagtattttggcaacaccacccccacaccccagcttgtcttggagacgatttccaacccctgctgtatgttctcctccattaaaatctcgagttttctttaagccgtcccttatattttcaccacacaaatcgcctaaaacaccaccctacatttgcaagagataccaagaaaccccacaacagcgacggattgtcggataaaacatcatttttcataccccccaagtgttacctcgggcaaaataaaaaaaaggtctttctaccccaacatacaaa

SEQ ID NO: 678401 - DNA, 155 bp, Homo sapiens
gcggatcgcgcttctgagccgtgctctctaagtgtacgaagagacctcgcggcaagtacataatgtacagtctatgagtaacagtcagtaggtacagatatgtgatctcctctatgtgtctctatctagagaggagtggaatgcctcaatcttaa

SEQ ID NO: 678402 - DNA, 295 bp, Homo sapiens
  misc_feature (56)..(56): n is a, c, g, or t
ggatagtctgtacgcctgcaggtaccggtctgtaatttcccgggacctactactantaaattcgcggccgcgtcgaccccagttaaactagatgtgatagttaaaccagatgaaagcatgatgatccatctgtgtaatgtggttttagtgttgcttggttgtttaattattttgagcttgttttgtttttgtttgttttcactagaataatggcaaatacttctaatttttttccctaaacatttttaaaagtgaatgtctgtaaagctcttcccatgtcgactcgaccgcgaat

SEQ ID NO: 678403 - DNA, 201 bp, Homo sapiens
ttttttttaagggggccccccccccgggggccggggattttcctaaagggcctttttcgggggggccaaaggtttccgggtccccccccgataaaaaaaggtttagggggggaggccgggcccgggccccaggaaatggtccgggaatgttttctttttttttttttccccccccccctttttaattccccccccccttta

SEQ ID NO: 678404 - DNA, 4268 bp, Homo sapiens
  misc_feature (11)..(11): n is a, c, g, or t
agccattgtgnatgagaagatcttctgttgtcatggaggattgtcaccagacctgcaatctatggagcagattcggagaattatgagacctactgatgtccctgatacaggtttgctctgtgatttgctatggtctgatccagataaggatgtgcaaggctggggagaaaatgatcgtggtgtttcctttacttttggagctgatgtagtcagtaaatttctgaatcgtcatgatttagatttgatttgtcgagctcatcaggtggtggaagatggatatgaattttttgctaaacgacagttggtaaccttattttcagccccaaattactgtggcgagtttgataatgctggtggaatgatgagtgtggatgaaactttgatgtgttcatttcagatattgaaaccatctgaaaagaaagctaaataccagtatggtggactgaattctggacgtcctgtcactccacctcgaacagctaatccgccgaagaaaaggtgaagaaaggaattctgtaaagaaaccatcagatttgttaaggacatacttcataatatataagtgtgcactgtaaaaccatccagccatttgacaccctttatgatgtcacacctttaacttaaggagacgggtaaaggatcttaaatttttttctaatagaaagatgtgctacactgtattgtaataagtatactctgttatagtcaacaaagttaaatccaaattcaaaattatccattaaagttacatcttcatgtatcacaatttttaaagttgaaaagcatcccagttaaactagatgtgatagttaaaccagatgaaagcatgatgatccatctgtgtaatgtggttttagtgttgcttggttgtttaattattttgagcttgttttgtttttgtttgttttcactagaataatggcaaatacttctaatttttttccctaaacatttttaaaagtgaaatatgggaagagctttacagacattcaccaactattattttcccttgtttatctacttagatatctgtttaatcttactaagaaaactttcgcctcattacattaaaaaggaattttagagattgattgttttaaaaaaaaatacgcacattgtccaatccagtgattttaatcatacagtttgactgggcaaactttacagctgatagtgaatattttgctttatacaggaattgacactgatttggatttgtgcactctaatttttaacttattgatgctctattgtgcagtagcatttcatttaagataaggctcatatagtattacccaactagttggtaatgtgattatgtggtaccttggctttaggttttcattcgcacggaacaccttttggcatgcttaacttcctggtaacaccttcacctgcattggttttctttttcttttttctttctttttttttttttttttttttttgagttgttgtttgtttttagatccacagtacatgagaatccttttttgacaagccttggaaagctgacactgtctctttttcctccctctatacgaaggatgtatttaaatgaatgctggtcagtgggacattttgtcaactatgggtattgggtgcttaactgtctaatattgccatgtgaatgttgtatacgattgtaaggcttatgtcactaaagatttttattctgattttttcataatcaaaggtcatatgatactgtatagacaagctttgtagtgaagtatagtagcaataatttctgtacctgatcaagtttattgcagcctttcttttcctatttcttttttttaagggttagtattaacaaatggcaatgagtagaaaagttaacatgaagattttagaaggagagaacttacaggacacagatttgtgattctttgactgtgacactattggatgtgattctaaaagcttttattgagcattgtcaaatttgtaagcttcatagggatggacatcatatctataatgcccttctatatgtgctaccatagatgtgacatttttgaccttaatatcgtctttgaaaatgttaaattgagaaacctgttaacttacattttatgaattggcacattgtattacttactgcaagagatatttcattttcagcacagtgcaaaagttctttaaaatgcatatgtctttttttctaattccgttttgttttaaagcacattttaaatgtagttttctcatttagtaaaagttgtctaattgatatgaagcctgactgattttttttttccttacagtgagacatttaagcacacattttattcacatagatactatgtccttgacatattgaaatgattcttttctgaaagtattcatgatctgcatatgatgtattaggttaggtcacaaaggttttatctgaggtgatttaaataacttcctgattggagtgtgtaagctgagcgatttctaataaaattttagttgtacacttttagtagtcatagtgaagcaggtctagaaaataagcctttggcagggaaaaagggcaatgttgattaatctcagtattaaaccacattaatctgtatcccattgtctggcttttgtaaattcatccaggtcaagactaagtatgttggttaataggaatccttttttttttttttaaagactaaatgtgaaaaaataatcactacttaagctaattaatattggtcattaaatttaaaggatggaaatttatcatgtttaaaaattattcaagcactcttaaaaccacttaaacagcctccagtcataaaaatgtgttctttacaaatatttgcttggcaacacgacttgaaataaataaaactttgtttcttaggagaaaatgattctgtaattccagtgtcactaatttatattgttctttcctctgatttttttcaggttagtgatttttttgtatacaatttaatccaaatgttatgacattcagaaatcatgaaacacagtagatatctgttataatgtggtgtatcacatggattataaagcaaagttatggtcgatttctattcttgaaagaatcaactacagtgaatcctttgcatttgaagccttaacatgcattgctttaattttgcccagggacaaattttaataatcagcaagactggtttgtgcaaagcgttgagtcatcaggtatttagagcctagccagctacccagtatccatgctgccatatcccttcattgtaaaaagtacctaaacattcgtgaaatgattttttttagctgaaaaatgctggcaagaagaattttaaagcttaaaataggtggtaaatttgaagtatgagtgtgttcacgagaaacataggcttttcaaaaaaatttttattcaaggcaaagcaaggaacatcttgagatatgtctcaagaatataaagatgtattattttaagccaaggagctgaaatatatctcagtttataaattcaggtatattctttttgtctccatggcaaccataacttttgaaccaaaaaaaattgtttttacatctttatgctgaaaatgtgtttagattaggaatatggtcgggctgaatttgctgttgctccctaaccaaatccacctcttgttttccttgtgagtccatggctaaatcaaagctgcccctgagaagagacttaatccaagcctgattgtactagtggcatcacttagaagtaggctttccctcttcctagtagatctcaatgttttataattccttaaaacagctgaaaattgggacaacatactttacgcaatgaacagtagttaaataggaaataaactagttccatgtaagtatacacctagagttttaattacctttataatgtttcttaaaagtgaaacttagatacaattgtgattggatacttagatactaagtgaaacttagtgtaacaattttgatctgttaaattggattttacatgtacatttgaatgccagaatttctaaataaatcccctggttaggaaattttaaaagtcaaagcttgttttcttcaaccactaccttctacattggttgacttagaccgtaagctttttaagtttctcattgtaatttaccttctcatgcagattgctgatgttttattaaaccttatttttacaaaaatgaaaaaaaaaaaaagaaaattgggcggcggcccaaaaatttaaaatgtgggggggccagtatgaagggtaggcagagaaggggaaggggggtcacaaaagaggggggggaaaaagggggggtggaaaagag

SEQ ID NO: 678405 - DNA, 4249 bp, Homo sapiens
  misc_feature (6)..(6): n is a, c, g, or t
  misc_feature (9)..(9): n is a, c, g, or t
atcctnttnaatccaagcagtcggtcaccagacctgcaatctatggagcagattcggagaattatgagacctactgatgtccctgatacaggtttgctctgtgatttgctatggtctgatccagataaggatgtgcaaggctggggagaaaatgatcgtggtgtttcctttacttttggagctgatgtagtcagtaaatttctgaatcgtcatgatttagatttgatttgtcgagctcatcaggtggtggaagatggatatgaattttttgctaaacgacagttggtaaccttattttcagccccaaattactgtggcgagtttgataatgctggtggaatgatgagtgtggatgaaactttgatgtgttcatttcagatattgaaaccatctgaaaagaaagctaaataccagtatggtggactgaattctggacgtcctgtcactccacctcgaacagctaatccgccgaagaaaaggtgaagaaaggaattctgtaaagaaaccatcagatttgttaaggacatacttcataatatataagtgtgcactgtaaaaccatccagccatttgacaccctttatgatgtcacacctttaacttaaggagacgggtaaaggatcttaaatttttttctaatagaaagatgtgctacactgtattgtaataagtatactctgttatagtcaacaaagttaaatccaaattcaaaattatccattaaagttacatcttcatgtatcacaatttttaaagttgaaaagcatcccagttaaactagatgtgatagttaaaccagatgaaagcatgatgatccatctgtgtaatgtggttttagtgttgcttggttgtttaattattttgagcttgttttgtttttgtttgttttcactagaataatggcaaatacttctaatttttttccctaaacatttttaaaagtgaaatatgggaagagctttacagacattcaccaactattattttcccttgtttatctacttagatatctgtttaatcttactaagaaaactttcgcctcattacattaaaaaggaattttagagattgattgttttaaaaaaaaatacgcacattgtccaatccagtgattttaatcatacagtttgactgggcaaactttacagctgatagtgaatattttgctttatacaggaattgacactgatttggatttgtgcactctaatttttaacttattgatgctctattgtgcagtagcatttcatttaagataaggctcatatagtattacccaactagttggtaatgtgattatgtggtaccttggctttaggttttcattcgcacggaacaccttttggcatgcttaacttcctggtaacaccttcacctgcattggttttctttttcttttttctttctttttttttttttttttttttttgagttgttgtttgtttttagatccacagtacatgagaatccttttttgacaagccttggaaagctgacactgtctctttttcctccctctatacgaaggatgtatttaaatgaatgctggtcagtgggacattttgtcaactatgggtattgggtgcttaactgtctaatattgccatgtgaatgttgtatacgattgtaaggcttatgtcactaaagatttttattctgattttttcataatcaaaggtcatatgatactgtatagacaagctttgtagtgaagtatagtagcaataatttctgtacctgatcaagtttattgcagcctttcttttcctatttcttttttttaagggttagtattaacaaatggcaatgagtagaaaagttaacatgaagattttagaaggagagaacttacaggacacagatttgtgattctttgactgtgacactattggatgtgattctaaaagcttttattgagcattgtcaaatttgtaagcttcatagggatggacatcatatctataatgcccttctatatgtgctaccatagatgtgacatttttgaccttaatatcgtctttgaaaatgttaaattgagaaacctgttaacttacattttatgaattggcacattgtattacttactgcaagagatatttcattttcagcacagtgcaaaagttctttaaaatgcatatgtctttttttctaattccgttttgttttaaagcacattttaaatgtagttttctcatttagtaaaagttgtctaattgatatgaagcctgactgattttttttttccttacagtgagacatttaagcacacattttattcacatagatactatgtccttgacatattgaaatgattcttttctgaaagtattcatgatctgcatatgatgtattaggttaggtcacaaaggttttatctgaggtgatttaaataacttcctgattggagtgtgtaagctgagcgatttctaataaaattttagttgtacacttttagtagtcatagtgaagcaggtctagaaaataagcctttggcagggaaaaagggcaatgttgattaatctcagtattaaaccacattaatctgtatcccattgtctggcttttgtaaattcatccaggtcaagactaagtatgttggttaataggaatccttttttttttttttaaagactaaatgtgaaaaaataatcactacttaagctaattaatattggtcattaaatttaaaggatggaaatttatcatgtttaaaaattattcaagcactcttaaaaccacttaaacagcctccagtcataaaaatgtgttctttacaaatatttgcttggcaacacgacttgaaataaataaaactttgtttcttaggagaaaatgattctgtaattccagtgtcactaatttatattgttctttcctctgatttttttcaggttagtgatttttttgtatacaatttaatccaaatgttatgacattcagaaatcatgaaacacagtagatatctgttataatgtggtgtatcacatggattataaagcaaagttatggtcgatttctattcttgaaagaatcaactacagtgaatcctttgcatttgaagccttaacatgcattgctttaattttgcccagggacaaattttaataatcagcaagactggtttgtgcaaagcgttgagtcatcaggtatttagagcctagccagctacccagtatccatgctgccatatcccttcattgtaaaaagtacctaaacattcgtgaaatgattttttttagctgaaaaatgctggcaagaagaattttaaagcttaaaataggtggtaaatttgaagtatgagtgtgttcacgagaaacataggcttttcaaaaaaatttttattcaaggcaaagcaaggaacatcttgagatatgtctcaagaatataaagatgtattattttaagccaaggagctgaaatatatctcagtttataaattcaggtatattctttttgtctccatggcaaccataacttttgaaccaaaaaaaattgtttttacatctttatgctgaaaatgtgtttagattaggaatatggtcgggctgaatttgctgttgctccctaaccaaatccacctcttgttttccttgtgagtccatggctaaatcaaagctgcccctgagaagagacttaatccaagcctgattgtactagtggcatcacttagaagtaggctttccctcttcctagtagatctcaatgttttataattccttaaaacagctgaaaattgggacaacatactttacgcaatgaacagtagttaaataggaaataaactagttccatgtaagtatacacctagagttttaattacctttataatgtttcttaaaagtgaaacttagatacaattgtgattggatacttagatactaagtgaaacttagtgtaacaattttgatctgttaaattggattttacatgtacatttgaatgccagaatttctaaataaatcccctggttaggaaattttaaaagtcaaagcttgttttcttcaaccactaccttctacattggttgacttagaccgtaagctttttaagtttctcattgtaatttaccttctcatgcagattgctgatgttttattaaaccttatttttacaaaaatgaaaaaaaaaaaaagaaaattgggcggcggcccaaaaatttaaaatgtgggggggccagtatgaagggtaggcagagaaggggaaggggggtcacaaaagaggggggggaaaaagggggggtggaaaagag

SEQ ID NO: 678406 - DNA, 4132 bp, Homo sapiens
  misc_feature (11)..(11): n is a, c, g, or t
agccattgtgnatgagaagatcttctgttgtcatggaggattgtcaccagacctgcaatctatggagcagattcggagaattatgagacctactgatgtccctgatacaggtttgctctgtgatttgctatggtctgatccagataaggatgtgcaaggctggggagaaaatgatcgtggtgtttcctttacttttggagctgatgtagtcagtaaatttctgaatcgtcatgatttagatttgatttgtcgagctcatcaggtggtggaagatggatatgaattttttgctaaacgacagttggtaaccttattttcagccccaaattactgtggcgagtttgataatgctggtggaatgatgagtgtggatgaaactttgatgtgttcatttcagatattgaaaccatctgaaaagaaagctaaataccagtatggtggactgaattctggacgtcctgtcactccacctcgaacagctaatccgccgaagaaaaggtgaagaaaggaattctgtaaagaaaccatcagatttgttaaggacatacttcataatatataagtgtgcactgtaaaaccatccagccatttgacaccctttatgatgtcacacctttaacttaaggagacgggtaaaggatcttaaatttttttctaatagaaagatgtgctacactgtattgtaataagtatactctgttatagtcaacaaagttaaatccaaattcaaaattatccattaaagttacatcttcatgtatcacaatttttaaagttgaaaagcatcccagttaaactagatgtgatagttaaaccagatgaaagcatgatgatccatctgtgtaatgtggttttagtgttgcttggttgtttaattattttgagcttgttttgtttttgtttgttttcactagaataatggcaaatacttctaatttttttccctaaacatttttaaaagtgaaatatgggaagagctttacagacattcaccaactattattttcccttgtttatctacttagatatctgtttaatcttactaagaaaactttcgcctcattacattaaaaaggaattttagagattgattgttttaaaaaaaaatacgcacattgtccaatccagtgattttaatcatacagtttgactgggcaaactttacagctgatagtgaatattttgctttatacaggaattgacactgatttggatttgtgcactctaatttttaacttattgatgctctattgtgcagtagcatttcatttaagataaggctcatatagtattacccaactagttggtaatgtgattatgtggtaccttggctttaggttttcattcgcacggaacaccttttggcatgcttaacttcctggtaacaccttcacctgcattggttttctttttcttttttctttctttttttttttttttttttttttgagttgttgtttgtttttagatccacagtacatgagaatccttttttgacaagccttggaaagctgacactgtctctttttcctccctctatacgaaggatgtatttaaatgaatgctggtcagtgggacattttgtcaactatgggtattgggtgcttaactgtctaatattgccatgtgaatgttgtatacgattgtaaggcttatgtcactaaagatttttattctgattttttcataatcaaaggtcatatgatactgtatagacaagctttgtagtgaagtatagtagcaataatttctgtacctgatcaagtttattgcagcctttcttttcctatttcttttttttaagggttagtattaacaaatggcaatgagtagaaaagttaacatgaagattttagaaggagagaacttacaggacacagatttgtgattctttgactgtgacactattggatgtgattctaaaagcttttattgagcattgtcaaatttgtaagcttcatagggatggacatcatatctataatgcccttctatatgtgctaccatagatgtgacatttttgaccttaatatcgtctttgaaaatgttaaattgagaaacctgttaacttacattttatgaattggcacattgtattacttactgcaagagatatttcattttcagcacagtgcaaaagttctttaaaatgcatatgtctttttttctaattccgttttgttttaaagcacattttaaatgtagttttctcatttagtaaaagttgtctaattgatatgaagcctgactgattttttttttccttacagtgagacatttaagcacacattttattcacatagatactatgtccttgacatattgaaatgattcttttctgaaagtattcatgatctgcatatgatgtattaggttaggtcacaaaggttttatctgaggtgatttaaataacttcctgattggagtgtgtaagctgagcgatttctaataaaattttagttgtacacttttagtagtcatagtgaagcaggtctagaaaataagcctttggcagggaaaaagggcaatgttgattaatctcagtattaaaccacattaatctgtatcccattgtctggcttttgtaaattcatccaggtcaagactaagtatgttggttaataggaatccttttttttttttttaaagactaaatgtgaaaaaataatcactacttaagctaattaatattggtcattaaatttaaaggatggaaatttatcatgtttaaaaattattcaagcactcttaaaaccacttaaacagcctccagtcataaaaatgtgttctttacaaatatttgcttggcaacacgacttgaaataaataaaactttgtttcttaggagaaaatgattctgtaattccagtgtcactaatttatattgttctttcctctgatttttttcaggttagtgatttttttgtatacaatttaatccaaatgttatgacattcagaaatcatgaaacacagtagatatctgttataatgtggtgtatcacatggattataaagcaaagttatggtcgatttctattcttgaaagaatcaactacagtgaatcctttgcatttgaagccttaacatgcattgctttaattttgcccagggacaaattttaataatcagcaagactggtttgtgcaaagcgttgagtcatcaggtatttagagcctagccagctacccagtatccatgctgccatatcccttcattgtaaaaagtacctaaacattcgtgaaatgattttttttagctgaaaaatgctggcaagaagaattttaaagcttaaaataggtggtaaatttgaagtatgagtgtgttcacgagaaacataggcttttcaaaaaaatttttattcaaggcaaagcaaggaacatcttgagatatgtctcaagaatataaagatgtattattttaagccaaggagctgaaatatatctcagtttataaattcaggtatattctttttgtctccatggcaaccataacttttgaaccaaaaaaaattgtttttacatctttatgctgaaaatgtgtttagattaggaatatggtcgggctgaatttgctgttgctccctaaccaaatccacctcttgttttccttgtgagtccatggctaaatcaaagctgcccctgagaagagacttaatccaagcctgattgtactagtggcatcacttagaagtaggctttccctcttcctagtagatctcaatgttttataattccttaaaacagctgaaaattgggacaacatactttacgcaatgaacagtagttaaataggaaataaactagttccatgtaagtatacacctagagttttaattacctttataatgtttcttaaaagtgaaacttagatacaattgtgattggatacttagatactaagtgaaacttagtgtaacaattttgatctgttaaattggattttacatgtacatttgaatgccagaatttctaaataaatcccctggttaggaaattttaaaagtcaaagcttgttttcttcaaccactaccttctacattggttgacttagaccgtaagctttttaagtttctcattgtaatttaccttctcatgcagattgctgatgttttattaaaccttatttttaca

SEQ ID NO: 678407 - DNA, 241 bp, Homo sapiens
  misc_feature (12)..(12): n is a, c, g, or t
  misc_feature (36)..(36): n is a, c, g, or t
  misc_feature (54)..(54): n is a, c, g, or t
  misc_feature (56)..(56): n is a, c, g, or t
  misc_feature (93)..(93): n is a, c, g, or t
  misc_feature (209)..(209): n is a, c, g, or t
gatttcggcacnaggtgaagggacccggcggctgantgcccgttcagaccatgnantctgaggtgaccttgctgctgagtgccctggcggggnctgcccaggaagcagatacaggccgagctgagccccgcccatgaccgtcgcccactgccaggtgggacgaggccatcactgccatctgggagaccccggctaaaggccaaccctgnctcttcgacgcccccaagttccgaaggttcac

SEQ ID NO: 678408 - DNA, 4000 bp, Homo sapiens
  misc_feature (11)..(11): n is a, c, g, or t
agccattgtgnatgagaagatcttctgttgtcatggaggattgtcaccagacctgcaatctatggagcagattcggagaattatgagacctactgatgtccctgatacaggtttgctctgtgatttgctatggtctgatccagataaggatgtgcaaggctggggagaaaatgatcgtggtgtttcctttacttttggagctgatgtagtcagtaaatttctgaatcgtcatgatttagatttgatttgtcgagctcatcaggtggtggaagatggatatgaattttttgctaaacgacagttggtaaccttattttcagccccaaattactgtggcgagtttgataatgctggtggaatgatgagtgtggatgaaactttgatgtgttcatttcagatattgaaaccatctgaaaagaaagctaaataccagtatggtggactgaattctggacgtcctgtcactccacctcgaacagctaatccgccgaagaaaaggtgaagaaaggaattctgtaaagaaaccatcagatttgttaaggacatacttcataatatataagtgtgcactgtaaaaccatccagccatttgacaccctttatgatgtcacacctttaacttaaggagacgggtaaaggatcttaaatttttttctaatagaaagatgtgctacactgtattgtaataagtatactctgttatagtcaacaaagttaaatccaaattcaaaattatccattaaagttacatcttcatgtatcacaatttttaaagttgaaaagcatcccagttaaactagatgtgatagttaaaccagatgaaagcatgatgatccatctgtgtaatgtggttttagtgttgcttggttgtttaattattttgagcttgttttgtttttgtttgttttcactagaataatggcaaatacttctaatttttttccctaaacatttttaaaagtgaaatatgggaagagctttacagacattcaccaactattattttcccttgtttatctacttagatatctgtttaatcttactaagaaaactttcgcctcattacattaaaaaggaattttagagattgattgttttaaaaaaaaatacgcacattgtccaatccagtgattttaatcatacagtttgactgggcaaactttacagctgatagtgaatattttgctttatacaggaattgacactgatttggatttgtgcactctaatttttaacttattgatgctctattgtgcagtagcatttcatttaagataaggctcatatagtattacccaactagttggtaatgtgattatgtggtaccttggctttaggttttcattcgcacggaacaccttttggcatgcttaacttcctggtaacaccttcacctgcattggttttctttttcttttttctttctttttttttttttttttttttttgagttgttgtttgtttttagatccacagtacatgagaatccttttttgacaagccttggaaagctgacactgtctctttttcctccctctatacgaaggatgtatttaaatgaatgctggtcagtgggacattttgtcaactatgggtattgggtgcttaactgtctaatattgccatgtgaatgttgtatacgattgtaaggcttatgtcactaaagatttttattctgattttttcataatcaaaggtcatatgatactgtatagacaagctttgtagtgaagtatagtagcaataatttctgtacctgatcaagtttattgcagcctttcttttcctatttcttttttttaagggttagtattaacaaatggcaatgagtagaaaagttaacatgaagattttagaaggagagaacttacaggacacagatttgtgattctttgactgtgacactattggatgtgattctaaaagcttttattgagcattgtcaaatttgtaagcttcatagggatggacatcatatctataatgcccttctatatgtgctaccatagatgtgacatttttgaccttaatatcgtctttgaaaatgttaaattgagaaacctgttaacttacattttatgaattggcacattgtattacttactgcaagagatatttcattttcagcacagtgcaaaagttctttaaaatgcatatgtctttttttctaattccgttttgttttaaagcacattttaaatgtagttttctcatttagtaaaagttgtctaattgatatgaagcctgactgattttttttttccttacagtgagacatttaagcacacattttattcacatagatactatgtccttgacatattgaaatgattcttttctgaaagtattcatgatctgcatatgatgtattaggttaggtcacaaaggttttatctgaggtgatttaaataacttcctgattggagtgtgtaagctgagcgatttctaataaaattttagttgtacacttttagtagtcatagtgaagcaggtctagaaaataagcctttggcagggaaaaagggcaatgttgattaatctcagtattaaaccacattaatctgtatcccattgtctggcttttgtaaattcatccaggtcaagactaagtatgttggttaataggaatccttttttttttttttaaagactaaatgtgaaaaaataatcactacttaagctaattaatattggtcattaaatttaaaggatggaaatttatcatgtttaaaaattattcaagcactcttaaaaccacttaaacagcctccagtcataaaaatgtgttctttacaaatatttgcttggcaacacgacttgaaataaataaaactttgtttcttaggagaaaatgattctgtaattccagtgtcactaatttatattgttctttcctctgatttttttcaggttagtgatttttttgtatacaatttaatccaaatgttatgacattcagaaatcatgaaacacagtagatatctgttataatgtggtgtatcacatggattataaagcaaagttatggtcgatttctattcttgaaagaatcaactacagtgaatcctttgcatttgaagccttaacatgcattgctttaattttgcccagggacaaattttaataatcagcaagactggtttgtgcaaagcgttgagtcatcaggtatttagagcctagccagctacccagtatccatgctgccatatcccttcattgtaaaaagtacctaaacattcgtgaaatgattttttttagctgaaaaatgctggcaagaagaattttaaagcttaaaataggtggtaaatttgaagtatgagtgtgttcacgagaaacataggcttttcaaaaaaatttttattcaaggcaaagcaaggaacatcttgagatatgtctcaagaatataaagatgtattattttaagccaaggagctgaaatatatctcagtttataaattcaggtatattctttttgtctccatggcaaccataacttttgaaccaaaaaaaattgtttttacatctttatgctgaaaatgtgtttagattaggaatatggtcgggctgaatttgctgttgctccctaaccaaatccacctcttgttttccttgtgagtccatggctaaatcaaagctgcccctgagaagagacttaatccaagcctgattgtactagtggcatcacttagaagtaggctttccctcttcctagtagatctcaatgttttataattccttaaaacagctgaaaattgggacaacatactttacgcaatgaacagtagttaaataggaaataaactagttccatgtaagtatacacctagagttttaattacctttataatgtttcttaaaagtgaaacttagatacaattgtgattggatacttagatactaagtgaaacttagtgtaacaattttgatctgttaaattggattttacatgtacatttgaatgccagaatttctaaataaatcccctggttaggaaatttta

SEQ ID NO: 678409 - DNA, 212 bp, Homo sapiens
tacgagggctgacatggtgtatgtcacacagtcggctggtcggttgatgcgagtgatatttgacattgtcctgaagcgaggttgggcacagtttagagacaagaccctgaacctctgcaagatgatcgacacgcgcatgtggcagtccatgtgtcctctgcgccagttccagaaactccctgaggatgtactgcagaagattgagaagaaga

SEQ ID NO: 678410 - DNA, 3340 bp, Homo sapiens
gccaagggttaatgacctatatgattccagcagctgactgtattgtcctttatatgtgaagttgacactactgatttgtcaataccaaattttgggttaaagtgtttaatcttactaagaaaactttcgcctcattacattaaaaaggaattttagagattgattgttttaaaaaaaaatacgcacattgtccaatccagtgattttaatcatacagtttgactgggcaaactttacagctgatagtgaatattttgctttatacaggaattgacactgatttggatttgtgcactctaatttttaacttattgatgctctattgtgcagtagcatttcatttaagataaggctcatatagtattacccaactagttggtaatgtgattatgtggtaccttggctttaggttttcattcgcacggaacaccttttggcatgcttaacttcctggtaacaccttcacctgcattggttttctttttcttttttctttctttttttttttttttttttttttgagttgttgtttgtttttagatccacagtacatgagaatccttttttgacaagccttggaaagctgacactgtctctttttcctccctctatacgaaggatgtatttaaatgaatgctggtcagtgggacattttgtcaactatgggtattgggtgcttaactgtctaatattgccatgtgaatgttgtatacgattgtaaggcttatgtcactaaagatttttattctgattttttcataatcaaaggtcatatgatactgtatagacaagctttgtagtgaagtatagtagcaataatttctgtacctgatcaagtttattgcagcctttcttttcctatttcttttttttaagggttagtattaacaaatggcaatgagtagaaaagttaacatgaagattttagaaggagagaacttacaggacacagatttgtgattctttgactgtgacactattggatgtgattctaaaagcttttattgagcattgtcaaatttgtaagcttcatagggatggacatcatatctataatgcccttctatatgtgctaccatagatgtgacatttttgaccttaatatcgtctttgaaaatgttaaattgagaaacctgttaacttacattttatgaattggcacattgtattacttactgcaagagatatttcattttcagcacagtgcaaaagttctttaaaatgcatatgtctttttttctaattccgttttgttttaaagcacattttaaatgtagttttctcatttagtaaaagttgtctaattgatatgaagcctgactgattttttttttccttacagtgagacatttaagcacacattttattcacatagatactatgtccttgacatattgaaatgattcttttctgaaagtattcatgatctgcatatgatgtattaggttaggtcacaaaggttttatctgaggtgatttaaataacttcctgattggagtgtgtaagctgagcgatttctaataaaattttagttgtacacttttagtagtcatagtgaagcaggtctagaaaataagcctttggcagggaaaaagggcaatgttgattaatctcagtattaaaccacattaatctgtatcccattgtctggcttttgtaaattcatccaggtcaagactaagtatgttggttaataggaatccttttttttttttttaaagactaaatgtgaaaaaataatcactacttaagctaattaatattggtcattaaatttaaaggatggaaatttatcatgtttaaaaattattcaagcactcttaaaaccacttaaacagcctccagtcataaaaatgtgttctttacaaatatttgcttggcaacacgacttgaaataaataaaactttgtttcttaggagaaaatgattctgtaattccagtgtcactaatttatattgttctttcctctgatttttttcaggttagtgatttttttgtatacaatttaatccaaatgttatgacattcagaaatcatgaaacacagtagatatctgttataatgtggtgtatcacatggattataaagcaaagttatggtcgatttctattcttgaaagaatcaactacagtgaatcctttgcatttgaagccttaacatgcattgctttaattttgcccagggacaaattttaataatcagcaagactggtttgtgcaaagcgttgagtcatcaggtatttagagcctagccagctacccagtatccatgctgccatatcccttcattgtaaaaagtacctaaacattcgtgaaatgattttttttagctgaaaaatgctggcaagaagaattttaaagcttaaaataggtggtaaatttgaagtatgagtgtgttcacgagaaacataggcttttcaaaaaaatttttattcaaggcaaagcaaggaacatcttgagatatgtctcaagaatataaagatgtattattttaagccaaggagctgaaatatatctcagtttataaattcaggtatattctttttgtctccatggcaaccataacttttgaaccaaaaaaaattgtttttacatctttatgctgaaaatgtgtttagattaggaatatggtcgggctgaatttgctgttgctccctaaccaaatccacctcttgttttccttgtgagtccatggctaaatcaaagctgcccctgagaagagacttaatccaagcctgattgtactagtggcatcacttagaagtaggctttccctcttcctagtagatctcaatgttttataattccttaaaacagctgaaaattgggacaacatactttacgcaatgaacagtagttaaataggaaataaactagttccatgtaagtatacacctagagttttaattacctttataatgtttcttaaaagtgaaacttagatacaattgtgattggatacttagatactaagtgaaacttagtgtaacaattttgatctgttaaattggattttacatgtacatttgaatgccagaatttctaaataaatcccctggttaggaaattttaaaagtcaaagcttgttttcttcaaccactaccttctacattggttgacttagaccgtaagctttttaagtttctcattgtaatttaccttctcatgcagattgctgatgttttattaaaccttatttttacaaaaatgaaaaaaaaaaaaagaaaattgggcggcggcccaaaaatttaaaatgtgggggggccagtatgaagggtaggcagagaaggggaaggggggtcacaaaagaggggggggaaaaagggggggtggaaaagag

SEQ ID NO: 678411 - DNA, 2971 bp, Homo sapiens
gaataaattgggaaccctgggcttaagggttttcaattcgcaacgggaacaccctttgggcaaggctaaaccttcctgtgaacaacccttcaacctcgcacatggtgttttctttttcttttttctcttttttttttttttttttttttttgagttgttgtttgtttttagatccacagtacatgagaatccttttttgacaagccttggaaagctgacactgtctctttttcctccctctatacgaaggatgtatttaaatgaatgctggtcagtgggacattttgtcaactatgggtattgggtgcttaactgtctaatattgccatgtgaatgttgtatacgattgtaaggcttatgtcactaaagatttttattctgattttttcataatcaaaggtcatatgatactgtatagacaagctttgtagtgaagtatagtagcaataatttctgtacctgatcaagtttattgcagcctttcttttcctatttcttttttttaagggttagtattaacaaatggcaatgagtagaaaagttaacatgaagattttagaaggagagaacttacaggacacagatttgtgattctttgactgtgacactattggatgtgattctaaaagcttttattgagcattgtcaaatttgtaagcttcatagggatggacatcatatctataatgcccttctatatgtgctaccatagatgtgacatttttgaccttaatatcgtctttgaaaatgttaaattgagaaacctgttaacttacattttatgaattggcacattgtattacttactgcaagagatatttcattttcagcacagtgcaaaagttctttaaaatgcatatgtctttttttctaattccgttttgttttaaagcacattttaaatgtagttttctcatttagtaaaagttgtctaattgatatgaagcctgactgattttttttttccttacagtgagacatttaagcacacattttattcacatagatactatgtccttgacatattgaaatgattcttttctgaaagtattcatgatctgcatatgatgtattaggttaggtcacaaaggttttatctgaggtgatttaaataacttcctgattggagtgtgtaagctgagcgatttctaataaaattttagttgtacacttttagtagtcatagtgaagcaggtctagaaaataagcctttggcagggaaaaagggcaatgttgattaatctcagtattaaaccacattaatctgtatcccattgtctggcttttgtaaattcatccaggtcaagactaagtatgttggttaataggaatccttttttttttttttaaagactaaatgtgaaaaaataatcactacttaagctaattaatattggtcattaaatttaaaggatggaaatttatcatgtttaaaaattattcaagcactcttaaaaccacttaaacagcctccagtcataaaaatgtgttctttacaaatatttgcttggcaacacgacttgaaataaataaaactttgtttcttaggagaaaatgattctgtaattccagtgtcactaatttatattgttctttcctctgatttttttcaggttagtgatttttttgtatacaatttaatccaaatgttatgacattcagaaatcatgaaacacagtagatatctgttataatgtggtgtatcacatggattataaagcaaagttatggtcgatttctattcttgaaagaatcaactacagtgaatcctttgcatttgaagccttaacatgcattgctttaattttgcccagggacaaattttaataatcagcaagactggtttgtgcaaagcgttgagtcatcaggtatttagagcctagccagctacccagtatccatgctgccatatcccttcattgtaaaaagtacctaaacattcgtgaaatgattttttttagctgaaaaatgctggcaagaagaattttaaagcttaaaataggtggtaaatttgaagtatgagtgtgttcacgagaaacataggcttttcaaaaaaatttttattcaaggcaaagcaaggaacatcttgagatatgtctcaagaatataaagatgtattattttaagccaaggagctgaaatatatctcagtttataaattcaggtatattctttttgtctccatggcaaccataacttttgaaccaaaaaaaattgtttttacatctttatgctgaaaatgtgtttagattaggaatatggtcgggctgaatttgctgttgctccctaaccaaatccacctcttgttttccttgtgagtccatggctaaatcaaagctgcccctgagaagagacttaatccaagcctgattgtactagtggcatcacttagaagtaggctttccctcttcctagtagatctcaatgttttataattccttaaaacagctgaaaattgggacaacatactttacgcaatgaacagtagttaaataggaaataaactagttccatgtaagtatacacctagagttttaattacctttataatgtttcttaaaagtgaaacttagatacaattgtgattggatacttagatactaagtgaaacttagtgtaacaattttgatctgttaaattggattttacatgtacatttgaatgccagaatttctaaataaatcccctggttaggaaattttaaaagtcaaagcttgttttcttcaaccactaccttctacattggttgacttagaccgtaagctttttaagtttctcattgtaatttaccttctcatgcagattgctgatgttttattaaaccttatttttacaaaaatgaaaaaaaaaaaaagaaaattgggcggcggcccaaaaatttaaaatgtgggggggccagtatgaagggtaggcagagaaggggaaggggggtcacaaaagaggggggggaaaaagggggggtggaaaagag

SEQ ID NO: 678412 - DNA, 681 bp, Homo sapiens
accccagtcaccccggagtcagccaccctctcggaaaagcgacgtgcgcgccaatgcagtgtggtctctgatgggtccaaggacttgacgtgacggtggggtgcttgccactttgatgctagccctgagtcaccaccacctgcgtcccggacggtgtcactgagatccgaggcctgctggccaaggtctgcggctgagagccccccacaggcggccccctgctcaactggggccccgctcgggagagtccccagctaaggctgccccgaggctcctcggccgactgcctcaccctccagcatctcctgcctggaaaggctgtggagcttgggcccccaagccagcgacaggagatggagagcaggtgtccaggcgcatgagcacccgacctccaaggagcacgaggacagtgcaggggtgcacactgaggtctaggccagtgggtcgctgactgctgaacaatggaacaggcctgttcccttccggacccaggcaggctcagctcgtggggaggggacccgtggtctgtgccttgtggggtggagcggtgtgcacgggatgtgtggaaccggccaagggcaacgggagccagcgtgaagtccgttaagtgggggacaaggccaaaaggtatcttgagaccctggtaactcatctgtgggatgatctcggaatgacgggctg

SEQ ID NO: 678413 - DNA, 173 bp, Homo sapiens
agaggatccccttgctggcgcagagcattgacacttttcccgagccacaaagccaggcttccctgggctcggcagggacatgcgctccagtacccgcctcctgcctaccctgcctgccaagggtggcttccagtgttcccactgatcccctgactacctagtttccacacgca

SEQ ID NO: 678414 - DNA, 2236 bp, Homo sapiens
  misc_feature (11)..(11): n is a, c, g, or t
agccattgtgnatgagaagatcttctgttgtcatggaggattgtcaccagacctgcaatctatggagcagattcggagaattatgagacctactgatgtccctgatacaggtttgctctgtgatttgctatggtctgatccagataaggatgtgcaaggctggggagaaaatgatcgtggtgtttcctttacttttggagctgatgtagtcagtaaatttctgaatcgtcatgatttagatttgatttgtcgagctcatcaggtggtggaagatggatatgaattttttgctaaacgacagttggtaaccttattttcagccccaaattactgtggcgagtttgataatgctggtggaatgatgagtgtggatgaaactttgatgtgttcatttcagatattgaaaccatctgaaaagaaagctaaataccagtatggtggactgaattctggacgtcctgtcactccacctcgaacagctaatccgccgaagaaaaggtgaagaaaggaattctgtaaagaaaccatcagatttgttaaggacatacttcataatatataagtgtgcactgtaaaaccatccagccatttgacaccctttatgatgtcacacctttaacttaaggagacgggtaaaggatcttaaatttttttctaatagaaagatgtgctacactgtattgtaataagtatactctgttatagtcaacaaagttaaatccaaattcaaaattatccattaaagttacatcttcatgtatcacaatttttaaagttgaaaagcatcccagttaaactagatgtgatagttaaaccagatgaaagcatgatgatccatctgtgtaatgtggttttagtgttgcttggttgtttaattattttgagcttgttttgtttttgtttgttttcactagaataatggcaaatacttctaatttttttccctaaacatttttaaaagtgaaatatgggaagagctttacagacattcaccaactattattttcccttgtttatctacttagatatctgtttaatcttactaagaaaactttcgcctcattacattaaaaaggaattttagagattgattgttttaaaaaaaaatacgcacattgtccaatccagtgattttaatcatacagtttgactgggcaaactttacagctgatagtgaatattttgctttatacaggaattgacactgatttggatttgtgcactctaatttttaacttattgatgctctattgtgcagtagcatttcatttaagataaggctcatatagtattacccaactagttggtaatgtgattatgtggtaccttggctttaggttttcattcgcacggaacaccttttggcatgcttaacttcctggtaacaccttcacctgcattggttttctttttcttttttctttctttttttttttttttttttttttgagttgttgtttgtttttagatccacagtacatgagaatccttttttgacaagccttggaaagctgacactgtctctttttcctccctctatacgaaggatgtatttaaatgaatgctggtcagtgggacattttgtcaactatgggtattgggtgcttaactgtctaatattgccatgtgaatgttgtatacgattgtaaggcttatgtcactaaagatttttattctgattttttcataatcaaaggtcatatgatactgtatagacaagctttgtagtgaagtatagtagcaataatttctgtacctgatcaagtttattgcagcctttcttttcctatttcttttttttaagggttagtattaacaaatggcaatgagtagaaaagttaacatgaagattttagaaggagagaacttacaggacacagatttgtgattctttgactgtgacactattggatgtgattctaaaagcttttattgagcattgtcaaatttgtaagcttcatagggatggacatcatatctataatgcccttctatatgtgctaccatagatgtgacatttttgaccttaatatcgtctttgaaaatgttaaattgagaaacctgttaacttacattttatgaattggcacattgtattacttactgcaagagatatttcattttcagcacagtgcaaaagttctttaaaatgcatatgtctttttttctaattccgttttgttttaaagcacattttaaatgtagttttctcatttagtaaaagttgtctaattga

SEQ ID NO: 678415 - DNA, 2669 bp, Homo sapiens
gcagggatggtctacctgctaacatcatgtgatattgaatacgattgtaaggcttatgtcactaaagatttttattctgattttttcataatcaaaggtcatatgatactgtatagacaagctttgtagtgaagtatagtagcaataatttctgtacctgatcaagtttattgcagcctttcttttcctatttcttttttttaagggttagtattaacaaatggcaatgagtagaaaagttaacatgaagattttagaaggagagaacttacaggacacagatttgtgattctttgactgtgacactattggatgtgattctaaaagcttttattgagcattgtcaaatttgtaagcttcatagggatggacatcatatctataatgcccttctatatgtgctaccatagatgtgacatttttgaccttaatatcgtctttgaaaatgttaaattgagaaacctgttaacttacattttatgaattggcacattgtattacttactgcaagagatatttcattttcagcacagtgcaaaagttctttaaaatgcatatgtctttttttctaattccgttttgttttaaagcacattttaaatgtagttttctcatttagtaaaagttgtctaattgatatgaagcctgactgattttttttttccttacagtgagacatttaagcacacattttattcacatagatactatgtccttgacatattgaaatgattcttttctgaaagtattcatgatctgcatatgatgtattaggttaggtcacaaaggttttatctgaggtgatttaaataacttcctgattggagtgtgtaagctgagcgatttctaataaaattttagttgtacacttttagtagtcatagtgaagcaggtctagaaaataagcctttggcagggaaaaagggcaatgttgattaatctcagtattaaaccacattaatctgtatcccattgtctggcttttgtaaattcatccaggtcaagactaagtatgttggttaataggaatccttttttttttttttaaagactaaatgtgaaaaaataatcactacttaagctaattaatattggtcattaaatttaaaggatggaaatttatcatgtttaaaaattattcaagcactcttaaaaccacttaaacagcctccagtcataaaaatgtgttctttacaaatatttgcttggcaacacgacttgaaataaataaaactttgtttcttaggagaaaatgattctgtaattccagtgtcactaatttatattgttctttcctctgatttttttcaggttagtgatttttttgtatacaatttaatccaaatgttatgacattcagaaatcatgaaacacagtagatatctgttataatgtggtgtatcacatggattataaagcaaagttatggtcgatttctattcttgaaagaatcaactacagtgaatcctttgcatttgaagccttaacatgcattgctttaattttgcccagggacaaattttaataatcagcaagactggtttgtgcaaagcgttgagtcatcaggtatttagagcctagccagctacccagtatccatgctgccatatcccttcattgtaaaaagtacctaaacattcgtgaaatgattttttttagctgaaaaatgctggcaagaagaattttaaagcttaaaataggtggtaaatttgaagtatgagtgtgttcacgagaaacataggcttttcaaaaaaatttttattcaaggcaaagcaaggaacatcttgagatatgtctcaagaatataaagatgtattattttaagccaaggagctgaaatatatctcagtttataaattcaggtatattctttttgtctccatggcaaccataacttttgaaccaaaaaaaattgtttttacatctttatgctgaaaatgtgtttagattaggaatatggtcgggctgaatttgctgttgctccctaaccaaatccacctcttgttttccttgtgagtccatggctaaatcaaagctgcccctgagaagagacttaatccaagcctgattgtactagtggcatcacttagaagtaggctttccctcttcctagtagatctcaatgttttataattccttaaaacagctgaaaattgggacaacatactttacgcaatgaacagtagttaaataggaaataaactagttccatgtaagtatacacctagagttttaattacctttataatgtttcttaaaagtgaaacttagatacaattgtgattggatacttagatactaagtgaaacttagtgtaacaattttgatctgttaaattggattttacatgtacatttgaatgccagaatttctaaataaatcccctggttaggaaattttaaaagtcaaagcttgttttcttcaaccactaccttctacattggttgacttagaccgtaagctttttaagtttctcattgtaatttaccttctcatgcagattgctgatgttttattaaaccttatttttacaaaaatgaaaaaaaaaaaaagaaaattgggcggcggcccaaaaatttaaaatgtgggggggccagtatgaagggtaggcagagaaggggaaggggggtcacaaaagaggggggggaaaaagggggggtggaaaagag

SEQ ID NO: 678416 - DNA, 854 bp, Homo sapiens
  misc_feature (11)..(11): n is a, c, g, or t
  misc_feature (49)..(49): n is a, c, g, or t
  misc_feature (67)..(67): n is a, c, g, or t
  misc_feature (88)..(88): n is a, c, g, or t
  misc_feature (127)..(127): n is a, c, g, or t
  misc_feature (133)..(133): n is a, c, g, or t
  misc_feature (158)..(158): n is a, c, g, or t
  misc_feature (164)..(164): n is a, c, g, or t
  misc_feature (188)..(188): n is a, c, g, or t
  misc_feature (208)..(208): n is a, c, g, or t
  misc_feature (274)..(274): n is a, c, g, or t
  misc_feature (285)..(285): n is a, c, g, or t
  misc_feature (287)..(288): n is a, c, g, or t
  misc_feature (303)..(303): n is a, c, g, or t
  misc_feature (308)..(308): n is a, c, g, or t
  misc_feature (312)..(313): n is a, c, g, or t
  misc_feature (317)..(317): n is a, c, g, or t
  misc_feature (329)..(329): n is a, c, g, or t
  misc_feature (336)..(336): n is a, c, g, or t
  misc_feature (340)..(341): n is a, c, g, or t
  misc_feature (351)..(351): n is a, c, g, or t
  misc_feature (368)..(368): n is a, c, g, or t
  misc_feature (372)..(373): n is a, c, g, or t
  misc_feature (378)..(378): n is a, c, g, or t
  misc_feature (383)..(383): n is a, c, g, or t
  misc_feature (393)..(394): n is a, c, g, or t
  misc_feature (400)..(400): n is a, c, g, or t
  misc_feature (404)..(404): n is a, c, g, or t
  misc_feature (407)..(407): n is a, c, g, or t
  misc_feature (410)..(411): n is a, c, g, or t
  misc_feature (414)..(414): n is a, c, g, or t
  misc_feature (418)..(418): n is a, c, g, or t
  misc_feature (420)..(420): n is a, c, g, or t
  misc_feature (423)..(424): n is a, c, g, or t
  misc_feature (427)..(427): n is a, c, g, or t
  misc_feature (429)..(430): n is a, c, g, or t
  misc_feature (436)..(437): n is a, c, g, or t
  misc_feature (442)..(442): n is a, c, g, or t
  misc_feature (447)..(447): n is a, c, g, or t
  misc_feature (452)..(453): n is a, c, g, or t
  misc_feature (457)..(457): n is a, c, g, or t
  misc_feature (460)..(460): n is a, c, g, or t
  misc_feature (465)..(465): n is a, c, g, or t
  misc_feature (472)..(472): n is a, c, g, or t
  misc_feature (479)..(479): n is a, c, g, or t
  misc_feature (511)..(511): n is a, c, g, or t
  misc_feature (529)..(529): n is a, c, g, or t
  misc_feature (532)..(532): n is a, c, g, or t
  misc_feature (543)..(544): n is a, c, g, or t
  misc_feature (558)..(558): n is a, c, g, or t
  misc_feature (576)..(576): n is a, c, g, or t
  misc_feature (579)..(579): n is a, c, g, or t
  misc_feature (583)..(583): n is a, c, g, or t
  misc_feature (598)..(598): n is a, c, g, or t
  misc_feature (661)..(661): n is a, c, g, or t
  misc_feature (667)..(667): n is a, c, g, or t
  misc_feature (713)..(713): n is a, c, g, or t
  misc_feature (750)..(751): n is a, c, g, or t
  misc_feature (773)..(773): n is a, c, g, or t
  misc_feature (782)..(782): n is a, c, g, or t
  misc_feature (785)..(785): n is a, c, g, or t
  misc_feature (821)..(821): n is a, c, g, or t
gagtgagggcncaagtccgccctgctccgccacttaggccgccccagangcttccctcggggctgcnaccgggtcgggcgcggctgcngcggctcgcgggccttccccgcaccggcgcggcccaacngccacngaaccttctggaagcggcggctgcntgggcncccacgccgccagaatcgtacgcncgcgcgagctctctgcagcnttggcggcctgggaggcggggctcggggtggggccggcgcgggggcggggtcggcgcggggaggcngcgttcgattngnncccggcgcgcaggcnccgcntcannagcnccatcgctccanctctgcnctcnncctttatggngcggcccgggctcattnattnngcgcngggcntgcaagaaanntgcgcncttntgnagnngcncgcngnatnngcngnngaagcnnccagnatgtngggcnnagangtngagangccgtcngcaatcnagatatgcaggataatgcggccagatgatgcnaaagtggccggcaatgtncanggggggaaatnntgaagatgatagangaggcaggcgccatcatnagnaccnggcattgcaacagcnagaaaggggagcgctgtgtggccgccctggctcgtgtcgagcgcaccgacttcctgtctcccntgtgcntcggtgaggtggcgcatgtcagcgcggagatcacctacacctccangcactctgtggaggtgcaggtcaacgtgatgtccgannacatcctcacaggtgccaaaangctgaccantanggccaccctgtggtatgtgcccctgtcgctgaagantgtggacaaggtcctcgaggtgcctcctgttgt

SEQ ID NO: 678417 - DNA, 2562 bp, Homo sapiens
  misc_feature (11)..(11): n is a, c, g, or t
agccattgtgnatgagaagatcttctgttgtcatggaggattgtcaccagacctgcaatctatggagcagattcggagaattatgagacctactgatgtccctgatacaggtttgctctgtgatttgctatggtctgatccagataaggatgtgcaaggctggggagaaaatgatcgtggtgtttcctttacttttggagctgatgtagtcagtaaatttctgaatcgtcatgatttagatttgatttgtcgagctcatcaggtggtggaagatggatatgaattttttgctaaacgacagttggtaaccttattttcagccccaaattactgtggcgagtttgataatgctggtggaatgatgagtgtggatgaaactttgatgtgttcatttcagatattgaaaccatctgaaaagaaagctaaataccagtatggtggactgaattctggacgtcctgtcactccacctcgaacagctaatccgccgaagaaaaggtgaagaaaggaattctgtaaagaaaccatcagatttgttaaggacatacttcataatatataagtgtgcactgtaaaaccatccagccatttgacaccctttatgatgtcacacctttaacttaaggagacgggtaaaggatcttaaatttttttctaatagaaagatgtgctacactgtattgtaataagtatactctgttatagtcaacaaagttaaatccaaattcaaaattatccattaaagttacatcttcatgtatcacaatttttaaagttgaaaagcatcccagttaaactagatgtgatagttaaaccagatgaaagcatgatgatccatctgtgtaatgtggttttagtgttgcttggttgtttaattattttgagcttgttttgtttttgtttgttttcactagaataatggcaaatacttctaatttttttccctaaacatttttaaaagtgaaatatgggaagagctttacagacattcaccaactattattttcccttgtttatctacttagatatctgtttaatcttactaagaaaactttcgcctcattacattaaaaaggaattttagagattgattgttttaaaaaaaaatacgcacattgtccaatccagtgattttaatcatacagtttgactgggcaaactttacagctgatagtgaatattttgctttatacaggaattgacactgatttggatttgtgcactctaatttttaacttattgatgctctattgtgcagtagcatttcatttaagataaggctcatatagtattacccaactagttggtaatgtgattatgtggtaccttggctttaggttttcattcgcacggaacaccttttggcatgcttaacttcctggtaacaccttcacctgcattggttttctttttcttttttctttctttttttttttttttttttttttgagttgttgtttgtttttagatccacagtacatgagaatccttttttgacaagccttggaaagctgacactgtctctttttcctccctctatacgaaggatgtatttaaatgaatgctggtcagtgggacattttgtcaactatgggtattgggtgcttaactgtctaatattgccatgtgaatgttgtatacgattgtaaggcttatgtcactaaagatttttattctgattttttcataatcaaaggtcatatgatactgtatagacaagctttgtagtgaagtatagtagcaataatttctgtacctgatcaagtttattgcagcctttcttttcctatttcttttttttaagggttagtattaacaaatggcaatgagtagaaaagttaacatgaagattttagaaggagagaacttacaggacacagatttgtgattctttgactgtgacactattggatgtgattctaaaagcttttattgagcattgtcaaatttgtaagcttcatagggatggacatcatatctataatgcccttctatatgtgctaccatagatgtgacatttttgaccttaatatcgtctttgaaaatgttaaattgagaaacctgttaacttacattttatgaattggcacattgtattacttactgcaagagatatttcattttcagcacagtgcaaaagttctttaaaatgcatatgtctttttttctaattccgttttgttttaaagcacattttaaatgtagttttctcatttagtaaaagttgtctaattgaaaaaaaaaaacaaaaaaaaaaaaaaaaaaagagcaaaaaaacaacaaaaaaacaacaagagggcggggggggcacaaacgaaacaacccggagggggcgacaaaaacaagcaccacaacctcgtagaataaacgggggctccccaagaaaaagaggaacaaaaaaagacggcgggccgccagacaacccgccggaggacgacaaccagacaggacgataagtggaagaccaccatgagggggacatgagaaccacaacaaaaagcggcgagcacacaagcgaatgacaaccacacacgcgacaacgcgcagtaaaaatgcgcagat

SEQ ID NO: 678418 - DNA, 117 bp, Homo sapiens
gcggccgcctactactactactactgctcgaattcaagcttctaacgatgtacggggacatgaaaaaaatcaaatttttgatttattataaatgaatgttgtccctgaaccaaaaaa

SEQ ID NO: 678419 - DNA, 294 bp, Homo sapiens
tcagccacatggtgaattgctttgagctaacagtgtggctgcaagctccgagactgcttcagtgaggagggctagctgcccagtagaaagcaaccgacatttttttttttaaacggagttgggatcttgtagcccaggcgggagttgcaagggcacaatctcagctcactacaacctccagctcccgggttcaagcaactctcctggctcggtgtcccgagtagctggaatcacagggatgtgccacattgcctagctcactgttgttatttgcagtagaacgggggtttcacc

SEQ ID NO: 678420 - DNA, 555 bp, Homo sapiens
  misc_feature (16)..(16): n is a, c, g, or t
  misc_feature (32)..(32): n is a, c, g, or t
  misc_feature (59)..(59): n is a, c, g, or t
  misc_feature (73)..(73): n is a, c, g, or t
  misc_feature (84)..(84): n is a, c, g, or t
  misc_feature (131)..(131): n is a, c, g, or t
  misc_feature (139)..(139): n is a, c, g, or t
  misc_feature (182)..(182): n is a, c, g, or t
  misc_feature (184)..(184): n is a, c, g, or t
  misc_feature (338)..(338): n is a, c, g, or t
  misc_feature (453)..(453): n is a, c, g, or t
gtgaaattttcaaccnagggttgcccaatagnactgcagtttattggagggggttttgngaccaggcagtttntaacagtagcnaaatggttggaaaacaagacagtttcctgttattcaacttcaagaantcatggangattgttccagcagtccttgaaaatgaaaagttagcttctgtntntctaaaacagtaaacatatcttacaaattaaaatgacttttaggctgggtgcagtggctcacacctgtaatcccagcactttgggaggccaaggcgagcggatcatgaggtcagaagatctagaacagcctggtcaacatggtgaaaccccgtntttactaaaaatacaaaaattagccaggcttagtggcgggcatctgtagtcccagctactcaggaggctgaggcaggagaatcacttgaaccctggaggtggaggttgcagtganccgagatcatgccactgcactgcactccagcctgggtgacaaagcaagactgtgtctcaaaataaataaataaaataaaataaaatgacgtacagagattct

SEQ ID NO: 678421 - DNA, 419 bp, Homo sapiens
  misc_feature (11)..(11): n is a, c, g, or t
  misc_feature (25)..(25): n is a, c, g, or t
  misc_feature (343)..(343): n is a, c, g, or t
  misc_feature (350)..(350): n is a, c, g, or t
  misc_feature (372)..(372): n is a, c, g, or t
  misc_feature (407)..(407): n is a, c, g, or t
tgtccatgtgnaaaagcctttttgncctgaaacccttagcctgccttaggcctttagcctaattgaaaatgccatgttacctattacccagtatttgccccttattttaaaaattacctacctaataacaaataacatcattgagtacgtagtatggattgggttctagggcaaataccttacatgaatcatctcaaggaatagaaccagactcctgttttgccctcttcccaggagctcctgtgggacagacaggcccatactcccctgctgtacaatcatagggcatgctgagcatcagttggctgttacttctttcaaatctgcttttggggagtggggnacatagnttttaaattatttttaaagganagatataagagagtatatggaataaaaccataagnaatgtttattaa

SEQ ID NO: 678422 - DNA, 298 bp, Homo sapiens
gtggtcagaaagcgaattagttcatttaatggcttccagctctggctgatgacgtccccactgacagagaaagggaggctggtagggaactgggtccttctgggtagacctctgggatctccgccaggacgaaaggctctggggaacgagcatttgaagaacagtgactggggtccatggttgtccagaactgcccaaaaggaattcacgcactctgaatctgaagagtcgataccgccagatgtcatggggagatcgtctgggggggtgacaactgggcctgcagctgctgcccagg

SEQ ID NO: 678423 - DNA, 154 bp, Homo sapiens
gtggctgctctagaggtatcccctattcatccgccctcgctattcatcggcgccttcgctattcatcggcaccttcgctcttcatcggcacctcgcttttcatcggctccccaccccatccatacagtctccgtcatgactgaaactctcggct

SEQ ID NO: 678424 - DNA, 1106 bp, Homo sapiens
tatgtgcttgtttccagggacctcttggctgtcctcagatctccgctcctaagccttaatccgaatcgtaatcgcctatgtgggggtctttaactttatctaatcccattgggtggttgcttggtcttgtgcatgaatttgcctggttatatgtgctgcctaagcgctgttggtaagcaagggcaaaaaagtggccaactttatttatgctcgatatcctcggctatgttcatgtcgatctataggcagcgccacaataaagggttaagtgaacgccgggaggccgggaagatcgtgtggcggatgaaagtgcttcttcgaatacagggagtgtaggagagtctggcaaggagaatgcctattggttagctcggcgtcacataggtgctggtaagacaggcactctgtccacggaccagtgctgtgacaccatcaaacacactctgaacgttaaagcggacttaaggcagacaccttgttgactagtgtctctcgaatgtgttctcttagaccacatatcgttccttagtgaagcacgctacttatgccaaggggataacaagcgactatgtctgtgtatgtatgggactatagatgtaagtacgtatatatttaacaaaccctgtccattgatagttaagttaaggctgagcatcataaagggtgatcacaatgaaatgtgtaactgcaaattgtcatgagtaatatgtaactttagtaaaaataatattagtaaaataacaggaatttaaacctgtgtactaaagtagatccataaaacctgtctcgtcacacgtactagtatgtagactgtattgctcttagtaagtggttctacagaaacactgtctgtggctgaagtcttccgtcgaattgcttttatgacaactgtacagtctcttattaagtcctttaaagctgacgtcattagccatcatgtagcttaaggagtcatgaaatctgccagttaagactgcactctttaagccaggtgctggtagcatgtgcgctatagtcccagctaacttgggaggtggaggtgggaggaattataaatagagactttcctgaagactctaaaaatatactcccacggtgtttttata

SEQ ID NO: 678425 - DNA, 198 bp, Homo sapiens
agtgaggtgctgataatagcgaagtgctgataatagcgagggtgctgataatacgaggtgctgataatatgcgaggtggagatacatagcgaggtgccgatgaatagcgaggtgccgataatagcgaggtgccgataaatagcgaggtgccgataaatagctgaggtgcgatgaatagcgatgggtgccgatgaatag

SEQ ID NO: 678426 - DNA, 1079 bp, Homo sapiens
ggtataagcctctcctggggccactgtgtggctgtgcggagatgatgcccagcacagaagtacacaggtccatgtcccccagtattaggacccaaggcctgtgtcccggggaacaatcactggatctcagattctgatactggttgatcgtagctatacccttgtctgctaggattggacgtctcccgcaaagaggcggggcccagtcctaagcgagcttccaaggtcccacatgaggatgggctagctgggacggagtttggaagcgccgctgacaattgtaggcgcgggaggaagatgtgatgcggttgacgttcgtacacacgtgaatgtcaaaactagtgaacatgcagctcgcaggaaacaggggggagtgttgtgacctgggaagatccgcgactggtcaagacatgggacctcgtccatacagtgcaggcggaagaatcacagacatgattgctgtcactactggcttggcccatggagcttctgcagaacctacctatggccttctgcacgttgtgggctcacctttcgcggcttggagaccaatacgggaattccacgacgtcacgccaagggcttgcttggtagggtacctcctcacgaaagtatgcatggtccccttgtgaacttctagtggtgttcgtaagcaactggccgttgaaacctgacacctgcaggacctaaatacagttcttgaaccaaaggtggagttcttgttccccctttggagctcgcaaagaagatagccttgcctggatccgtgctaccgaagggattaaccccaaggacctcgcgagcctaattggtcatttacctaagccatagaggattgcctaggtgtacccttcttgcgtcagggagcgttaccccggcgagcatgggctgtgacaagccgaaggggcctttggggatcttacacactgtttcagtgaggccaaggccttgggaccaaaggcccaaagtccggtggccgaagtgtgcactggaaacattggcttgatgcagcccaaggagaactggtcctttgatatgttcctgggatccctgttatcctacaagttaatgaaacagga

SEQ ID NO: 678427 - DNA, 901 bp, Homo sapiens
  misc_feature (901)..(901): n is a, c, g, or t
tggtattacacatttccatcccgggtctaatggtcatcggacttttatttggaagtactcggaccctccaccctcttattttatacagattgggagggcaattttgtgtccaaaaacctacagacaagtacttggagagatttccaatatatatatcgcgacttactgataatttttccatattcagaaggaaaacggggaatataacggttgggtgggggggtactcgggtaccaatttatagctaataagctacgggtggagagaatggtaccatatgcttgacaaatttggtgtggcatctggaagggaattcaccccatgatatcctcttaagaagtatcttaccttggtgtcctaaccccctttgggaggacagtggtggaccccctattttctcatcccgaagaaatattatctaaaccacctttcggggcgctggtaacaagcacatcctttaaatacctatgtccctcttgggctggtttggtacgacagagacctttttggattggaccgctgtgggccttgttttggtctcacaatttgtggaacgcagatttctggttaagtccccttgggtaggacatggcgtcggcaacgggagtaaaataacccaggttgtggtggacattggcccattttctgagggccttatggacacagtgggcggcaaccgggtcgcggcgaacttttaatcactggcaacaaggggagtgagttctccccggaccatctgcggggcaacacatcaatggagtgggcgggtggaaacctggtgaacggagccaagcctgcccccagtgggtcacacacacagttgtaggcctacaaccggtggcaaccgggggaccagccgcgctgctctggaaagaacacatcccccagtgggcagccaacn

SEQ ID NO: 678428 - DNA, 308 bp, Homo sapiens
accaccgactgcaagctcagctactcaggaggctgaggcaggagaactgcttgactctgtgaggcggaggtagcagtgagagctagatggcaccacttcactccagcctgggcaacagagcgagactcgcatctccaaaaaagaaagcttcgcggaatacccaagtgaagcacagttctatatatctacgcaaaacatcagaggtgattgcacagcagatgaattgagtggatatcaagatcagtgcaacacatctgaattccgcgaagcgtgatttcatggagagcagactaagagctgtattcaag

SEQ ID NO: 678429 - DNA, 999 bp, Homo sapiens
catctaggacggccttagtgccgtcagtatggcccataaaaagacgcacgcctacagtcgaatcgtaaacctccattccggcaggatcactgtcgcatatctcgagcgttgctttcaagagcaccggaccaatccgctcgatgaatggccctgtgatatgcaagcaacaatagcagcatatactctaccgaggtcgcatcataacttggtcgtccaaagcgatcgacttcatcgaaccatgtgtaccttagacgaaaagtcgaggaacaatgaggatctggcttccgtgatagtcatgtgtgccggctggctaatagtaagatccgtagccttcatggtatgagagcatattccctggactgaagacctaacgtcgttcatggtccaatgcagcgccctatggagcgaagattgttgctgactatgttcacttgggcgatgccgatgacaaaaatgctgccatggtaggtcattgagggaactagcatgcgttataagtctatgctgtgctttgcaatgactgacttatcacgactgtgtgagctattcttgaaaggcctgtctgactcatgcctgcgggaagctactgacctttgattcatttcattacttctgcaagaatagctgtatgcctcttgacctctgggtagagtcatgcggataaatggcttaacaataaggtaagaaatagccagtattagtcatagcttgacagccttcttgtcttaatcacaggataggtattcaggactccagctccgttgtagcaaccggtttgagaggactgtatctacgcgtgggaccgaaagaattacgcggggtaagggtgtccaccgccactgttgaataaccttagtaaacggatttgtgtgccagaattgaggttcacgaaaccatctttggggatgagaaacctttgcgggtagacaggatctacatgcaaacccagcaaaagtcatacctcaaacgtggagaaggacactaatcataaacgaagcc

SEQ ID NO: 678430 - DNA, 981 bp, Homo sapiens
gctgtggagcggacgctgtgtcccctttctgctgtcaggaatctctcatcagagctgctgatggaatcggtgcccggagaccctgccccggcccggtccacagttctccccatgagaagccggactctattgggagcgggatcctgggcggagcctgtagccgagcctcgagagccagatccctgaaaccgatgaaccatcacatgccatggggacgcccctggagagcagccatgctccgaggagcgaggccgaccgccgcgaccagagcagcccatgagcggacacggtcaatctgtacccatgcacagtggccacgtgttgaatgcggttatgcatgactggcaacacatgcgatggactccctgctggcaacgggatcacccaagggcctatacagtcctgcgtaccagatctacgcgacaatccctcagcgggacccaactctacctattcggcgtcgatggagccagggaaatgaatgcatgccctgacaagcacgtgtggtcatacaagcttggtgccatacgtccgggaggtgtcaacagtatgacccacggacaggcccacgaaatatccatcaagtggacgtcgactgacttcgtccaaggtcttggcgtacctcaacgtatccgtgcagcacagtgaggccatgccgagcccaaatttagctcaaaactgaaaattggcccagatggcctaagaaggccgatatgggaaactgtacgcgtgggtctcccgcaaacaagcaccagaccgggcaaacggaacacaacaccatggggcaagggcaccctgacaatgggaggacgcatcccctgcaggaagcgccgtcgttgcgacatccaacgcgacagaaacaagcgggaccaccagacagcgcacgagcgaccgaagacggcaaccgacgcaaagaagacgccaggggagacatcaccaaatgaccggagaagggcagccaccaggagcggccaccgccat

SEQ ID NO: 678431 - DNA, 1139 bp, Homo sapiens
cagggtacttgcaggtgcaagagttgcacctggtctaggaagctgcagagaaaagaactctgtgggagacagacactgcccctgtgagtcgcagcagccaccctccgaccatgtccccggtgacggggggcggacttcgatggtgcaacttgccgcggactgcctgggcttagccagcgatgctactggcgctccctgtggagcccggaattgcacggctgcaggcccggctggggggctatcgtctatgtcttcttggaggcgccagacgaatcggggtctcgtttaggctggaagagcccagtgttggtggcttcaggtggctgctgccgccgccgccgccgccgccgactgctagtgcggtttccgcgcgctggtgcgaacgagaagagacacgcgaggcggggagacctccaaggcagcgagggcatcggacatgtgtcagcacatctggggcgcacatccgtcgagcccgaggggagatttgccggaacaattcaaactgctggatatttgatcttgggggtgactgtccctggccggcttgtcgaggtgggagtgcgagtgtgcactcgactcggaagtgtgtgcgagtgtgtatgtagtgtgtgccagagtcgggctccccccttaccccacgttaacccgtcgagtgatgcacttggcactgacaatcagacggaatggcacatagtctgtggaggtgcttttaactgtcttcaagacaagtatcatccgtctgcatattcaggtccaacagaagacccacacagaaattccatgagtgctggggcgcataacaggcacgtggccagggaagactatgtccagaccacatacatgggggacggggagaccacaaatagaaccgatgccccggtagccaacggcgcaccagcaccaaaacacacggcacagcgaaacgcagcctagggagcacacgagaaactacacacgggccacacagagacacggggacaggatccacgtgcaacgaaacccacaccgcgaacagcaacaaaaggagcagaaaaaacaggggacacagatgcgagcaaccgcagccacaagaccaagcacagaccgaagcgacgcaagccgccagaccaccacacaacaccactagcacccacagcacc

SEQ ID NO: 678432 - DNA, 320 bp, Homo sapiens
gagcatagtcttctgaaactatctttattgacaacttccatttaagaaataccgactactcaccaacaaaatgtttacatatgcacgcacatggagggatcatgtctaggatactcaaaccaagacatgagcacatcatgtacaaattcattgtaaacttacaaaataagtttcaaaatttctgcaagccctcactatacaaactcagaatcctctttattttagagacagggctctggctctggcacccagactggagtacagaggcacaatctcagcccactgcaacctccgtctcctgggctcagacgaacggagcg

SEQ ID NO: 678433 - DNA, 788 bp, Homo sapiens
tgtctcaaaaactagcagcctgccttatgtggaacttacattctacgcagcctatgaccgagaacacgttacctagtgatagaaagacagacatattggctatcgaggaaagggtacacgccaccttctagactgggctggctcagggcccggcctccctctgaccgacgactatggcaacggtacagggaagacgcccaaacccccttgttggcagcagcctgacgcgcaggacgcactaactagagctaagaagagaggacactgagccccgtgggcccacagggcaccccatgccgcttctaccgaccacaccgcaacgcgcgacccaagactgcaggccccgcccagaagcggcagggcagctagcccccggcagcaccacacagaacctggagcccatggaacgcggcgcaacgcccagaggggctaggcggccccctggcaaacgcaccaacccaccaacgggaccgcacgccccaggccctaacgacgggaacgaaccgcacactcgcctaacgcaagaccactgctaggcgacctgcatctccgagccgcggcggaccccgctccagacgatgtccccctagagcattttggtataacgcggcagccgctattcagcaaatcccccactgttgcgcagcgccacatcgtgtccccccttagtctccccttagtacaccccaattgagtagcccgtaaccccgatcccctgcacaacaacaccacccactaacacatacccacatctaaagagccacaccaagttaccacctgtgcgcacc

SEQ ID NO: 678434 - DNA, 787 bp, Homo sapiens
ctttccaaaaaacacatcatttgaatcaacacaacacccacagctaattattagcatcatccctctactattttttaaccaaatcaacaacaaactatttagctgttccccaaccttttcctccgacccctaacaaccccctcctaatactaactaccatgaatcctggaccctcacaactcatggaaagccaacgccacttatccagtgaaccactatcacgacaaaaactctacctctctatactaatcatccctacaacatcgtccattaattataacattcacagccacagaactactcatatttgtatatcttcttcgaaagcacaattatacccacccttggaatatcatcaaccgactgaggcaaacagaacagaacgcactgaacgcaggccacatacttgcctatttctagcagacctaggtaggactcccttcccaactaaatacattcgcactaactatacacaagtccaaaaccaaccctaggatcaactaaacattctaactaactcaccctcacatggccaagaaacatagtcacagagctacactgagacccaaacaaaattaaatagtgcagtaggcttaccaaccatcagcttttcatacgttcacagataacctcttttcacgggagatcccactatatgaatcccgtaatggagccacgtcagaagagcccacactacgcaggggatcaataagtacattggacgacggagtactggaagactagggggtatggtataaataaggcgtacaaaacattctgaaaaaca

SEQ ID NO: 678435 - DNA, 416 bp, Homo sapiens
taatgaccctaggaaattagggaagccaagtgatcgtaagccataaatgaagttcataagaataaatctgggaaagagtaactatctatatcacttcaagatagagaagaactatgtaaaggtgagtgttttgtagactggcggttcagtgacagcaaatgtgttacctttgggtttccctggttatgtgcttggtgatgaagagtgaggctggcccagggaaagttttgtgacactagaggactgcttgacctataccaatcttactgcttttaaaatagaaacaagtgggggctatcctaaatgaccagcagcagaatgtttaaataaactaaggcaaaattgctgatacataaagtattatgcagccatccccaaatttgatttcccaaatcaaatataagaaccgattttaa

SEQ ID NO: 678436 - DNA, 102 bp, Homo sapiens
  misc_feature (27)..(27): n is a, c, g, or t
  misc_feature (59)..(59): n is a, c, g, or t
  misc_feature (88)..(88): n is a, c, g, or t
  misc_feature (95)..(95): n is a, c, g, or t
gatctcgaaccctgtctagaaggaatntatttgttgctaaatgttcactttttatagtnatgtcctgtattctaaacagtaaaggggntttattnctatcac

SEQ ID NO: 678437 - DNA, 470 bp, Homo sapiens
tcggaataatattggatggagcacgggtgatatctacagagatctcaagtgaatgccccgtgactgactgaccgaatgaatgaatataaaaaactaagtgagtgtattttaaacacagattttagatcaggcatggaggcttgtgcctacaatcacaatgacagagtcagactgtgtcttaaacaaaacaaaacagattttggcagagagaagcgatctcacaccaagggatggtgagaccctggagaagaggccaagccaaactaacagcatgtgactgtgctttttgagagtccctcagaccagtggcagctaccatggcacagctgtcgtacggtgttaaggctctggcttacccactgccaacagaaatgggcgaagaaagaggcaggaaggacatgggtagtgcagtagtgagtacacacagtgagaactggatctagatggaaaagcaattccgtactccccag

SEQ ID NO: 678438 - DNA, 507 bp, Homo sapiens
ttatcacttcttcacttcacttctacaagataatgtcttgagattatccagacatcaactggctacaatcttctatctcctcctgaacagatacaatatgatctcgaagttctttaatatgctcctgacactgtactgagacacaagtctcggaggcaccgtctgtgtctagtagccgaatcttcatcatcaatgtttatctcttcagttattacatctggtcccagcttggccatgtacaacatgctgatactattcaaagtattataaatcttcatatcagctttgtagccaaagcttcagcacctttctcgacaagtcttctctatttcccagactggttctgcatgacattaccttcctctatgaccatgtgagcacatttcctgaaattcttcccgctatctcccggcttcctctcgtacttgcctcattttgtcacacttctcctttgttatctggttctctgctctcaggtctccatcttcgcctattgtggctcggggc

SEQ ID NO: 678439 - DNA, 416 bp, Homo sapiens
tgagctgcacagatgcaaacaccttccaaacacagtcacgaggccttaggaacgtctccagagcttccgtcatcatccgggtctcctcgtcagctcctgcctggtgagggctctgccagaggacagccctgagtgccgccatcaaggctgaggaggccgcccccacgtgccacccacgaagctgcctgcaggccgggaggcttctcttttggcttcagccacatgtgaaggagaacctgtcaagctccggctgatgaagtcttcagaagggctcagagtcaagcggcagaactcctggtgccatctgcttaattacaggcgcgggttttcctcggtgttttgatctataaatacgaaaaataagaacagcaccggtgctgaatctatgtcatcccatgaatggatgaactggttga

SEQ ID NO: 678440 - DNA, 1228 bp, Homo sapiens
gtggttgctggagtagccgctcggtggccgttacaacttgctttcagtctctccgagccatcggatttccttcactcatcgcaggcaccctacatacattgcatcggagcgagcggcccacacgaggtcgttgggagacggattcaagctgaggggtgacatgaacgtcctggatagctcctgtcccctaggtagtccagagctgattcacactctgatactcaatttagcagacgctaactctatatgcaagaatgactggtggggcaggtagagtcatgggctggggaccgtggccctctgtttcactgttcatacttgccacaatagccgcgctcgtacaagcgccggggatgcttgggagcacggggtaaccaatcactactacaattacttaaaagcaaccaacctgggttcaaccccctactataccatgccccttcattcttctttgcgctcccatggtcgaagagtttgggttgcacatctggggatgttcgcttggacttccggttgggatgccatttggggcaccggggcgttgcataacacttgcacctgggagggattaaaggaaacacaggcctaggaattggagtctggaacattcaaaaatcacaaaggtccttcaaaatcgaaacaggcggggccgaaacccaatacctttgtgaggcacttgtacttttcaacatggttatgtgttgcactcataatggttgttatacaattttagcgaggtcccttacaaggcgtggcgaactaggtataatcaccaacgaggttttcccttgggagcattgccgatggggggcccgtgctaaagggggagaattcctcctccgttgctttgtaaggagttgggcacagggaccccataaggttggtgcatccccccaatggggttgttccttggggaggcctcatcggcggaagaacctatttacttgggcgccgtgtcccccttataccccattctccgggctgtgggaattcctgttggccccacaagagggctgtgtccgtttgggaggtggaccaatcacttattttccccaagacaaaggaccccactcagggggaaagaagagtcttgtacttgggacaacatggggggacccaaaggttcactcaagggacttggaacacacattgtgggatatcacaccctttatctctcaatccaaagaacaaacaccttaggaagggttcaacaaaacaccgttggaac

SEQ ID NO: 678441 - DNA, 293 bp, Homo sapiens
cctttgcaaactcattctcaactccttagactcagtcaagtcccccagttacccccttccatgggactatatatcattccttcagagcccttaacccagttatttcctatggatttggccagtcctttgaataatggtcctagtttccttggatggaaagttccccaaggtcagtggccctttctatttgggttccccaatgggttcccagggcccagaaacaatgcctagcataaagcagctgttttgtaaatacttgttcaatgaatgaattaatggccaaagaacctcca

SEQ ID NO: 678442 - DNA, 326 bp, Homo sapiens
ataatgggtggggggtggtagacgggggtcggggtagaggagactgtgtgtaggagatgatcgagagtaccgcgtatctggaacttagcctacggagtatctcagagccggcttggctccgaacctatccggggattccagtggtagcacgggcatgacacccacagcatcctcgacagcctcgtggctcgtatgggcagtaactcccggctctgcatggtctctctgagtctcttcaggaccctcctgaacctcagctgtgaggatgtcctgctgcagctggttctcaggtatctggttccatgtaaccacgttatgctgagcca

SEQ ID NO: 678443 - DNA, 442 bp, Homo sapiens
cttagcctaactaagcatctatagacactagaatcagccaaatcatagctgaaatagagccaggccatacacataactataaatgatcaataagaccttctgctactggccattcatgtgggcatcacaaagacctgggatatatatcccattaacacttctagatattatccagagagaacttcccaaactagcaagacaagccaacatatcaaattcaggaaatatagagaaacgccacaaagatacttctcgagaagagcaaacccaaagccacataatctatcaggattcaccaaaggttgaaatgaaggacaaaacatgtaacggggcagccagagggaaaaggtcaggttacccacaatctgccgccgtggaggtacctggttagctggctttggcagagaacgcaaatcaggcaccaaactattcaacatctctg

SEQ ID NO: 678444 - DNA, 604 bp, Homo sapiens
gaaaaactacactgtcttgttagcagcatatgtaaatattagatctttctgagtttctcttctcagatctgccaatttcttggggcaaatgtatcctgcagtagcctcaatttaccctttgaaatgagggattaaaggttttagacattctttgggttatctgaaacacaattctttttggatcagtaatgttttatatatgtccactttatgatgtctaaaattttattccccctatgtattagtcttcctgtggctgctataacaaattaccacagacttggctggtttacaaacacaggcaggaacttctattcttctcaacaatttctggagacccagcaaagtctgccaactcaacgatacttgaggcccactctggacggctctagcgagacgagactgatacctttgccatctttcagccttctgacttactggtcagcaattccttggcactatctctctgtactgtccttcaccactgtccttctctttcgagatacttgcatcagaactcttccctctacctgtgtattataacggatacatatgcatcgccactctaagaacccacttggatgaacaggatagatattctcca

SEQ ID NO: 678445 - DNA, 372 bp, Homo sapiens
actacatacttccggggcaatttacaaaagaaagaggtttaatggacttacatttccatatgactagggaggcctcacaatcgtggcagaaggcaaggaggagaaagtcatgtcttacatggatggcagcaggcaaagagagagattgggcagggaaactctgccttataaagccatcagtctcatgagacttattcacgtgagatttattcactatcatgagaacgccatgggaaagacctgccgccatgattcagttacctcccactgggtccctcccacaacatgtgggaattcaacatgagatttgggtggggacaaagccaaaccatatcagtcatcttcacctatatatatacacatgcaggttct

SEQ ID NO: 678446 - DNA, 296 bp, Homo sapiens
  misc_feature (2)..(2): n is a, c, g, or t
  misc_feature (8)..(8): n is a, c, g, or t
antccgtnacagtagaatactggtacatgagaagggagaggccatcactcaactgacgttcgcattgccctcctgggtcgtcttctctcacgttgcctagctttttgttttcctttagtggatgcattgcacagcaatgtgttttctggccaagatgctacataaatcaatgcaagttcccgaaaagtcttgttgcatttcttgtagagcaatatgagaatctgagagtgccttttctcttaacatgtggtacggacttaatcgcggtggatctctctagtacgtcgatcctgaca

SEQ ID NO: 678447 - DNA, 90 bp, Homo sapiens
aagacagcagcatatatctctgcagcgttaaaacttcaaggacaggaacctacgagcagtacttcgggccgggcaccaggctcacggtca

SEQ ID NO: 678448 - DNA, 1017 bp, Homo sapiens
gcaggtctcttgggcctgtgtgctagacgattagagctcatggagctactgtgtcataccatgaggtgaggtcaaccagaccgtatgacgcagggccatcactgtcactagtgacgtgtgagtactgagtgtgtgagtgtgtgcatggtgggtgatcagatcccagtagctcctgagaaaggatgtctcgagaggaactgacatctctcgaaccattactccgtctagtccccattatggactctcaggcatagactggtgcggacgacagttgggactgagtctttgttattgtagcctgcacgcccgactggctgaacctcatggatgagctatcgccacatgatagcacacgcttagtaagaatccctctatgtcctataaagaaagatcgactctacagttagcctcctgactgtcggacaggcgttccagacacggctcgtgaagagtacatgtgatgttcgtgagacgcacgtggaggtgggcttcgtggggtggggcactggcgcaatcaactcgcgtgtgcaatcaaggcaagccactgggaaggtctagcacatgtattagggagtcagataggttaaacatccatgtagtcgaggtatggaggtatatagcctccgaggaagagacgatttcgaagcgtagggacctcccgagttaggactggtgagggatccatcggttggcagcacgcgcaaaggaaccgctgtgtcacgcctacgcttgcgtcttttgcgtctgtcgagtcccactgttggccgacgcccgtactttcccatggaataattccccaatacaagacctggagaagtgccgaggggggccactggccgtggggcacgacacctagcagggtccccaaacgccgggcagctgtcatggacatccttacttcaacggagcaatcgacgccatgtgccaccggcacctgacaaggggctgggcagggggggccgatctcccaaaaaaccgagtcccctgaaaaaaagccacgggaaaaaaagctggccc

SEQ ID NO: 678449 - DNA, 106 bp, Homo sapiens
gaggatcctgaaggtcgcaggaccctttgggctagtaagaccagaggtataaggccgaatagggtcaagaacttgatagtaaggagaacgatttactagttaccaa

SEQ ID NO: 678450 - DNA, 155 bp, Homo sapiens
  misc_feature (54)..(54): n is a, c, g, or t
  misc_feature (131)..(131): n is a, c, g, or t
ggctaccccaactgttgcatcagtaccccccatttatcatcaacgggtacaaancgagttcggccttgtctgtggagacggattacacctttcccattgctgaaaaggtcaaggccttcttggctgatccnatctgcctttgtggctgctgcccc

SEQ ID NO: 678451 - DNA, 602 bp, Homo sapiens
ggatatttggagcgctttgaggcctatggtggaataggaaatatctttatgtaaaaactacacggaagcattctgagaaacttctttgtgatgtgtgcattcaactcacagagttgaacctttcttttgattgagtagttctgaaacactctctttgtagaatctgcaagtggatatttggagggctttgaggcctattttggaaaacgaaaatatcttcacataaaatctacacagaatcattctgagaaactttttttgtgatgtgtgcattcatctcacagagttgtaccttttttttgattgagcagtattgaaacactggtgttggaaaatctgcaagttcatattttgaacgctttgacgcctattgtggaaaagggaataacttaagaccacacagaagcatttctgagaaaattctttggggtggtgtgcattcaacctacagatgggaaataaactttttgatgagcaagtttgaagctccttttttgaagtatctgcaggtgtatgtttggaaccatttgatgccctatgggggaaaaggaatgcccttcccatgctagacagaagttttggccccttggatggggggttcg

SEQ ID NO: 678452 - DNA, 179 bp, Homo sapiens
gctacattttagtcctctacttcatggctggaggaggcatacaggataacaaagaaaaaaaaaattagaaaaaaataagaaagtggttcccttttatcgaggaagaccacaggggtgctgtagggcagcacattgtgctgggcaccaggccagttagtgcaccaggaaagaagaagcac

SEQ ID NO: 678453 - DNA, 523 bp, Homo sapiens
  misc_feature (89)..(89): n is a, c, g, or t
ttttgtgcccccgtcgccgcgggaccccccccccctgtttttgccccctataaaaccccggggcgtcctacccccgggtttttttgtgnggcgggggggtatatttttttccccgggggcactgtttccccttgggccctttttggggcccttataacacagtttttttcaaaaaaccgggtggggccgggcccggatttcccgggttttttttaccccccgggccccccttgggggtttaggtttttgggggtttccaaaaaccgggggggccccggggggcgggccaaaaaatttttccccccctgggggggccggggtttttttggggccccccccccgggtcccggtggggggcccccccggggttcttttttttgggggggaaaacccccttttttccccccccccgggccccccggggggcccccctttttttttccccccggggttttttttttgggggggtgggttttggggcccaccccctggggtcccctttaaggggcccctttttttttta

SEQ ID NO: 678454 - DNA, 390 bp, Homo sapiens
atccagaccatccaggcctttccagaccactcaggcagatccaggccatccatgcctttccggaccacccaggcccttcccgaccatccaggcctatccagaccatccatgcctttccggaccacccaggctaatccaggctgatccaggccacccatgcctttccggaccactcaggcagatccaggccatccatgcctttccagaccacccaggctgatccaggctgatccaggccacccatgcctttccagacaaaccagacccttgcagaccatctgcccgatccaggccatccaggccgaatgtctcatccctggttgatataatatgtacgaagaaaaaggaggaagggagacctacagattcaataagacttaaaagacctta

SEQ ID NO: 678455 - DNA, 1413 bp, Homo sapiens
ttttttatataggctctagagggggtagagggggtgctatagggtaaatacgaggccctatttcaaaaatttttaggggaattaattctaggacgcatgggcataacaactgttggttggcctccaccagaattatcaaagcattgaccgtcagtatacccccgagtcgtgtcagcggtgcaaaggtggattggagtattaacacagatccgggaaattgcaatcatgtaattaaacagcctatcaagtggtgggcgcaccagcctccatcgcatttgccaagaaccgtctttgctgcaatgtcaatatattcatcccacaattggagggctcccacaactcagggcagatcactcactctgcattttgctccacacgctccacaggcagtatcagccagagttcgccctgtgtgtattactatagggcacatctccggtgaggagaaaagttcatgttcagaacagtatgtcggaacaacaatataagacatcccgcccagacagactagcgagatgatcactatcagtataagaggaatacatcacaaaataacacaaattgatgcagagtgaggcacaaacatgtagacataaccgaacactgcgtaatcaacagaggaacggaggacacatcgagataaacacaccaaatagacatcagtgtgcatcatgtagtcaacaaggagacaatgaccgattcagggccattggacacagagcggacgcaagaagagccacctacgggccatggccataggcggaggaaccggagaaagacgaaacagacaggggatcaacatattcaccgcggtcgaccgatcttggacccacggtccaggcccatcaaagcaagaataacgtgatgagagacggatgtacagagaagcgcggagcaccacaaagggccatgaggacacggagcagcaggggcacacgtgacgacagcgggcggatacgaccacgacagggagacgaaggccgcagcacaataatagatggaaagggtgaagcaatagacaaagctacgaagagcaaaagcagaaaggacgacagaagagatcaacaaggggaggcacagacaaagacggaacgaacatacagggagaccgggacacacgtaggaggacgtcaggaaggagaaggagcgcacgcagcgccgcccacagcgggcaggggcacccaccggcacgagcggacgagccagaacgagagcacgatgccaggggagcacataggggggcaaagcgcacgcgatcaggaccaggcatacacagaggagaaacgaaagagggaagacgggcagcgacgcggggcgacgcaacatcaggggaggacggagagaagcaacagactagaaagagggcaggaccgccgtagcagagaaagacgatgagcagggcggcccgcgcac

SEQ ID NO: 678456 - DNA, 875 bp, Homo sapiens
cgttgtggacccccccccggggcctgcgcggtccccctgcctgtttgcctgggtccttgccctcccctaattctccgcgcccccccgtttggctccaagccgcgtcctccataggggctgtcgaccccccgggcgtttctctccgcgtggcgccccagtcttatggccgccccccccgaggagtgctcccacagccttgtcggcacccctgtgggatctccccctgatgtcttcaccgccccctggggtttctccccccccctcctgtggagcgccccgtctgctcacgctatgggggtttctctctccccctcccgcgtggtgggtgctccttaaaaaaaacccctatcttccccccccttgtcccccccaatggtccctcttcttttctaatgccctcggtaaaccccggaaactctccctcctcccccgggcgacgcaccaaccccagtccttaaaaccgcccccattctcgcatcgagaaacaaatttttctcagagagcccacaaacgagtctttttcgcatgcacgcaacacagcctgtctcctcacaaacgcctatgacactctctccccactagaatgaacacccacttttcggcgcacaccggcgaggcacgaccatatctttctccctcgatttgacaactctccccctgcggggaatccccgcggcaaaagtccttgcattctcacccgacggatgaaatctccttgcttggcagaacccacccctcatccctgccactatcacagactcgcttttcttctcaccaagaacccgctctcctcctctctattggttctagccctccccagagatgcgccaaacagcccaaacccttaaaattaaacttccctccccaaacataac

SEQ ID NO: 678457 - DNA, 742 bp, Homo sapiens
  misc_feature (712)..(714): n is a, c, g, or t
  misc_feature (717)..(717): n is a, c, g, or t
  misc_feature (719)..(719): n is a, c, g, or t
  misc_feature (721)..(723): n is a, c, g, or t
  misc_feature (725)..(727): n is a, c, g, or t
  misc_feature (731)..(731): n is a, c, g, or t
  misc_feature (733)..(733): n is a, c, g, or t
  misc_feature (735)..(736): n is a, c, g, or t
gctttttttctttgctgcgtctactgcgagaatgaagactattctcagcaatcagactgtcgacattccagaaaatgtcgacattactctgaagggacgcacagttatcgtgaagggccccagaggaaccctgcggagggacttcaatcacatcaatgtagaactcagccttcttggaaagaaaaaaaagaggctccgggttgacaaatggtggggtaacagaaaggaactggctaccgttcggactatttgtagtcatgtacagaacatgatcaagggtgttacactgggcttccgttacaagatgaggtctgtgtatgctcacttccccatcaacgttgttatccaggagaatgggtctcttgttgaaatccgaaatttcttgggtgaaaaatacatccgcagggttcggatgagaccaggtgttgcttgttcagtatctcaagcccagaaagatgaattaatccttgaaggaaatgacattgagcttgtttcaaattcagcggctttgattcagcaagccacaacagttaaaaacaaggatatcaggaaatttttggatggtatctatgtctctgaaaaaggaactgttcagcaggctgatgaataagatctaagagttacctggctacagaaagaagatgccagatgacccttaagacctacttgtgatatttaaatgatgccataaaagacctattgatttgggaannnaanantnnncnnntggntnanncataag

SEQ ID NO: 678458 - DNA, 988 bp, Homo sapiens
  misc_feature (860)..(860): n is a, c, g, or t
  misc_feature (870)..(870): n is a, c, g, or t
  misc_feature (877)..(877): n is a, c, g, or t
  misc_feature (880)..(881): n is a, c, g, or t
  misc_feature (886)..(886): n is a, c, g, or t
  misc_feature (898)..(898): n is a, c, g, or t
gctttttttctttgctgcgtctactgcgagaatgaagactattctcagcaatcagactgtcgacattccagaaaatgtcgacattactctgaagggacgcacagttatcgtgaagggccccagaggaaccctgcggagggacttcaatcacatcaatgtagaactcagccttcttggaaagaaaaaaaagaggctccgggttgacaaatggtggggtaacagaaaggaactggctaccgttcggactatttgtagtcatgtacagaacatgatcaagggtgttacactgggcttccgttacaagatgaggtctgtgtatgctcacttccccatcaacgttgttatccaggagaatgggtctcttgttgacaaatggtggggtaacagaaaggaactggctaccgttcggactatttgtagtcatgtacagaacatgatcaagggtgttacactgggcttccgttacaagatgaggtctgtgtatgctcacttccccatcaacgttgttatccaggagaatgggtctcttgttgaaatccgaaatttcttgggtgaaaaatacatccgcagggttcggatgagaccaggtgttgcttgttcagtatctcaagcccagaaagatgaattaatccttgaaggaaatgacattgagcttgtttcaaattcagcggctttgattcagcaagccacaacagttaaaaacaaggatatcaggaaatttttggatggtatctatgtctctgaaaaaggaactgttcagcaggctgatgaataagatctaagagttacctggctacagaaagaagatgccagatgacccttaagacctacttgtgatatttaaatgattgcaaaaaganactatgattnggacttnttnntaaanaaaatacagaanaaaaagaaaaaatagggagattatgagagaggaacagagaaaaggaatgagacagtagagagcatttgaaatgtaaaagcggacataaca

SEQ ID NO: 678459 - DNA, 1318 bp, Homo sapiens
  misc_feature (449)..(449): n is a, c, g, or t
  misc_feature (463)..(463): n is a, c, g, or t
  misc_feature (753)..(753): n is a, c, g, or t
gctttttttctttgctgcgtctactgcgagaatgaagactattctcagcaatcagactgtcgacattccagaaaatgtcgacattactctgaagggacgcacagttatcgtgaagggccccagaggaaccctgcggagggacttcaatcacatcaatgtagaactcagccttcttggaaagaaaaaaaagaggctccgggtttgacaaatgtgggggggttacacagaaagaggacacgtggctcaccggtctgcggaactatttgtggtagctcctgtgttacagaacaccagtgcactcagaggggtgtttaccccgtgggccttctcgcggttcacagagaagtgaagcgctcgtggtgttattggcctcacttctcccccaagtctaagcgtgtgtgtttactcccgaggagagaaaagtggcgactcctctgtggggtgagaanatctcggagaaaanattttctgtgtgggggtgtgacacaaaatttaacatctcgcgaagaggggggtctcgggatgtgaagaccccaggcgtgtgtttgtggcttgtgtgtctcagagataactctctcaaaggcccccagagaaaagagcatttgaaatctattaatctccctgtttggaaagcgggacacaatctcgacccactttgtgaacgactgtgtgggtttctccacaaaatttcttcaacgacggcgccttgtgtggactttccaagaggcaaaaacgcccccaaccaaaacacgngtctttaacaacacacccaacaggcggagattctctccagggggaacaacacttcttcgcgggagactgggggaaattcctaaataggtccctccctcgaacacaccacgggggacatctgtggtgctccaacgccaaggcggcttgagaattagaaaattacaagcggattccctcaaagagaatgcttctcaccccctggggggctcaacacagggaaacagggacaagttatttcggccatgtaaattgggacccttttttaaaaagagaacccctaaacccttggggctggggactcacttctccaacagctgcgccttcggccagtctaaaaaagagagaccccttatttttcggcgtctctgtgcggcgacaaaacaccaatcatcatcagctagcccaacagacaccaatcaaaagaacacagctcgccgagaggagacactctaattatagacgcgagggggcggccgcggcgagaaaaacaacgtggctcgcatctccaacacactgtccgcgccgacgggggggcagcacacaagcgtgatgtttggctgccggg

SEQ ID NO: 678460 - DNA, 659 bp, Homo sapiens
  misc_feature (25)..(25): n is a, c, g, or t
  misc_feature (108)..(108): n is a, c, g, or t
  misc_feature (150)..(150): n is a, c, g, or t
  misc_feature (157)..(157): n is a, c, g, or t
  misc_feature (191)..(192): n is a, c, g, or t
  misc_feature (199)..(199): n is a, c, g, or t
  misc_feature (209)..(209): n is a, c, g, or t
  misc_feature (236)..(236): n is a, c, g, or t
  misc_feature (238)..(238): n is a, c, g, or t
  misc_feature (253)..(253): n is a, c, g, or t
  misc_feature (272)..(273): n is a, c, g, or t
  misc_feature (291)..(291): n is a, c, g, or t
  misc_feature (301)..(304): n is a, c, g, or t
  misc_feature (308)..(308): n is a, c, g, or t
  misc_feature (310)..(311): n is a, c, g, or t
  misc_feature (318)..(319): n is a, c, g, or t
  misc_feature (324)..(324): n is a, c, g, or t
  misc_feature (326)..(326): n is a, c, g, or t
  misc_feature (330)..(331): n is a, c, g, or t
  misc_feature (339)..(339): n is a, c, g, or t
  misc_feature (342)..(342): n is a, c, g, or t
  misc_feature (352)..(352): n is a, c, g, or t
  misc_feature (355)..(355): n is a, c, g, or t
  misc_feature (358)..(358): n is a, c, g, or t
  misc_feature (361)..(361): n is a, c, g, or t
  misc_feature (383)..(383): n is a, c, g, or t
  misc_feature (394)..(394): n is a, c, g, or t
  misc_feature (397)..(398): n is a, c, g, or t
  misc_feature (401)..(401): n is a, c, g, or t
  misc_feature (404)..(404): n is a, c, g, or t
  misc_feature (411)..(411): n is a, c, g, or t
  misc_feature (419)..(420): n is a, c, g, or t
  misc_feature (422)..(422): n is a, c, g, or t
  misc_feature (426)..(426): n is a, c, g, or t
  misc_feature (429)..(429): n is a, c, g, or t
  misc_feature (435)..(435): n is a, c, g, or t
  misc_feature (438)..(438): n is a, c, g, or t
  misc_feature (441)..(441): n is a, c, g, or t
  misc_feature (444)..(444): n is a, c, g, or t
  misc_feature (475)..(475): n is a, c, g, or t
  misc_feature (636)..(636): n is a, c, g, or t
cccgcggcccccacgtacccaagtnaggaggctctcgcacagctccgcccgctccagcgacgctacgctgaacatcttccccgccgcggccaggcagcgcctaccgcntggccagacaccgccgccgctctgtcgggggatccgggggcncgcgcantgactcggcctcaggcccgcatgctcctcggatnnggccgcngactctcgcncagcgctggcagcggctccgcaccgtnanccccagcgcccctcnttctcctttcactcggganngcgcgcaacagcgccgancttcggaaannnncgcngnnccgcgtnnacgcncncggnngcacaaanagntaataaaaanagnagnagnaatggatggagcagaggaagangagacaatganaannctngcncccaggnagaaaagnncngcancgnagaagnagnagnagnagcagcagcagctgcagcagggcgcgcacangcaaacagttcgctgcgtgtcgaggcgagcacgcgctccgccctggaggctgcggcgacgggtcctcctccgccgtccggtcgcgccctcgcggaagctcggcagtgcgcgtgcgccgcacccgcactccaaattagaaaggggacgtctagtgggttgcncgggaggggtggcgggagcggtc

SEQ ID NO: 678461 - DNA, 804 bp, Homo sapiens
tcgcactctgttcttccgccgctccgtcgtcgcgtttctctgccggtcgcaatggaatgaagagatcgccgcgctggtcattgacaagtggactccggacatgtgcaacagtatggtattggctggggacgacgctccccgagccgtgtttccttccatcgtcgggcgccccagaacaccagtggcgtcatggtgggcatgggccagaatggactccgtacgatgggcgacgagggcccagagcaggcgtggcagtcctgaccctgaagctagcccagttgaggcatggtagtcggtcactcaacgtgggacgacattggagaagactcgtggcatccacaactgtcttacaagcgagctgcgccgtgggcccggaggagcacgcgcagttgtctgttgaacgtaggccctccctgaacccacagaggcgcaatcatgagagaatgatgactcagattgagtgttgtgaggaccattcaacagacccgggcctagtgtaacgtggccatccaggcctgtgctgtctcctcgtacgcctctgggcgccacccacgtggcattgtcatggactctggagactggtgtcacccacacggggcccatctacgagggctacgccctcccccaggccatcctgcgtctggacctggcgggccgggacctgaccgactacctcagttgaagatcctcactgatgtgagggtacagttcaaccaaccacgggcgatgcgggaaatcgtgcgcgacatcaaggagaagctgtgctacgtggcctgacttcgagctggcgatgggcacgcgatc

SEQ ID NO: 678462 - DNA, 344 bp, Homo sapiens
tgtttgggtgggggggggggggggcccacgggccgggaatccccggcccggggggtggtgggggggggaaaatgggcccgcccgcccccccccccccccccccttgggggggaaaccccccccggttttttttttttaaattttctttccgggggggggggcccttgggcccaaaagaaaccctgaaaaatttttgggttgggggttgggaagcccgggtcccccggtttggttcctggggggagggccccccggggtcccccccgaaaccccccctttttggggtttggggccctttttaaggggggcccggggggggccaataagggggggggggattccca

SEQ ID NO: 678463 - DNA, 122 bp, Homo sapiens
ctgagtgatctagaggatccctaaaagccggtggaattgtgatgatgatcacgcctcagaagggtaagatatcttaatgcatgtctcagtgctttgtgcaggtagctgaggaatctttcctg

SEQ ID NO: 678464 - DNA, 234 bp, Homo sapiens
gatacttccagcaggacacgtacggggcgactaccaggaaagcgctgctgtacctgtgtggtggagatgacgtgaagcccgacacggcgcggagcgtccagaaagggtgctcaccaggcttccagctaacaggtctagaaagaccagctggcgaataacagtccccggggccatcccggtgagggtgacgttagcattacccccaacctcattttagtggccgaagctggatca

SEQ ID NO: 678465 - DNA, 1299 bp, Homo sapiens
tttaggaacacacaaagtttgtgtcaccaccccaaaaaagtacactcacaggtctggtgtggttaaacacccgttgtccccgggggagaatttctccccccccggggggataaatttcgtgttgcggagaaacctccccaaggggctggtgtttatactccctcacagtggtagtctcactcagatgtccatgaaccccgtggtggggtgtgtggcgccccctattcagtggggtcggttcactctgggggaaaagcctggtttaaccacacagagcgtttttgtcgaccaaaagggggggcacaccccgcatcaaagcgtttttgaagctttcgcccttaagccacaaggagaaattggggtgtgttctgcttgcgacagacttttggggcccccccttggccccgtgtttctcctctctgggctgttgttttctcttggagaccccccccctttggtcgcggcgactcacgaactggtgtcaacaccccagggtgaatcgtattttatacccccccacagaagagttgtgaagcccacatattgttcgggggaatcttcgcccttttaggagaggtataccacaaaagggggcttgtcacacgcgctttatatatggcgctcgagagcgagacgaattgagccccgctcttctcgaacgcccgggtgtctccctttcgagacatatgatgtgttagagagacacacgatggcacccccacacatgtatagagagatgtctaccccacatttgcgtggttccgccaacagtgggcggtttgttccacacaaggcgtgttagatctcccctgttgttacaaatgggcccacggtctgtcacacaagtgctctcaaaagcgagacacgcgctttggagatacacacccgcattgacacacgaggagttttttgagaccgccctgttgtttcgagacaccgcacaaagcctggggccgccccacacgctgtcgcgggcgcctgggtgccttgagacctgttgtctgtaacgcaccgaagaacgcgccgagagagaattttcgagaggttctccctaatgttccgaataacacccacatccgcctgagaccccgctttggctcctttaagcgctggccccttgtccaccccctttccaccacccccttccacgccccgggtgtcccctttggcttttggcacgtgggccccactagcccagtttggtggttccctcatcatccccctacctgaaccccttttgcccctgccttttgaccttgtttgaaacctgaatcctaataaagaaataaaaactcccca

SEQ ID NO: 678466 - DNA, 2020 bp, Homo sapiens
ggcacgaggactcaggccccgctggccgcgggctcggtacccggtgggtcggtggagcgtctgttgggtccgggccgccggcttcgccctcgccatggcgccctggctgcagctcctgtcgctgctggggctgctcccgggcgcagtggccgcccccgcccagccccgagccgccagctttcaggcctgggggccgccgtccccggagctgctggcgcccacccgcttcgcgctggagatgttcaaccgcggccgggctgcggggacgcgggccgtgctgggccttgtgcgcggccgcgtccgccgggcgggccaggggtcgctgtactccctggaggccaccctggaggagccaccctgcaacgaccccatggtgtgccggctccccgtgtccaagaaaaccctgctctgcagcttccaagtcctggatgagctcggaagacacgtgctgctgcggaaggactgtggcccagtggacaccaaggttccaggtgctggggagcccaagtcagccttcactcagggctcagccatgatttcttctctgtcccaaaaccatccagacaacagaaacgagactttcagctcagtcatttccctgttgaatgaggatcccctgtcccaggacttgcctgtgaagatggcttcaatcttcaagaactttgtcattacctataaccggacatatgagtcaaaggaagaagcccggtggcgcctgtccgtctttgtcaataacatggtgcgagcacagaagatccaggccctggaccgtggcacagctcagtatggagtcaccaagttcagtgatctcacagaggaggagttccgcactatctacctgaatactctcctgagaaaagagcctggcaacaagatgaagcaagccaagtctgtgggtgacctcgccccacctgaatgggactggaggagtaagggggctgtcacaaaagtcaaagaccagggcatgtgtggctcctgctgggccttctcagtcacaggcaatgtggagggccagtggtttctcaaccaggggaccctgctctccctctctgaacaggagctcttggactgtgacaagatggacaaggcctgcatgggcggcttgccctccaatgcctactcggccataaagaatttgggagggctggagacagaggatgactacagctaccagggtcacatgcagtcctgcaacttctcagcagagaaggccaaggtctacatcaatgactccgtggagctgagccagaacgagcagaagctggcagcctggctggccaagagaggcccaatctccgtggccatcaatgcctttggcatgcagttttaccgccacgggatctcccgccctctccggcccctctgcagcccttggctcattgaccatgcggtgttgcttgtgggctacggcaaccgctctgacgttcccttttgggccatcaagaacagctggggcactgactggggtgagaagggttactactacttgcatcgcgggtccggggcctgtggcgtgaacaccatggccagctcggcggtggtggactgaagaggggcccccagctcgggacctggtgctgatcagagtggctgctgccccagcctgacatgtgtccaggcccctccccgggaggtacagctggcagagggaaaggcactgggtacctcagggtgagcagagggcactgggctggggcacagcccctgcttccctgcaccccattcccaccctgaagttctgcacctgcacctttgttgaattgtggtagcttaggaggatgtcggggtgaagggtggtatcttggcagttgaagctggggcaagaactctgggcttgggtaatgagcaggaagaaaattttctgatcttaagcccagctctgttctgcccccgctttcctctgtttgatactataaattttctggttcccttggatttagggatagtgtccctctccatgtccaggaaacttgtaaccacccttttctaacagcaataaagaggtgtccttgtcccgaga

SEQ ID NO: 678467 - DNA, 181 bp, Homo sapiens
tagagaaagagggaaaaggggagacatccaactctcgcgtcagttatacacacataaacacacacagaaatagacgcttttaggctacacgtcagttgtcagcctactagctgcttcagtacattgctgaagtcctgacctctcatcgctctgcgcagaaactaatgaggctcggcagagg

SEQ ID NO: 678468 - DNA, 2431 bp, Homo sapiens
ggcacgaggactcaggccccgctggccgcgggctcggtacccggtgggtcggtggagcgtctgttgggtccgggccgccggcttcgccctcgccatggcgccctggctgcagctcctgtcgctgctggggctgctcccgggcgcagtggccgcccccgcccagccccgagccgccagctttcaggcctgggggccgccgtccccggagctgctggcgcccacccgcttcgcgctggagatgttcaaccgcggccgggctgcggggacgcgggccgtgctgggccttgtgcgcggccgcgtccgccgggcgggccaggggtcgctgtactccctggaggccaccctggaggagccaccctgcaacgaccccatggtgtgccggctccccgtgtccaagaaaaccctgctctgcagcttccaagtcctggatgagctcggaagacacgtgctgctgcggaaggactgtggcccagtggacaccaaggttccaggtgctggggagcccaagtcagccttcactcagggctcagccatgatttcttctctgtcccaaaaccatccagacaacagaaacgagactttcagctcagtcatttccctgttgaatgaggatcccctgtcccaggacttgcctgtgaagatggcttcaatcttcaagaactttgtcattacctataaccggacatatgagtcaaaggaagaagcccggtggcgcctgtccgtctttgtcaataacatggtgcgagcacagaagatccaggccctggaccgtggcacagctcagtatggagtcaccaagttcagtgatctcacagaggaggagttccgcactatctacctgaatactctcctgagaaaagagcctggcaacaagatgaagcaagccaagtctgtgggtgacctcgccccacctgaatgggactggaggagtaagggggctgtcacaaaagtcaaagaccagggcatgtgtggctcctgctgggccttctcagtcacaggcaatgtggagggccagtggtttctcaaccaggggaccctgctctccctctctgaacaggagctcttggactgtgacaagatggacaaggcctgcatgggcggcttgccctccaatgcctactcggccataaagaatttgggagggctggagacagaggatgactacagctaccagggtcacatgcagtcctgcaacttctcagcagagaaggccaaggtctacatcaatgactccgtggagctgagccagaacgagcagaagctggcagcctggctggccaagagaggcccaatctccgtggccatcaatgcctttggcatgcagttttaccgccacgggatctcccgccctctccggcccctctgcagcccttggctcattgaccatgcggtgttgcttgtgggctacggcaaccgtgagttccgctgcctgtcctgcatccagccaggccacaggcaggggtgggatcacagcatctcaggtcctctagaggggaaatagggggaatgcctaggaaccctgtccttacccactgcctgggccatgaccagctgggcatcatctgtcctctctatggcagggaagctgagctgtgggagggtaaatattgatggcctaataacctgcaataggcgggtgggtgcgtgcttcctccctgccccagggcttctccctgaggctggtaggtgggcccctcgctttctgctcttttcctagtccctgtcacacagtaggcccagtgcaagtatttgaagggtgcaaagtgattaaggctctgcctggagaattaaggaccctgatccttgcgctctgcactgcaccccaggctctgacgttcccttttgggccatcaagaacagctggggcactgactggggtgagaagggttactactacttgcatcgcgggtccggggcctgtggcgtgaacaccatggccagctcggcggtggtggactgaagaggggcccccagctcgggacctggtgctgatcagagtggctgctgccccagcctgacatgtgtccaggcccctccccgggaggtacagctggcagagggaaaggcactgggtacctcagggtgagcagagggcactgggctggggcacagcccctgcttccctgcaccccattcccaccctgaagttctgcacctgcacctttgttgaattgtggtagcttaggaggatgtcggggtgaagggtggtatcttggcagttgaagctggggcaagaactctgggcttgggtaatgagcaggaagaaaattttctgatcttaagcccagctctgttctgcccccgctttcctctgtttgatactataaattttctggttcccttggatttagggatagtgtccctctccatgtccaggaaacttgtaaccacccttttctaacagcaataaagaggtgtccttgtcccgaga

SEQ ID NO: 678469 - DNA, 283 bp, Homo sapiens
aaatctaagatgacaaaactttattatacattaaaggtgatatagttgttaagaacatagtctttttgaatcaaaaacttttgaatgaataaaagctttgaaactatttgcgtttcagttttctataactcttcaggcgcaccaaaattaactagaggaaaaaacttcctttattctaatagatattacatcaaaaaacattgagtagtccattctgtgcctcagaacatgtgctctagttcagtaacacaaagaatgatactgtcttggtaagcttaagcaa

SEQ ID NO: 678470 - DNA, 478 bp, Homo sapiens
  misc_feature (198)..(198): n is a, c, g, or t
  misc_feature (218)..(218): n is a, c, g, or t
  misc_feature (223)..(223): n is a, c, g, or t
  misc_feature (227)..(227): n is a, c, g, or t
  misc_feature (231)..(231): n is a, c, g, or t
  misc_feature (233)..(236): n is a, c, g, or t
  misc_feature (240)..(240): n is a, c, g, or t
  misc_feature (268)..(268): n is a, c, g, or t
  misc_feature (272)..(272): n is a, c, g, or t
  misc_feature (283)..(283): n is a, c, g, or t
  misc_feature (289)..(289): n is a, c, g, or t
  misc_feature (308)..(308): n is a, c, g, or t
  misc_feature (310)..(310): n is a, c, g, or t
  misc_feature (317)..(317): n is a, c, g, or t
  misc_feature (325)..(325): n is a, c, g, or t
  misc_feature (328)..(328): n is a, c, g, or t
  misc_feature (344)..(344): n is a, c, g, or t
  misc_feature (353)..(353): n is a, c, g, or t
  misc_feature (378)..(378): n is a, c, g, or t
  misc_feature (391)..(392): n is a, c, g, or t
  misc_feature (395)..(397): n is a, c, g, or t
  misc_feature (403)..(403): n is a, c, g, or t
  misc_feature (410)..(410): n is a, c, g, or t
  misc_feature (412)..(412): n is a, c, g, or t
  misc_feature (428)..(428): n is a, c, g, or t
  misc_feature (437)..(437): n is a, c, g, or t
  misc_feature (476)..(476): n is a, c, g, or t
ttttttttttgtcagttcagttttattccaggcactgacatctgacgtctgcattatttcgaagcggctttcaaacttttttgccataactcacagtaaaaaaaaaatccattttatattcaactcaagtcataaattctttcattccttcaacatattgaacacctactatatgccaaatatattttatgtggaatncagtagtgaacggggtcaanggggngggnaggncnnnngganagaaaaagaaataaccaaaaattcttgncctntaaggctttanttactngtggaacagacaataggcnanataagtnagccagtngcngtggctcacacctggnatctggggngtttgggggggcaaggggggggggnggggggggggggnnggnnntttttnttttagngnagggggccttgggggnccaaagggntgggaccacaggcatgaggcaccgtgcccagcgcaaaangt

SEQ ID NO: 678471 - DNA, 423 bp, Homo sapiens
actctagatggatccccttcgactgtggatcgaggttggaaaaatttggagggctcagaagaagacaagaagatggttggacatggtggctcatgcctgcatcccagcaccttgggggccaaggtgtgagaactgcttgacgtcaggagttcaagaccagcctggccaacatggtgaaaccatgtctctactagaaattaaaaaaatatctggccatggaggtgcatgcctgtaatcccagctactcaggaggttgaggcataaaaattgcttgaacttgggaggcagaggttgcagtatgctgagatcatgccacttgaatcccgcctgggtgacagggcaagactccatctcaaaaaaaaaaaagttcttcgcgcaagaagcgcaaaaaattccccaggtgttgcgcctttggcaaattcc

SEQ ID NO: 678472 - DNA, 108 bp, Homo sapiens
tgtacggcgacgcccagctcaacgagcctgccggcccagtctgtccgtcattgaagctgccatacgccactcatggcggcagtctaccacgaaggggtaccgagtcat

SEQ ID NO: 678473 - DNA, 841 bp, Homo sapiens
atggtgcccgtgttgctgcggaaaggacgagccgggcgctgaagactatgctccaggaagcccaggtgttcgaggactgcttctacggttcttgtctgcggaatcagggaagagtgaaaagggtcagccacaagaattccaagaaggcaaagtccaccaaaaaagccaagccccaagtgccttgtggagccgtttgtgacaacaattaccttaaaggaacctgcagcatcattgactacagcacgtacaccctttctttagacctcaaactcggaattctcaaaaattcaggaatgccctcaagcccttcctcaggcgggggaggtcaccctcgacaactgaggcccctccgtctgtggaaagaatgaacctttccaccgtcttcactgcatcctgcaggtgcaaaaatttaaaattccacctccagggaggtcacgaaaaaaaaaaaaaaataagcacacacaaaaacattgttggggggcgcgcgtcggcggcccaggagaaatttttcaaaccccctctcgtgtggggcggccggcgccccaatatagtaatgaaccctggggcaaagaggggggcccaaagggaaatccgcgggcaacagataggggggggcttcccccccaacaaaaaaaaggcgcggggacaccgggggttctgggacccactcccaagggggtcgggggctccggggttcacaacggggcaagagctataatacgcgccgccgcaccagggaaaaccacgaacaccacacaccaagaacaaacgaagcgaccaacacacatcagcacaccagaccaagaacaaacacgacagaacaacacaagaagacagcaga

SEQ ID NO: 678474 - DNA, 397 bp, Homo sapiens
  misc_feature (20)..(20): n is a, c, g, or t
  misc_feature (39)..(39): n is a, c, g, or t
agcaaaatttcaggatacanaatcgatgtacaaaaatanatagcatttatttacaccaataacatccaagggaagggccaattcaagaatacattctcaattccataggcccaaaaaagaataaaatatctaagagtatagctaaccagggaggtgagagttctttacagtgataatcacaaaccactgcccaaagaagtcagagatgacacaaaacaacatgtttatggatagaagaatcaatatcgttaaaatggccatactatccaaagcaatttacagattcagtgctattcctgtcaaactaccaatgacatttttcatagaattggaaaaaactattctaaaattcatatggaaccaaaaaagagcccaaatagccaaagcaatcctaagc

SEQ ID NO: 678475 - DNA, 708 bp, Homo sapiens
gcgtgcaccgtgtgtgcgcgcggcgttgaaatgccctggacgtcggggcagcgggacagatcccaggttgcccaggagtctccaagtgcctcactcctcccgccgcaaacatgacagagaactccgacaaagttcccattgccctggtgggacctgatgacgtggaattctgcagccccccggcgtacgctacgctgactggtgaagccctccagccccgcgtcggttgctctaatggtgggagccgtggtcctcatttcgggagctgtgctgctgctcttatggggccagtcggggccttcgtacttctggaaggggagcgacagtcacatttacaatgtccattacaccatgagtatcaagtggtgacattacaacgatgggtcaatggagacatagacgctgggaacaacttgtgagagctttaataatgggaagtggagctgaagaagcaattgtcatgttaatgatttccagtaatggcatcacaggaattcgtttggctggaggagacgaagtgctatcattaagggcgcaagtgaaggctcgttattcctgaggtgggcgccggtgaccaaactagagcatctcctccaatactggaaggcgacgatcatgccagtcaccagtatgagagaacagttctcttatctggggtgggctgtagatcagcctgtgaaggacaacagcttcttgaggttctacggt

SEQ ID NO: 678476 - DNA, 139 bp, Homo sapiens
atgagctgcacacacaacgtcagtgagcgagcctcccatggaggcgcctccagggaagagaatcaggcgtggcccgagggcaccagctagcgatccccgaggagctcgcacatgacagaagcaccagttgtaacatgct

SEQ ID NO: 678477 - DNA, 857 bp, Homo sapiens
gaggacaatcatgtggctaaatcaacatgtcatcagctacagagttgctgtcctggatatgatagatagggtccctggatgcaatgggctgtccagcatgcctaccactctcaaacctttacgagaccctgtggagtcgttggatccaccagccactcagtctgtacagcggagccgcaccggagaaagctgatggcctgatgatggaggggcccggtaggtcttacattcatccttctcccctagtcaatcgaggcctgggcctccttgaccaagtctgaagtggctgtgactcacctgtgtacagtcaatgtcaacattggagcttgtctcaatagccctccggctatccatatggtaggcgcatgcgcgagtcctgactgatgagcttgaattagcgactggcattgaccctcagcttctatgtaccagaattccaacatccagatccaccactatcctaattgggatttgtaactgttgaatctgtgcccggctgctgatacatgccgatcaccatgcaagccaacggggttggtgcacctcgatcgataaggtcatctccagcatcagcaaacaaggatccagccgtatcattgggatcgaggacacccttttgagacccttcgggcttgctgtggctgcgtcagggctcaacacgaatgcttgatggttacggcccgtacaggcatttggcccgaccccatgaaggcgtccaaaacgatcccaatggagtagaaccgacctgggcccacaagacgctgacaaacctcggaagaaacaactgaacgcccatatgtaaccccggcggcctagaaccacagcgggacagcgggggccgcgagaccaatgagggc

SEQ ID NO: 678478 - DNA, 267 bp, Homo sapiens
agcgctggcaatactgtagtagttgtgggggcccaggacccaccctcgcttcttggcgtagtctgtcatcttttggggtgtgtggaagaagaggatccgggtggcctcagttgaaaagggattttctctgtaggccttctcagatgcacccagctgatctcatccctgagtagtgtcgagcagcgatgtcaatgaacgaaggtgtagctctcgcgcggggatgtaacccttggccaggaacactttgttgtagctgccctccatcag

SEQ ID NO: 678479 - DNA, 190 bp, Homo sapiens
  misc_feature (25)..(25): n is a, c, g, or t
tttttccccccccccctttccccgntggggtgggtttcccccagggggggcctcagttttttctccacgggggtggggggggccctttccctgccttgttcccccctggggggccgccccccccccccccttccgcccccttttcgggtttcctccccccccccgtgaatttaagctttcccccccgcca

SEQ ID NO: 678480 - DNA, 174 bp, Homo sapiens
cagctattccaaggggctgatgataggtccttaggtttcaggctggcctgagtcttggatggggataacacagccggtgtttgtagtgtctgtgcccttggcgaggggcattctagcctgcaggaaagcaacttatcttggaaggactagtaatttacggtgatcgtatgcttt

SEQ ID NO: 678481 - DNA, 176 bp, Homo sapiens
aggaaaaagggggggggggggggggggggggtgttttaaaaaagaaaaagaaaaacaaaaagtttttttttttcattctggttaggtagttgattaatcagttattcaatattttggggtccaaatacttttttccctacttttttttcagtagttaataaaatttttttttttcc

SEQ ID NO: 678482 - DNA, 154 bp, Homo sapiens
agatcatagacagcatgactactctacactggcaggtacaccgctgtccagcagggcaaccatggcagtgacagtgcttctggcggggaccatggccagaggcgccgctttgtggtggattgtcgcaccccgctgggcctcagcaggttcatgt

SEQ ID NO: 678483 - DNA, 608 bp, Homo sapiens
taaggttggagggggaatgctggaaattgtaaggggtttggaaacttttcatataagtaaggctagggtgagtggaggaattttttccatagggaggtgtatgagtgggtcgtagcggagaatcgggggtatgctggtccagaattcataaagaacagggaggttaagaagtagggtctgggtagacaaaatatgtggtgtaagagtctcagggagaagagtgcgtcatatgtgtgtcctagagaagatttggtatgtgggatgagaggtgtggtttcattgtataaatacatggttaggggtgtattcacgggctattagaacagaattagggggcgagaagggggccttagcgggggagtatatccgaattgtttagagacgcctgggaagaccataaggttacggagacgctccccactttcgggagcaaaggggcgcgacaacggggggagtatccagcggttgagggcaccccatggcacaaagtgtgggggagagaatcacacaccattataatatggggccccaaagggcgtcccattcgacggcggcaggcgacgtaaacaccaaagggggggtcaccagcggtgccgcgaagaactagg

SEQ ID NO: 678484 - DNA, 547 bp, Homo sapiens
acccctaaaggatcccctttatgcaaccgccggtcgtggtggcgggcgcctgtagtcccagctactcgggaggctgaggcatgagaatggcgtgaacccgggaggcggagcttgcagagagccgaaatcgcgccactgcactccagcctgggcgacagagcgagactccgtctcaaaaaagaaaaaaaaagaaaacaaaacacaaagaacgccaccagaggctggggctgctggctcacgcctgtaatcccagcacttcaggaagccaaggcgggaggatcgcttgggcctaggagttcgagaccagcctgggcaacatggcaagacccctccatctgtacaaaaaatactaaaactagctgggtgaggggacgcgcgcctgtagtcccagctattcaggaggctgaggtgggaggatcatcaagcccaggagtctgaggctgcaatgagccgtgattgcaccactggcactccagcctgggcgacagagggagaccctgtctctaaaaaaaaaacacagaaaaaaaaaccggactgaccggcgcat

SEQ ID NO: 678485 - DNA, 750 bp, Homo sapiens
tgcgctctcgtcgggagtccagccatgtcctgacgagagagagtgtagcctgatggcagctgaccgtgggaatgacgcctcttcgccgcctccgaaaaccgatggcagcgatgctgacccccagcatccctgctggcctccgacaggtggcctgcctgcctgcctgcctgctcttgcctgccactgctgctgctgcactagtgctcacctggcttttggatgtgctactgacaatggtgaagctgcatgatgcctggcctggcatgctgccccctgtgcccctggtggccctgtggcctatgcttgaccctgcgtggcggtcattgcagtgtggccttgctgtgtgctacaactttccgcaatgacctccaattgtgcttatgtgcatggggtgcattgtaactgacccgggttcattcccctgggccttccttgcccattggtcaacttcactgtgtggccaattggaagtgtgctgcctgtgtgattggtatagtagcagttctgccaagttgggtgactggactgtgggaatgattcacatggcccgaaacactggcaacactgggccaccgtcgactgaacccctgtgtgcttgaatatgtggttgtataggaaacacttgggtacaatggggaacttgttgggccaaagtggacacgactgtggtcgaacctatgttagccccccttctgcagttccccatggaacgccttttccctttggaattatcccctttggaaaggggcc

SEQ ID NO: 678486 - DNA, 1551 bp, Homo sapiens
  misc_feature (809)..(809): n is a, c, g, or t
  misc_feature (1052)..(1052): n is a, c, g, or t
aaagggtctatttcattatgggggggtagcgcattataacagttaaattaccttttaaattaatgtggtattagggtagacctggcagggacctggcagcatttgggtaacctaagataacccaactctaagaaacccagtctaaccaaaagaacctggtctaaataccttaacaataccaggcttctgggtggaagatctcatctccttgtgtgtgttgtggatctcatctcttctctgtgtgagggagaaacaaagcgcctgtgcgtgcgtggtctcaacaaggtggaaaatatatatattataaggcgcacaaatctcttctctgtgatatatctcacatatctccacaagaggtgttatctcttatcacagagcgtagtgagatatataagcgcctctcacaaatctctcccatggggtcgagagcgcccacaaacccctgtgtgtgtggggcctctacgcaagacatgtataagtgtgcctctatctcgcacgatcttctattaccgccgagagagcaccgagagaagagaggtgtgttctaagacgctctcttctctcaaaaaccgcgcagtgcgccctctcgcagagagctgctcgtggagagctatatcttagcgcactatcatctctccaccacatatcatagacgcctctcagagaagtgctgtgcggagatgcaacctctattctgctgcgcgacagacaacacgaatgctgcgacaccacgcgcgagggcggcgaggaacatctccgccaaacagccggtggagaatcataactactataacgcgctgtggtgccangatgctgcgccaccaacacaacagccgaagatgtgtgggccacgagctgtggggacaccacctgccgtgaagacggttgtttctacccacaagaatgcaccaacgaggggtgcttctcaacagcgggttgaacaacaagggttgttgttgcttccacacaagacgcaatgctccctcttcttcctccacacgaaaacaaaacgcctattctacatgcacggtgggagcaatcctcaaacaaancactgttctgtgggatgaagacatcccccctgcttccccaccacaacatagataattatatcgcctgtgaggtgcttgcccccgccagactgatatccgaactgctcgttgggcacaccccaataattcactaacggccgtcggcggtagtcactaacccgcctgctctggcgtaaaacaacgctacctccccccccaccgacagattcccccaccgttgggtgattaaacgtcccccgccaaaaactgttgtggctccacaaagccaacgtgcatcacgacattcactccaccccccgctgtatagatcacacaaccaagccactctatcttacgagcacaaccacctgctgagcggcccccaccgctgcgtccccacaaacgagcgcgagtcaccaaaccacacgtgggagtactaaagaccgcactcgacacgcaacaacgctaccctcgcccgccacccgccccccgtcgtcgcaaataataaacagcagccact

SEQ ID NO: 678487 - DNA, 1312 bp, Homo sapiens
actgagaagaactgggccaacagtatgaacgccatcctacggtgagtgtggccacggtcgcttccaggtggacactggtatattgtgcttggtctggcgctgatggctgacggatgtggaggctctgttggtggtggggcttcggtgctgcccagcggctgagaacagacatgtgccgtgtccgacatccaaacaaaggcatgctaggacctcgagtcgtactaccgtgggacatgatggtgggagccattacctctggggaggtctggctgaccgggctgggtcggaggcagtgtctgctcatactcgcgtctcagctcaacgagcgtctgtacgccctatcttactacatacttaatcgtaccaggggttgacgggacactatggacctacttactggccagccatactatgcgtggcggttaggcgatatgtgatggcgtacctaatcccacgaattggatcgtatcataccgtgatatatcatcgcgcagatatctcttagggccacaagagaggaaaaccgatgggcgcgagccagtatactgcgagcctgtgcatctggcaagtgttaatatgggtactggcatatagggcttgcaggccggtatgttaacagcctagatcgttgcctaaactggtagacgcctagtggatccccaattacacagtacgcccccgcaagcttaactatgggattagagcaagatatatacacaaaggcactgcaggctagactaggcacataaagccctagattgtacacctatataaagacctacgggacacgcgggtaacttagcaggttacacataccgttacactatggcgtgcccttatgaacaccatgtcctagggttggattatgtggccaccaactatggtggagaggacttacttaggaactcaacctgtaccaaggaccctctggaagggacaggcaccaccccaccgggcttgagaccatgtgacccacgtaagtgacccggcaaacgtggcgagcaacacacgcacacaattggcaccttgacagacggcccccccatgcggggacgttggacagatatgagcccatgggaacaaaggaccacacagggaggaatcaccaaaatcggacaacatacacccgcaacttaccaacgatgagccgagaaagtgtctcacacacaaaggtgggtcaacaagagtatcaccgatgaggcaacacaccacgatacggctgtggagtatcacccactccacacggatataaagacagcccatgatgccaacattcgacgatgagcaacgcgagacttcactacattcacag

SEQ ID NO: 678488 - DNA, 175 bp, Homo sapiens
ctctacaggatcccccggcgcgccacaggttctcccatatagttttcttgagatacagccattcctgttttgtttacgattgtctgtgccggctctcatgcaacatacgcggatattgtgtctgtgtctgaagctactcactctctagcccttcacagagaaagtgtgccaccct

SEQ ID NO: 678489 - DNA, 297 bp, Homo sapiens
gagtgcagtggcatgatctgctcactgcaacctctgccacccaagttcaagctatcctcccacctctgccttccgagtagctgagactacatgcctgcaccaccatgcccagctaatttttatttttattttttaaatagagaaggggtttcgctgtattggccaggctggtcttgaactcctgacctcaagtgatctgcctatgtcggcctcccaaagtgctgggattacaggcatgagtcaccacgccctgccttagggttcagttctgtcacttactagttgtgcatagttgtg

SEQ ID NO: 678490 - DNA, 870 bp, Homo sapiens
ctgggcgtatgatcggcccagacggtgctatcctcgtgggatcacacgggggataggtccgtgggcgcgcttgctctctgtgggtgatggcgctccgcttggtcacgctggcccacggacttcgagtgggggggcccgctggttctgcgcgggatcttcggcttactttgggcaagtggggaataattttatgggcaccggcctttacatttctggtatatggcggtccgccccgccttggggtagacgcccgagtgcgtcagggcggtaaaccgtggggcggcgtccggaggtcaaccgggtcgaggaggcccccctgggctagcgcggtggtgcagatggcccacgctccccgaattgccccttgggcataattgccccaaagggttaacttcttttaattccccgagagtcaactgttctccgcaaatttcccccgcatggctatatttttgacaatatctcccgtttcgaccccgtagcaagccccccccgctgggaccgggcacgaaataaagtagggcaattctttaaaattagtgcaatctctggatgcggcgcccaaaactaaataaatcttccaagtctcccagaaagcaacccctggacgctggtctaccaataacccgagtcccctttagagaccaatcttccccctgcaaggtgctcgcatcagtgccccctgtatgttggcggcatctcaccccccaatgggtataaatcggtccagacacgacatggggcgacatagatcagatccagaacgacaggattcgtatgcttccgaccccggcgtacttcttaacagcccgccaaaacgtcttttctcaaacaaaatttttcttcaaaaaaatcttaaatcacacaaac

SEQ ID NO: 678491 - DNA, 388 bp, Homo sapiens
  misc_feature (378)..(378): n is a, c, g, or t
gttcagtctttaataatgtgagaataaacagaataaattaaaagcacaccatattcttctcagcttcctcaggggctttgtccaaacagcttgaacaactgcaaaataatattcaggaaccatgatagtgtttggtacatagaggacactggaaatggttttcttaactgaacaagtgactagaataaaggaattaatgaacgacatcagagctgaaatcccaaaccataaatcataaaaggatcagacagcaaagagtactcgctgatttattgagatcctgatgagtttgaagtaactagaaacttgatcaaacagtgacaagacccaagatttgttttactctaaagtgagaaatttcctccctagatatttttntttttctttt

SEQ ID NO: 678492 - DNA, 327 bp, Homo sapiens
gacatgatatgccttggggatttcccaaatggagaggaaccattcccactgtctagtacccataaaagacactcacctttccgtacatagacgtcaaatttcaaaggctgttcttcctaggcaatcaggaacatggttggggttggcagaagtgggcccaaatggggagagacgaaaatccacctctggccaaaatggtcaggtagctgcttagagggcttttgaaactctcccagctcatggcagctgagtcacaatcaatgcattcacagtcaggaaaccaaaatttgttaccaaaacaccagaagtttggtctcattgctcact

SEQ ID NO: 678493 - DNA, 220 bp, Homo sapiens
ccctagcgataaaaagtaccaaaatcattccagaagaaatagataccagcctgagcaacatggcaaaatcccatctctacaaaacatcaaaaaaaaaaaatttattcgggcttgggggtgcacacctgtattcccagcttgccgggaggcctgaaatggggggatcacctgcagcccaggacggtcaaggtatgcatcgagccatctgtctccccactgc

SEQ ID NO: 678494 - DNA, 172 bp, Homo sapiens
ctgactcagtgatttatgtcttccttgggctgctaggcctccttgccttggcgggtactttgaaccagatacctccctcttctagtcttccaggcccgatttcccgccaaccactcttctgttttcgggtctctctagtttggtcttatcaagaggtgtatggacagggaat

SEQ ID NO: 678495 - DNA, 736 bp, Homo sapiens
ccatctcctagtcggccctcctgttactcggccgagggcatctttgcattgttcctcatccgcctccttgctcgccgtcggccgcctccgccgcgcgcctcctccgccgccgcggcacgtgggcagctttatcgccagagtccctgaactctcgctttctttttaatcccctgcatcggatcaccggcgtgccccaccatgtcagacgcagccgtagacaccagctccgaaatcaccaccaaggacttaaaggagaagaacggaagttgtggaacgaggcagaacaactggcaagagacgcccctgctaacgggaatgctaatgaggaaacatggcggagcaggaggctgacaactgaggtagacgaacgaacgaggcacagaacggtggggacggacagaggagcgacggacaggaaacaaacggctgactgcgctgacgcgacacagcgcatgcgacgcacttcacacgcatgagcgcaacgcctgagctcagcctaccgggcacagcggcgcagccttgacacgatgactgcaggatggacgactgctcggatacccaagaagcaggaagaccgacgaggatggactagcacagcaaaaaaggaacaagttaaaacctaaacaacacacaaacagaggccgccgtgacctatttcaccctccatttcccatctcagaattctaaacgtggtcaccttcgagtaaagaggcccgcccgcccaccggggccagtg

SEQ ID NO: 678496 - DNA, 746 bp, Homo sapiens
cctttttttttttctgttatatttatcaattttattggaaatattccaaggatcccaaccccatttaaaaataaaaatggtaaagcactccattcaataaaagcacataagtccccctcaataattagtatgacaattcacgatacagctcttactcggggagcagtttattgtaccctttattccaaaaggcacaaagtcatctgaggcctcagatattaaccccacggcatgttaatgacacaccactgaggtgcaggctcaagtgtaatatattaaagcttataacagcacgttccccaagaatttatagatctcttgtctataagataataattctaaaaaatactggcaccttaagaccaatacaggcttacacaaagggacctgaaattgtctcgcaagggcagtttggttcctggatagaagtacacactttgggaaagtctattcccagcaaaagaaacactagacccagctgggccaaagaacacaaaatacaacaggtgatttctaacacgctaaaagagtcacttttccatcagttccaaagaaaagcagctccgggtcattcagaaggctcctatgatcccaccagtctgcagtcattagaaatatatgcttaacaggcacaggctgcgccggatgggtccagacacagtgaccagaagaggccagtttgcgtgcaaggggtgtgagccccgatgctggggctgtcaccgggggtgaatggaccccgccgggta

SEQ ID NO: 678497 - DNA, 458 bp, Homo sapiens
ctgtctttgtcaggggatgagtgcaaggggctattgatcagcccttagctggcatcactccctcttaaacttttcactggatactcttttgaactattttttcccccaccatatacatgtattttttaaacgttaatgtgctaatttctactaaagcaatgtggatttttctgaaagctttaatgttttaataagctttttattgaaatgttaatgtacatacagaagagtgcccgaatcataagtgtgcatctagatgaactgtagcacaccaggctgccacgccctggaccaagcagtagccttgacctgtggcctctcccaggcactgctgccccaacccacaaaatagctactttcccagttcctgatgtagatttgttctgcctggttttgacttctataaaatacagcacattctatttagcctgggcaacagagcgagactgcgtatcaaa

SEQ ID NO: 678498 - DNA, 1222 bp, Homo sapiens
gctggcggcataattcacctggtgcaacgcttacaacgcgcaccaaggggacacaaaggtggcgtacaccttcgactgctgggtccgcaaagccgtatcttcacccctggagcgagcacctgtggcctgaggtattgtgtgcctgatgtgtggtcaccggagtgttcccctcgatggctttcgaagtggatagaccagcagtgatcttgtaacggcgggtgcagggctgacggccaggcccgctcgtactcatgcatgaaccgtatcacgtgcgtgcagctgggctactggacggccagaccaccaccggctgggggggttcgaaactactagtctactttgtacacatcaagggtgggggccatgtgtaccgtcattcagtccctgcgagtgagcgccgctgtcagtcgccaaccgtcgctggggttctcgtgagctggcgctgtgcgagaagccaagcgtgcctgagcggtgtcgctcgagtcagtggaacgcggcattgcgctgcgtttgtgaagaaccggggtcggcactccgcactggacgcataggggatgcgagaatgctaggctcgggggactcgagccgaggacaatcgcgtggggaagaccttgtcgatgggaggtcggtggtagagtttgtatcgcagccctctcgaggccacaaccatttagtgaggttcaggaccttaaggcgttggcttggcggttggccccgttggcaaggcgggggcagactccacattgacagggactccggtcgccaatgggtgctcaagagctgtcatggacgtcgtcgccctcggaaggggacgctggcatggtcaagacgttcgcgccgctccattgcggtggggaacccttcgttggccatgaatggccacggagaacggtattgcggggaatagagcgttaacggcgcgccggggtcattggggttggagcactcgaggaatgaagaccgcataagggatcgacaaagagccccgcggccggttcagaagggggtcggtgaatgctggcaggaaccaaagggcctgggtaggcgggaatgggaagccacattccaatttgccgtcctgtccacggagagaaaggaaagcttcggcgatgggacgggaacgagatgccttctcaggtcacggaagcgagggaaaccgacggcgggcacaagcggggcgccaagggtggatgtccttgggtcagagagcacagaggcacat

SEQ ID NO: 678499 - DNA, 401 bp, Homo sapiens
  misc_feature (25)..(25): n is a, c, g, or t
  misc_feature (57)..(57): n is a, c, g, or t
  misc_feature (100)..(100): n is a, c, g, or t
  misc_feature (131)..(131): n is a, c, g, or t
gaatgactcgctctagattggggtngaatggaaacaattgggtacttccgtgtcggnagttctcctttgaactagcgtgcgcctagattggaagagtggncacataataaggggggacagactaattgggnttaaatatattattatgattatgtaatgttttatataaatgtgataccagatcttggatagtgaagttgattttaagaaaattatacttgggaggtcttataacaaacataaaagacttaaataagagagcatagctcattttgtgattatcgtagtcaaagatttatttaaagagaacctctgcagtacaaagatgaatttagcttccaatataaaatgtgtaatgtctatattaatcatttcaaatcatagttttccctcctgaaccc

SEQ ID NO: 678500 - DNA, 387 bp, Homo sapiens
ctcatcttacaaaggccagccagggagagcccaggcggagaagctgggatctgccttcccttaggctcactggtcttagggaagtgacgaacgtctgttctccttggggcagtcagtcaggggcagtcttcggctgttagggcccagaccttgttgacaagctccgaagtccttgtaagcccaagcacaatttatagttcaaagattggctttcaaaggcccccactgactctgtcttgcctctccagaagggatgggggaatttgggagcctctcattgcctcccactttctgtgtgcctgggcctgttggaacaagcctagaatgtaccacaggacatttcccagatctttccggctgatgagaaaacaggaaaggaaaaggaga

SEQ ID NO: 678501 - DNA, 190 bp, Homo sapiens
  misc_feature (139)..(139): n is a, c, g, or t
atatggcgaggcagctcttcactcaagagcaagaacccaggctccaggacagaggataaactggcttcattccaggcctcgctctggaaaaaggggtgacgggtagcctaggcctatgaggaaccagtcctgtcatcanatctttggcaaggcaaagctgttctttttccaactttattccagaatgttc

SEQ ID NO: 678502 - DNA, 942 bp, Homo sapiens
  misc_feature (236)..(236): n is a, c, g, or t
  misc_feature (253)..(253): n is a, c, g, or t
  misc_feature (294)..(295): n is a, c, g, or t
  misc_feature (375)..(375): n is a, c, g, or t
tcacattccttattctgagacttgggccccggctgtttgtgtatgactcccatgaactccagagccaggggttgtgccttatgtcccatctgtgggactcattctgccatagagctggagcaagggtaacctatctaagctccctaacttgggccagaaaccaccagctgagcttttaactttctcccattctatgacacaaatgaatagagggtacggaggagggtgcacataanccttaccctacctctgncaaaaagtgggggctgtactggggactgctcggatgatctnncttagtgctacttctttcagctgtccctgtagcgacaggtctaagatctgactgcctcctcctttctctggcctcttccnccttccctcttctcttcagctaggctagctggttatggagtagaatggcaactaattctaatttttattgtagttcaaatattaggggtccttggttcttaaagccagaattacggctagcaccgtagtcattctcaagctagagggaccactttgtaggaccaacaatgtactgttacatgggttcccccttcgaaaattaacagacttcttaccaacgatcattaagataaaagcatggcaactaagtgtcagactattaggaactggagaagggggatcaactaaataagcgaagagagtcgtttcttcatgccaaaaaacaaacaaagaaccatactggcgggaacaactcgaaagtagaccttctggaggggccccagatgttgacgcgtacccgagcgtagtaggccgccaagagggctcccctatagagggagcccgcaagtgagagagcagggggacgggaccgacgttccaacacaccgtccgggtaaccgggggaaaaacgggcgacgctgggcaatccctgggcgaaggtgcaacctcaactccgtggggtggcca

SEQ ID NO: 678503 - DNA, 120 bp, Homo sapiens
tgtgatggcagtgcatggaggagctggtgagcctcatcacacagtgatcctgcccctgtgacatggagacagaagtgtcctgctatcaaatatccgaaacacatgccttgtgatgcttct

SEQ ID NO: 678504 - DNA, 251 bp, Homo sapiens
ttttaagtaagtaaactaactattggcatattaaaaaaattgtgcgtacaaataaataaaatcatttgaacaaaaaaaaaaatggcagtctgattaaaatgcatgacagccagcaggacaccatgggagagcgtctctctctctctctctctctctctctctctctctctctctctctctctctctctctctctctctctctctctctctctctctctctctctctctctctctctctctctctctctctc

SEQ ID NO: 678505 - DNA, 1309 bp, Homo sapiens
ttttttttaaggtgggtttacattatttaatttttaattacagattacattacacattgtgctagaaactcaaagccaaaaactattaagtgggcaggtactacagaaactaaaggtgaaacaaaacaaaacaagcaaacaatgtgaaaaacaatagctataaacttctcagagggccacaaagaataagaatttagagggcaatcaccgtggtgtgaagaagaggaaagagggagttttaaagtctccataaagaagagtatttcataagtgcaaaatcttaagtgccgaggttttttgagtaaaaaaaaaaaagagggggcgccgcggccgcgcggaatcctaagaaacctctagagattcctaagaaacccggcgaagagggcagcggatcacaaagaaaaattaaacccctcgcggaggggggccccagagtctaaagcgcgcgtatcacacccgagactatattatcgtgtgggtccccaaagagggggggggctcccccataaaatagggagagaagaggcgcgaaaatatatataaaaggagaaaagaggcaacagacggggcgcgccggcgccgagatttataacaccaccagggccagcgggcaaccaccgggggggacacaaacacgtggtgcaataaacctctgtggggagcaacactccttatgggagagaaaagggagaacacccttaaagcttatccggtgagagggcgggtgtgaccactatatcttttgtgcggaaccacaaactatttacactataaaaaggaagaactttaaaaaagggcctcaataaaaggcgctacacaattatgtacaaacaaattttctaaaacagggtcgtgtactaaacagtgggtggtttataacagtcataaaatgtgggaatataataggtcatgtactagtcttgagaaaaacgagttatgggggctaaaagggggagagataattgaagatctagatcgaaaaacaattatttgttatataccccagaggagcacaactgccggggaggacaaaaaacagacgacggcagaacacaccaccacaacaaaccaaaggaagacaagaccaaagagcaaccacaacagaagccaaaacgaaaatgaacagaaacaaaccaaacaaaaagacccaaaccaacagaatgaacaccccaacaaacgcgaggcaacgaatacaaagaatagacgagagagagaagaagcacaacaaaaaacacacgcgaagaacagaacaaaacaaaaacaaaaacgacacaaacaccaaaacagacaacaagcaaaaacaacacat

SEQ ID NO: 678506 - DNA, 551 bp, Homo sapiens
  misc_feature (337)..(337): n is a, c, g, or t
  misc_feature (395)..(395): n is a, c, g, or t
  misc_feature (411)..(411): n is a, c, g, or t
aaggtagcctggtgacctttagccccctggatggacacgcaggatgaccctcaggccataatcatcgtgggacatccttacggggcacaagaagaggggttttcatctgtgagagctcagtgccatggcctattttgtaagtggagccagtgatggcgaagttctttgccagaactgaccctggagtacgcctgtaggcatcatagtgagaagctccgttcgtaatggtgtctgttgggtacaaggaagaagtttgatagagtctcgtgggataagaaggacttgtgtcgttgggtcctccgtgggtggataaacagtagagtcgccgttcgtgggntgcgctgagagacgaaagtagtattccacgcgcagggttacagccctgacatgcaggnctcctctaaccacggncataggacgagttccgacggtgtaggtaagccatgtttgcaaatgctggatggaatctgtgcaaggcgtccgagttggtcacgaacgaagcgggaggaactagcattggtgatgatggaaaggtagtactgaggaacgtc

SEQ ID NO: 678507 - DNA, 968 bp, Homo sapiens
caggagccgcggggggtgcggcgtgggactgcgggtctgggctcctagaacatagggagccggctgccgtggctcctttctcctccaggaagagtcattcttgggattgtgctgtagaggcaggaggaaggcggaaggtagggagggagggctggtccccctctgagggggctctagtgcctgagcctgacctgtcctcattcgacagctgaaactgttaagcgctggcccaggtccccgcagcccagccaggcgtgtactgtctgggctcccctcacagggaaatgtgtgacggaaacatttgtggcagccaagtggactaagatctatggcccatgaaaccaaggtgagagagtgcaagaagcctgctgtctgcctctgccagcagggagtcctaagcgcagaatccagaggctcgtagctgtcctcaggtgtagctactgtttcagaactgttgctgcctgccgtacgttggtcatgtcgggccagccgagctccgtgggtgagagtgtgcgtgtgcgcgtgtctgtgtgtaatgtgcgtccggtgtgtgcatgtctgtgtgtgtgcccgtctgtgcgtctgtgtgcgcgtctgtgcctgtgtgttgtccgggcgtgtgtgcgtttgggtgtgggtctgtgcgcgtgtgtgtggcgcgtctgggtgtattgtgtgcacgcggggtctgaggtgggcacgtcgtggtctatgcagcggttgggtttggggcgcgcggggtctggtgtgtgacgcgcgggcagttaccacgggcaatagggttggggaagagggctaaggcaggttaaagttgtggagggatggacaaaggggggaactggcatcggatataggaccagcgattgcacgcaggtgacgaacggattgaaacagtgattagtacaaaaatgtgtatgcaatgggggtaccctggagaaaacgacgtacaaagagaacacgcagtgtaa

SEQ ID NO: 678508 - DNA, 191 bp, Homo sapiens
aatcaaacatttgaaagagcatgaaagacagaacatttctcaatgatcgaattgaatttaacacatattattgagtcccttgctggtctttactcttggacacctcccctcccccacctgcctcctcttttaaacacctgctctttctttgggtcttggctcaggtgtcacctcctgtgttaagcctcgtg

SEQ ID NO: 678509 - DNA, 926 bp, Homo sapiens
gacacagtgtggaggcgtgtaacaacaaccggggcatgtgttcacccaaaaaaatgggtcgcacagaaggatgtgcgtatacattcgcccccgccccatacgctgtgcagccgcctatgtcgtccaccccccgcacagggaggggcacacaggcgcaagaaaaacagacagggggaaaacaacgcgcaccacaaaaggggattaagacccccggcgggcacaaacccacggggtggcaatgcggtctgtgcctcttgccggaattactgtcacacacacgccaccggcgcagtaagacgctgttcacagggtaggcccccctccgattgcgcgctacctcttcgaggagccaaaacacgggggagaacagcaacttcaggcacagacccccctgcgggaaaaaacatgtggcacacggaagccggccccccacggagaagcagtgcgcgcccccaagaatcgcgccaacaccagcgccgcgtcgggggcacccacattataagaataacggagcgtcttgttacccaccccgcacgaggtgatacacccgagcaatttctcgaacatgcggcaggagaacaaaatatgcgcccacaggcgtgaagcactctcgcggctccgcaaccgagcggttataaatttcttcctcgacctctaataggaggacgtaatcactaccttactgcgtaccctgtaaataacctagaacgacctccgcatatctatatgtaggccgacaaaaaaaacaattagacaagaacttgtcttttatataaatacaaaacgactaccgccgcctattcacaccaaaataggttctcccacctaacctgtaggccaccacgaggtaaatctacgcgtcccactaattccaccctcacaatgattcacctttacacccaaacaaatgggctccacaacaaaac

SEQ ID NO: 678510 - DNA, 368 bp, Homo sapiens
  misc_feature (2)..(2): n is a, c, g, or t
gncttctgcagcgcatcgagcagctgtccagtcgggtggtgcgcgtgttgggctgcaacccgggtcccatgaccctgcaaggcaccaacacgtacctggtggggaccggcagcaggagaatcctcattgacactggtgagccatcagttccagaatatatcagctgtttaaagcaagccttggttgagtttgacacagcaatccaggaaatcctggtgacacactggcattctgatcattctggaggcattgtagacatttgtaaaaacatcaataatgacaccacctactgcattaaaaaacttcgaccggaatcccccagaggagaaagaaattattagggaaattggagaaccagccattttatt

SEQ ID NO: 678511 - DNA, 115 bp, Homo sapiens
taagatggagtcatcgtactatcgcccaggctgagtgcagtggtgtgatcttggctcaatgcaacctccacctccaggagtgcagtggtgtgatcttggccattcaacgcctccg

SEQ ID NO: 678512 - DNA, 124 bp, Homo sapiens
ttcgagatgctaagtgtcttatagttcaatcaaggagatgatttttacctagaatctgagcatcgtaattctacttgttaagaatgatattagtttatatgtaaacataatgtcaatagcaaag

SEQ ID NO: 678513 - DNA, 113 bp, Homo sapiens
gttcacatcaggaggagcgatatcgagtgtggagaggaacccggacgcaccatttcacataagaggcagcagatggagtgctgaggaggaacccggacgccacatttcacatg

SEQ ID NO: 678514 - DNA, 156 bp, Homo sapiens
cgaccccctccccaaccccagggactcagctggagttggaggctgggataggagctctgggtgaagggcagcatctactccacacccttcatagagctccaggagactactacatgtcagtgcggccgtcgttgttcttgtctccgtccttactag

SEQ ID NO: 678515 - DNA, 138 bp, Homo sapiens
aaagaaccaaaaaaggcacctatattccaaggacctccgaattggcatcttcagctctgacttcaatccagacttataaataccttcaccattacaatcttcctaggagcaacatatgaggcactctccccggaactc

SEQ ID NO: 678516 - DNA, 991 bp, Homo sapiens
  misc_feature (386)..(386): n is a, c, g, or t
gcagcaggacatcaagttcttgccgttcaaggtggttgacaacgaaaactaaaccatacattcaacgttgatattaggagcgtgtggcaaacaaagacactttagctcctgcaagcaaatttctgccatggttctcactaaaatgacaacgacaaccgctgagcgcttatttgcggcaaagaaggttacccatgccagttgttactgtaccagcctattcttatctgatgctccaacgccaagtcaatcaacagacgctggaactatcgctggcctaaatgttatgcacggatcatcacatcgagtcctacgcgccagcctgcctactctgcttcactggccctggactcactaggcgacggggcgacacgcacacactccctggnctgtttcgacctgtggactgcgccggaacctctttcagactgtgctcttctatcctccaacccaatatgaccacacttggctgctcgttccccatagctacatcgggcccacctaaattgcgcagacataccttcaacttctgcggctgcggacacaggacctttctgaacacaagtcgctgagttcccatcgcatacccagctttctcactctctcacatctcgtctaatcacactcacagcatgataagaacgaagtccacatcacggaattgtttccacggcgacctccgactcgactatccatgccttgatgcccatctacacagtctcgcgctcttcgcgcacgggtaggataactcggggcccgagactcaggtcggacccctccggtgtcctgtacctcaccgcccacatcccaacgcccacacgcgaccacatgtaactcatctgggagtctacctttcctccacatgaacgcgcccgcaacacgaacacctctaccctgaaacaaacccccattctaacttccgtcggcgccatatgcattcgtctgaaagggaagcgctctagccacatcgcggacgtcaccggcgtctccccgc

SEQ ID NO: 678517 - DNA, 210 bp, Homo sapiens
ggctcggtaccgcatcttcgtcccatcagaaacgacatcatcaaaaagtacaaatagaaatgctgagagggcgtggagaaaagagaaccctcctacactgttggtgggtgatagagccacaatagcaaacagtatggcagttcctcaaaaaaactaaaactggagttgccagatgatctagctgtcccacctctgatgggagcaagatgg

SEQ ID NO: 678518 - DNA, 108 bp, Homo sapiens
tcgacggaagcacagtcatattgcttcgcctgcagagattaacgtttgtttcatacctacaaatacaacatctattcttcagaccgatggatcaagaacgtagttctg

SEQ ID NO: 678519 - DNA, 340 bp, Homo sapiens
atccatggcagacagaaagcagatatatggttgtaagaagcttatagaacggagtggggagagatagctaaaaaggagtatccttctagggtgatgaatatgttctggaactacttattggggatgattgcactacatggtgaatgtactcaatgtcactaatggtcacatttcacatacacttttaccataatttttataaagctttattagctacattatgttatgatacttatatgtcataacaatagcattctgtacgcttcactaggataacacacacttcggatttatatgcttcttggaagagatatttttcactgttatttgcctgaattaa

SEQ ID NO: 678520 - DNA, 294 bp, Homo sapiens
aaggatcttaaggtcgtataacatgagggtgttgtagtgtgaatgagggtctatgttgttactgtggtgggtgagtgagcccactgtgttgtggtaaatatgtagaggggagtataggggctgtgactagtactgttgaggtccctgtaaagtaggaagagtgatactttgatcagggaggaacgtggttaactagcaccagaagagtactccccagatagggttaatacgaagggggggtaaagtgcgaggtttagcgagggcttgcttagacagtcactcacaaaacgctat

SEQ ID NO: 678521 - DNA, 328 bp, Homo sapiens
  misc_feature (26)..(26): n is a, c, g, or t
  misc_feature (238)..(238): n is a, c, g, or t
  misc_feature (293)..(293): n is a, c, g, or t
  misc_feature (297)..(297): n is a, c, g, or t
  misc_feature (314)..(314): n is a, c, g, or t
aaccaaaaggaccctggtgtccttgnccgcatgattaagaaactgggcacccacagtgatggtcaggtagatttttcaaaatttctttatttgattggtggcccagctatggcttgccctgactccttcctcaagggtgtcccttcccagaaacggacctgaggaccccttggccctggcctttaaaacccccccctttccttccagcctttttgttattatttccccagcccccccntcccctgagccccctaaccccctcatgcaggccccccctgccaatagtaataaancaangtccctttttttaaacntgaaaaaaaaaaaa

SEQ ID NO: 678522 - DNA, 2434 bp, Homo sapiens
gtgaaccctggaggcagagcttgcagtgagccgagatcgcaccactgcactctagcctgggagacagcgagactccgtctcaaaaaaaaaaaaaaaaaaaaaaaaaaaaaaaaaaaaaaaaaaaaaaaaaaaaaaaaaaaaaaaaaaaaaaaaaaaaaaaaaaaaaaaaaaaaaaaaaaaaaaaaaaaaaattttctctgcatcacctttggatttctacacccagtgtttcattcattcagccttcaacagatacttttaacacattctgtgtgccaggactctgtgataaacaaaacagccatggaggaaagtaaatacctgacccagtattaggagagattagaaaggcctccaagtctgagagatggataggaattagctcagcaaggagagatgaggaaggttatggctgaggaactggcatctatgaaagccagattcagctttcccttcagagcctggctttggcatctatgaaagccaggctctgaagggaaagttgaatcttgctagagtggagaattgaggaagagatgagatgttaaggcaagccgagtctatgaggtttgggccactgtatggttgtaaagaaccctggatctgggattaggagtcctgagttctagatatgtttctgctaccaatatgttagtcatcattctagtaacacttcacatcttttaggtgtgccatgatgggcactggggtacaaaaatgtgtaagatgtatgtagtcccctccctcagagatctgtcagtttaatgaggcaagcaggctaattaagaacccctgtagtaaaggaacagttacctctgctgtaagaagtcagaattgagctgtgtgttactttaagcactttctctgggctttgatgatctcacctgtcaaatggtaaataaccactgtcctatgtagctggtaaactgatgagaagacagacaactttgtaatgattggcgtttgtttggcattttgtggatttcaaaacacttttgacatcattaattcattgaaccttaactgcaatcttatgacttaggaaatttccccacaatgtacagatgaggaaactgagagaggttgaggcttgttcatagtttcacagcttttgattaacaaaagttaggattataaatccaaatcccgtgctcttattttgaaaagtataaagatggcaacctttctttctatcccctacttagtggcaaattatccccttccccttttcacagtcaccagaaatgcagagaatgtctgctgtgtttgaaaagcagatctaagctgactggggagaaagaaaggagcttatttcaggtcttcttcaggctggactctaaacttttaagatcatgtgcgcccgtgctcccatcagctcctgctgttccatctcatgccatttacagagtgccatttactgagccactacttcattggctactcatagcaacttgtggggtagacaaagtgcactttacagatgggcaaactgaggtccagagtccctgaattgtacatgtcagaaccaggattgaatctagaagtcttgggctcctgacaccaaacaggtgctcttaacttgcagaatgtaggttcctttgattcagttcggttcaaacaattcttgaatataacccatgtgccagagactttgctatgcaagagagcctctagttaggctcaaaccgtcttggtctagtgccttacttaagaacagggacttgtattatttacttctctgtccccaggcaggaccttgatccaaaaatgctttgctgttgtttttggccttaatctgccagaaactagagggagcagatggccacagcaatgtgggttatgaggatgtgatatcaggcagggttgaaggatgaattgagagccctgcacccaactacttctgtgtctgtgcctaggcccttgtcagggtagtctctatctgagagtgtagctggtcagcctggtcccatttctcatttccagtcacctccccctcttgccatcccatataatggggttagtctcctggacagatctcatacagaggctgctgggatctgctgtccaaatgaccctttggacctatttcccagccatgttccaagatgatggtgaggagtctagccccacagccagtatgctatctctattcagataactcccagctcacaggcctcccaccaggctctcacccactctgatgttttcactcctgactcctaagaagcagattggcaatttagtgtgagtctgtcagacagcctagagagtaatcaatactgagagaaatggacatatttcctgtttattcaaaatcctgatgaaaattttaaggagcactatttgggaagggatgactgggaaccttgcaagaacaaacagcttaaaattcatgaacagaaatagcaacgtttattcatgatgtttcaaattc

SEQ ID NO: 678523 - DNA, 885 bp, Homo sapiens
gtgacacgataggctgtgctgcttgccctgttgatggcaggcttgtgccctgcagccaggtactgccctgctgtgctactcctgcaaagcccaggtgagcaacgaggactgcctgcaggtggagaactgcacccagctgggggagcagtgctggaccgcgcgcatccgtgagtggggggacgacgagccgccaggcctaggtctctgcctactgaagctagttatactctttctggcctagtctgtcgcgcagtctgtgtgctgttttccgttccacctgtccccgacccgtcccgtcacctgcaccgcccaagcaattcatcccagcattctgtccctccagtccatcctcctccatctgtccactcgctccacttcattctgttgcccttgccccattccttccattcttataccactatccgtcgcagcgcccatactggtccgcgtcgcccatcccgtgaggcgtcaacttacgtccactcacccgcattgtctgaacgctcgagacgggatggtcccatcgtgcctcaggagatctgcgagtagggctgagaccgagggccgtagaacctaggcccctcgcactggcttgcgaatcctgtagggccgaggcccaggggtgacatctaagaagcacttagggcacgggtggcgacaggagagacggcctggtggccagtgtcagggcacggtgtagcacaacaagggcgagaccccagtccccggatccccgatgttccccaaggcgcagcttggccctcctgaagcggtcatcaggcaaaggctgcagtttggaactgcgtggatgacttcacaggaactactacgtgggcacaacgaaatcgagtgctgtaacccggagtgtgcactgcaggggggcca

SEQ ID NO: 678524 - DNA, 279 bp, Homo sapiens
acacgcagtgcacgctgcatacctgcaagctgactcttagagtattccccctctcgtgcaccatttcatttcacggtttcgacgggcaggccagtctaatgaaactgacactccagcacagttggtagatggacgacgaggatcaccatcgacgctgtaccagcatcactactgcaggtgtgtcgcccatcagcctggcagggttcagtatctatagcgcccgtccccagctccgggctgtccatcctcgcattgcttctataatggatagctgaacaa

SEQ ID NO: 678525 - DNA, 750 bp, Homo sapiens
  misc_feature (22)..(22): n is a, c, g, or t
  misc_feature (93)..(93): n is a, c, g, or t
  misc_feature (95)..(95): n is a, c, g, or t
  misc_feature (127)..(127): n is a, c, g, or t
  misc_feature (162)..(162): n is a, c, g, or t
  misc_feature (183)..(183): n is a, c, g, or t
  misc_feature (192)..(193): n is a, c, g, or t
  misc_feature (212)..(212): n is a, c, g, or t
  misc_feature (216)..(216): n is a, c, g, or t
  misc_feature (289)..(289): n is a, c, g, or t
  misc_feature (293)..(293): n is a, c, g, or t
  misc_feature (296)..(296): n is a, c, g, or t
  misc_feature (302)..(302): n is a, c, g, or t
  misc_feature (306)..(306): n is a, c, g, or t
  misc_feature (329)..(329): n is a, c, g, or t
  misc_feature (331)..(331): n is a, c, g, or t
  misc_feature (342)..(342): n is a, c, g, or t
  misc_feature (365)..(365): n is a, c, g, or t
agcggctttctgcccacactangacgactggcgcttgccagcgtgttggagagaccgctaccggtgaaccagcgcgggtttttcggacttggngngtcgtgcagatctgctggatctaggtccaggnagtctcagtgatggtctgagcctggccgcgccagngctggggtgtcccagaaggangccaggaanncgaaatgcattcatggaancaanccagccctggccttcaagttccgccatggagtcatagttgcagctgactccagggctacagcgggtgcttacnttgnctnccagangggngaagaaggtgatagagatcaacncnataccgtgctnggcaccagggctgggggcgcagnggattgcagcttctggggaacggctgtgtgggctcggcaactgtcgacatctcagtgcagcttgcgtagagataaaggagacgcagtctctgtagctagcgtgcctccaagctgcttgccaacatggtgtatcagtacacaaggcaatggggcatgtcgcatgggcaccgatgatctgtggctgggataagagaggccctggcctctactacgtggacagtgaagggaaccggatgtcaggggccacctatctctgtaggttctggctctgtgtatgcctatggggtcatggatcggggctattcctatgacctggaagtggagcaggcctatgaacgggccgtcgagccatttaacaaggcactacagagatgctatcagaagg

SEQ ID NO: 678526 - DNA, 141 bp, Homo sapiens
aaaaaaaaagttttctgggccgggggtggtgggtcccccctgtaatcccacccccctgggaggctcaggtgggaggatcattttaggccaggagttttaaacccgcctgggccccataattgaagttcctttccagggaga

SEQ ID NO: 678527 - DNA, 1221 bp, Homo sapiens
  misc_feature (743)..(743): n is a, c, g, or t
  misc_feature (1015)..(1015): n is a, c, g, or t
  misc_feature (1031)..(1031): n is a, c, g, or t
  misc_feature (1090)..(1090): n is a, c, g, or t
  misc_feature (1134)..(1134): n is a, c, g, or t
cacagatgctataaaatgagggacactatatagtatcgctgtgtggtgttactaccagcgcaggataatcttgggctcccggacttccatcttggagtctcgttgactgtgagacgacatacctcgtataggcatgacttggagaaaatcacgtatcatggacctgacatacgtactgcgcatgctcgtgcggtggctcctatcagtactcagcgtaggtcatctatgtacacattatggcttttattggtaacgcctcaaaatatttgcgaaactacgaccgcgtgcttgacatatgatagctatctgtgcattgaagtggacgtgttgcatagaacatctctcacctctgtggatatttcgcagctgggagaataaagaacccgtgaacttgtatacctttcactacccacgggaggtgcccttggaggatcctggcctctctgtagtttccgaccgacattcttgatccagtcagtactgactctcttgtaaattgtgctaaaaggcaggatgtgtctggcatcaagattgagcccggtctccagcattttggtgtgcgtttgaaaaaagagcttaagtacgccaagtccgaaaaccttgtctgagcgattccagcgttagcacccaaacaaggggcccgtgtgaggaggaaaatgcgcattttctttcactggttagttttgcgcctcttgagagacccaaacaatgcgagttgtgttaagcgtctaacatcgtagttnacacggatacgttgcgccttgtgtcccctcttatacgtgaacctcttatttgtctgtggaaggtgaggcgtacaagtttccacccaacatctagcacccaagataggaatttttttggcttcacgttcccttaacgaaacaggtctggtggtttccttaattaaccaatctcttctttgagacgcccctttggttttgggccttgagactaaaaacccagtggcgcactccccacagcccacaagccttagagagagaggacgaaccgaganacaccactccctgtgngaggacagtaacgagattcctcatttggcggttgggggacaaaaacgactctccttctnatcagggttcacactataaaatccgcccctatggggaccacacnaattcctcctctttgggtggcggccacagcgcggcgcctctgaggagagcactctttctgtgtgaaaagagcaccaaactctgtcgg

SEQ ID NO: 678528 - DNA, 188 bp, Homo sapiens
ttccccgggggtttttaaaccccccccccccccccccccccctaaaactctttttgcccgggactttaaggtccttaacctccggccctaattttttttgggggagccttttaaaatttttttggggggcccagcctggttttttttgggccataaaaattcccggttttaaaggcctttttttttta

SEQ ID NO: 678529 - DNA, 209 bp, Homo sapiens
atcgcggcgtgtgagatggagattaccagtgcgggggaacgattttccacgtgggggaaagatcagcggcaacttgctttaaaaatataaatgggtgagtagcataattcaaaatcgagaaaaaaatcatcatatacatacatgttgaaatggaactttacaatattattttgggaaacctccagaaggtctgacaaagacctaatggt

SEQ ID NO: 678530 - DNA, 427 bp, Homo sapiens
gcggcggcgatatgctgcgattccagaagctggcatcgcggcggcgtgcagcgtgcggcggctacacctgggcttggactgttgccttgtaacaagatgaactctagaattctagcaacctaactgctgcattctcaatattaaactgctgcatgaaccaaggtgaggagtattacctggtgttgctatccataagacaagtccttacctgtgcccaaggttattacgtctcatcgtagcagtggcccgtgcactatgtcgatactttaacactagttttatgactagtaggcggccatcacgatatggatgccttctaaacaattgctgtgttgtaaaataaatcaggactggtagacaagtgattaatctggaacaattggaaccttggatgagaccttttcgttgaattctgaagagtaatgat

SEQ ID NO: 678531 - DNA, 1584 bp, Homo sapiens
acttcctgctccccccagcagcactggcactcgctgctgctgaacccctctgcagcccctctgccccacctgtcccgccgcgcggctccaccaacccagccctcagcacggcacccttctgcacggcctcacgctggcacctgcggcgctctgcacgcgcacctgcccccacgcgcgcctgcacgcgcacgcgcacacgcacgcgcacgcgcacgcgcacacgcacgcgcacgcgcacacgcacgcgcactgcacctctctgccaccctgcaccctctgcccctactccgttccctgcgcacgcgcacccactgcgcgcacccacacccccccgcgccgcgcacgcgcacgcgccctgacgcccacgccccctgcgcgcgccccccctgcgctcccgcacgcacgctatcacctctgcccctgcccaactgcgcaacgccccccgcacgccccccagccccccccacgccccgcaccgcggccccccgcccacgccacacagcacgcatgaggcccctgcggcacccaacatccaccatgcgccgcgcacacccgccgcgcccatgcccttcagcaccgcgcaccacgcaacacgccacccgccccatgcgccatccccccacgcgcgccccaccgcccaccaacgcgcatctcccgcaacgccccccgcccgcccccgcggccctccacacgggcggccccccacgcgggacaggcggccttaccacccccccgcgtaacccacctaccctagacccacggcaacccggccttccgcccatgggcgcacaccgcacaccatgcgcgccaacgccacccggcgcgtcatggcccaccccgcaacgcgcacgcgccccgcgccagccccctagggcctaggcttctccaaccccttccctatgccgcgcgttgaaacccctcggcctgcacccgcttcccaaccatcccccacgctagcgcccccccgtcaaggcaacatcctaccaagccactgccttccccccaccccctcccacctcgcgcaagccgctacgagcgcggcgcacgcaaccggcggcccaccatgcgcatccaccccggccctgggaccctccccaacacagcctcaccctggcccttccccgcggcgcccccccccaagcggcccccagcccagcccaacgccccccacttaccattccccccccccgccccaccgcccgggcccccctggctggcccctgggacagggctagaaccccccagccacacgcaccgggcgctggctgcggcaccaggggcgccctcggccccctgcgccccgcactggccctcaccgggggggcccaaggcaagccaccccgtgatggccccccgtggccccccaaccccccgcgaaacgccccggcgacccattcgcccgcgacacaaccggcccccacccattaacccacagaccgcggcacccggcccccattcgccgccccagtcgcccgcgaccaacacacctctcctacccgcaacccctcgccgccccaccccacgggcgcgcctaactaaccccctaccccacgccgccccccacaacacctgccgaccccatta

SEQ ID NO: 678532 - DNA, 492 bp, Homo sapiens
gaccgggtcatcgatgccagcatatcccacttataagtgagatatggtatttggtttacctttcctgtattaattcacttaagataatggcttccagctgcattcattttgcttcaaaggacatgaattcattctttttttatggctgcatagtattctatggtgaatatgttccacattttctttatccagtctaccattgatgggcgtctaggttgattccaccatgtcttttctattgtgaatactactgtgataaacatacgagtgcattgtccttttggtggaacaatgcattttcctttgggattgctgggttgaatgatagttctaagttctttgagaaatctccaaactgctttccacagtggctgaactaatttacattctcaccaacagtgtataagcattcccttttctccgcaacatctgttattttttgactttttagtaatagctattccgactgatggaaggtggcatcgataaaca

SEQ ID NO: 678533 - DNA, 935 bp, Homo sapiens
gccggtagaaatcagtggacttggcggcagaggcagtgcggatccggcgtctccactgatcttttcccaaggctgtacagacatggcggcggtttcggaaggcggctaagtcccggcagcgggaacacagagagccgaagccaggcttgtttttcgaaaaccatctgggcctgcttgccgcaaccaccgccctgattcacaaacttcgtgcagtatgactacccgtaaaaaacaagaatacctcaaagctcttgcgcacgagggctctttgaaaacaactccaagatgatttctactaacacaaatgactcggtgttaacacctcccaggcactggcggtcccttcttcatcaggcggacgactacggaagaaagttaaccccaagaaacaaataagggctgatgagaaacctcaggaagtcaacatatatacgaccttgaacgagggttgccagcaaggcttaagaacactgcgaagggactaaatatcagagctccattctggcgtgattccaggggcaagccaaccagaacaagcatgtgtcttttttgtgaccacccaaacaaggggcaagttgcccagtttggatgtacgcaactcccttggaaaacgagcccggagctagtccgacagagtcttacatagggccaggatagagacctgcgaagagaacagtgacggggttcccaatcagatggcataaagcgagtagttaaagaaggcaacggggttaactgcttacaccaggggttgcagaggaagaatggtgttattgtcagaaatcaacggcaggttttgggtaacccgaagtagggggaaagaaggggacccgtataaataaggggagaggtggtgtataaaggtgttgttcaatgggtgtgggaaacaaccagggggggggcacaagcgcaggtgttgattccaaaaaagctgg

SEQ ID NO: 678534 - DNA, 166 bp, Homo sapiens
ccatggtcacttgcgtgttcccactgcacttttcatgctgcattacttattagctccacccagaagccctggccttagccactgccagtctcgcgcggccctgtggcagtcccgagttgagtgcagctgggtttgcttcataccatgggcttgatttcttggactc

SEQ ID NO: 678535 - DNA, 242 bp, Homo sapiens
  misc_feature (198)..(198): n is a, c, g, or t
  misc_feature (207)..(207): n is a, c, g, or t
  misc_feature (210)..(210): n is a, c, g, or t
gtttccaccgcctcccggggtcgtgctgtcgcccggccggcgcgccccggtctcctccgacatccccatcccggtccgcatttgtgcccctgccagccttctcatccctgcgccccagattttctctctcttatcccccaaacacacctgcccttgtccccgaggccgtccaggcattgccctgggatccaggcccgnggggcagantgnctgctctggggaggtgaaacaagtgtgggcct

SEQ ID NO: 678536 - DNA, 149 bp, Homo sapiens
tcagctcggtccggcacgagcgcacaagtgcacttcccaggacatttaacaaaccccgtacgcatttatatagaggagacaagtcgtaacatggtaagtgtactgggaagtgcacttggggcgctcgtgccacttggggcgctcgtgcc

SEQ ID NO: 678537 - DNA, 415 bp, Homo sapiens
ctgctccgcccctctctgggagcactgatttattgtgaacagtccagggcagggctggtacctcattcgcgtgtgttcagagggccgaagacactgcacacactatgacatgattagattgaatttaaatcctgccacccaccaaggagacctggggatatttaatgtttgagggccacactaaacgatcactgcagagaaccacctcttttctttactgtagattaagtatgataagcgtgctctgctattacttattggaaaaaccactgagaaaagctaatcttcatgctttaatgtgatttgacatgcaaacgggaagttttgccaggggctaataaaggttgtgaattccaaattgctagccgaatatggctttgctggtaagcccactggacagagaggggcggagcag

SEQ ID NO: 678538 - DNA, 582 bp, Homo sapiens
caacctgctgaaggaggcagccagcttgctggaggcgggcgaggagcggcctgggggagcaaagccaggcacccagagccaaggttccgccctccaggaccctgagtgcttcgcccacctgctgcgattctacgacggcatctgcaaatgggaggagggcagtcccacgcctgtgctgcacgtgggctgggccacctttcttgtgcagtccctaggccgttttgagggacaggtgcggcagaaggtgcgcatagtgagccgagaggccgaggcggccgaggcctgaggagccgtggggctgaggaagccctgggaaggccggcggcggggcccacggctgggagtccaagccagaggagcccccgccgcccaagaagccagcactggacaagggcctgggcaccggccagggtgcagtgtcaggacccccccggaagcctcctgggactgtcgctggcacagcccgaggccctgaaggtggcagcacggctcaggtgccagcacccgcagcatcaccaccgccggagggtccagtgctcactttccagagtgagaagatgaagggcattgaaggagctgctg

SEQ ID NO: 678539 - DNA, 98 bp, Homo sapiens
cccttttgggggcccccggaaaaaatttggaaataggaaaaggtggggtttttttcccccccttatattccgggggggttgtaaaaaataaatttttg

SEQ ID NO: 678540 - DNA, 473 bp, Homo sapiens
ctttaccacctattgccctatactatctatctatacttcctataccctacctactatacctacagctcctggaataaagactattgcaactgtctcgacagcctctctctcatccctctttctactagcctcgcccaaccttgaattgcatcctttccctggtcggaatatcagctaccccacccctcgtgccgtcaccctcaatcccatgtattaagtattccctaccccttctctacctgatacaagtgcagcagtacagaaccaggcatttccggtactacagggtccctgaatattacatgaccaactactgcagcaccgtggggcctagccagccctcggcaaaagagggaaggcatttcttctctttggaaactgtagcacgggctgtgaccaggatgtttaaacacacacacacgcgcacaaacgacacatgctacatgtggtcaggcagaacagggaggcagcag

SEQ ID NO: 678541 - DNA, 1187 bp, Homo sapiens
atttctgggggctgccccaaagggcagacaggttaatggggcagcagtcggggaaaatcaggggtgggactgggccacacgctccaggtcggtccttcttctgtaagtggcaataggagtttcgaggagcccttggcagcattgatgagcgtcatctgccaggcactcagcaagtggctctataagtgtcccggaaggcagccctcacaagcgccgtggtgcacagcagccagagtggccgtggttcacacggggcaggggggacacattccaaggaccgtggtcgtctcacagtcccggggcgcccaagtgcggtggtggagtcctccgggggaccacgtgtggatgagtggggttacaccaggaccgtgcagaagggattcctcgccgtggtgaaccagggtgttagtgactctcgaaaggcagtgctgtgaacgaagtgcgcacagctcagtgaaggcttcttgtgccgatggattgcggccggtgcatacatcagggagattagtagagggcgcctccacaatggggacaattgagcttggcgggaagcgttgggcgggaataccggcccttgtacttggtgaggcaggatactgtgggaataactttctccttcactgggaaggtgaaatccgtgcagggacaaatggtcatggatcctggcgacatccatcggggcaccaatgtcccaaagagctgaagtgacgggggtctctggccaccggtgggtgctggctgtctcccaatgcggggaacctggagaaacaagccgagcggatcactggatacacgggggggttatacccagcagcccgccttgtggcgggggcgcagaggtaataagacgtgcggcctaaagaattaacactgccctatagccactttcttaccacaggggagactaaaccctttatatcccatataatgtttattcgagaacccttgaggcttactaatcaccatatcccgggggagacagaagggtaaattgggggccccctcatcaggccataagtgagagcgcccgtgaataaacagaagctcgcgcagttacttccaattgtaggatcagcaaaaagaggggacaacacgtacctagtgactcagcacaaaaaagaggggcgagcgaccattatgtatgttgtgcagccagatgctatcttattatattgttatcagtgttc

SEQ ID NO: 678542 - DNA, 141 bp, Homo sapiens
gaatggagattgtgagcatgttggaaaaaaacgcaacacttctcaaattcggctaccactttacccagcaaggaccccgccctgccgggccccacatgttctttgcataatggaggtaatgcaggaaaatgcttagagcag

SEQ ID NO: 678543 - DNA, 131 bp, Homo sapiens
tgtaccctaaatggtcgatctagacggatccccaagtgggtaacatcacttccgggcagttacctggacatccacacgggaagtaatattctaattatctcagcaaagcactacacaattcgcccttttgc

SEQ ID NO: 678544 - DNA, 106 bp, Homo sapiens
tggtctcctccactcatgatccacacacgcatctgtctaccatccatccatcggtccagctctggcctcacctgaccctctcaagccacatgccctctcaagctat

SEQ ID NO: 678545 - DNA, 401 bp, Homo sapiens
aaatgtttaattcgagtagtcccgtgcctttgcagaattctcatgcctctttttttatatgcatatattaaaaggaaagccataggcctgagccgaggagaggatgaattcaagtttccttacctgcgtatctactttcaaacatgcgccctccctgttacaggtggtcagttgtgcctttatgtactaacgggcacatgcgagattgttctgctttttttccttgtgtctcagttttagtcattttccattttttgccaagtttctttcatccagtgtggtagaaaaggcacaattccaatgtatcatttagaattgaatgtcattaacctggctttgttctttgaaaaaaacaaattctttaaaaagattaaaaggataaaaaaaaaattcaaacaata

SEQ ID NO: 678546 - DNA, 377 bp, Homo sapiens
gtttttttttgtggtttccctgcgccccccccccgggggttcattttttttgggcaaagttttttttgggcccgggccccctttttcatttttttggcccccccccccctgggggggcagggggggggggaacccccggccctgggtttttttttgtttcccttctggggcccccagggggggcgccaaagggggggggggttcccccccccccccccctggggagaacgggggttttttttttttccccccccccttttccccccccccccgggggggggcccttttgggggggggcggggggcccccgttgggccccccctgggaggtgaggaccccccccccaattttttttttattttattttggggttccca

SEQ ID NO: 678547 - DNA, 442 bp, Homo sapiens
aataattaattaaagaaagacaagttctgtatagcgactatctaagcagacagccagccactcagaaagtttataccattaagagcagctgaagaatggcttgaacttccacttcctcacaaggaaagaaacaatttcctttctatatcctgtttcttaacaccataaggtcataagctgacagctgattcaccactaggcccatataaggttataaatagccagcaagcataacagcctaggacaccttggcccatagtaagtcatagtagttagttatacctgtcatagatatactgcttgtctgttctgatcctcttcacatccaccttgtccctgtaggcttgtttcaagtagccaccctctaaaggagtaaaagtaatcgtttgtcctggcagtttgatgttaatccctggttagtgcctcaataatctcttttctc

SEQ ID NO: 678548 - DNA, 391 bp, Homo sapiens
taaatataaaatctgaggctgttggggctttgacttaaattcccatcaggcctctctccagcaggtaatcccttctctcctttccagcgtgggctcccctgttggggaggtgtgaacctcaaggcgccttagccccaaacaccactttttctgctttccttaactcctttctccagctcccccctttttttaataaacgttggcagttgtgatgttctctgttctcggcataaccgttaatctctcattttcactgtgatagcctataaaacctcgcagctcccgagcgttgtggcattattttgtccaatatgtgacgcagggcccgaccctgtgagaagccgcagaggccagccagccgccggggcgcgcctcctctcccttgtgcccc

SEQ ID NO: 678549 - DNA, 326 bp, Homo sapiens
  misc_feature (85)..(85): n is a, c, g, or t
cccccctcccttgggggggttggggggggcccccccccccccggaggggggggtgggggccccccaaatttttaccccccccccnttttttgggtattttttttaaaaaacgcggggaaacccccggggggtttttcctgggggggggaggggccccccccctggggtcccttttccttttcccggggggggggggggggccccccccccccgggggtttttttttttttggggggcccccccgggggggggggggggccccttccccccccacccccccggtttttttttttttgccccccaaaaccgggggtttttttttttta

SEQ ID NO: 678550 - DNA, 206 bp, Homo sapiens
taggttacgcaaggcacccgactgacatccggcctgtttttttttgaatgacaaaaactaccccccatatcatttatataccaaatctctccctcaataaaagaaagccttctcctcattttatcaatattatccataatagggggctgtgggggtggataaaacaaccccctgctccacaaatttttattgttgtttgaaaccac

SEQ ID NO: 678551 - DNA, 1137 bp, Homo sapiens
cgctcgggagccctgcccatggcgaattgtggatgattgcggtgtgagccttcactatggagtgtcatcgtgtggcggagtcttccagtgccatcaaggtgtttccagcaatgcccctgttggaattctggcacctggttgagaggtagtgccaatgactgtgaggatccgagccccccagattggagtgtagcttcgcagtgtggggtgggcctgaatctccaccatcgactgtggcctggtgcggcttcggggcaatggagtgatccctggaactctatcaccagtggagcattgaccggtggctgtgctggctgcccgacagatggcccactggccatggtggagctcagcaatgatggggggcatcctgtatggccctcattgagggcgttggcatcctcctcacatcgctaacacagacacagacagttccgaaatgcgccaccattcctggaggaccccagccagactgacccctaaggatggaaccccggccccaggctaacccagctatcagcagtacccactgaggaagacaatgacaccatgcggagctacataaacaggtaccctcacacgatggtactacctacgaagggcagggctggatacccagtaagacctgggaccatccagagagggtactactcagagctccctaagttccaaagggtggagagtgtaggaccaccagtgccctgacaacagtggggccccaaaaaccaccacaagggacaccgagcccaagaaacaaaatgtagaaggtataacaccagacagctagtgaggacccgacataagataacaggccggtcggactgccaagacaggagacaagagggggcgcggacagagcaccgaacgagggccaagagaaggaagccacgcaacgtggaccagcgggccacaaagagcgcacaaaaaaccggggcagggacagggcaaccagcccccacggacaccccgacagacagacgggcagagacccgggggcggcagaggacagacacaaaagaaagaggagagacacgagcagcatgacgaccgacgcacgcgtggagaagcaaccaccggcgaagcgacagcgaagcgagacgacacacacgaagcaactgacacaaacgcagcgaagga

SEQ ID NO: 678552 - DNA, 1272 bp, Homo sapiens
acagtcgagccacatcgctcagacaccatggggaaggtgaaggtactggagtcaacgtgattatgtgtcgtataagggctgcctggtcaccagtggctgactttataactctgtgtacatgtggatataagtatgccatcaatgacccctatcatttgaactcaacatacatggtttaaatgtaaccaactatgattccatccatgtgcaaattaccatggcaacctgtcaatggctgatgaactgggacagcttgtcatacacatggaaatcccatcaccatcttccagtgagcgcagatccctccaaaatcaagtggcggcgatgctggctgctgcacgtaccgtcgcaggcagtccactgcgcgcacattacaaaccaacccatggcatgaaggctaggggaccacaatatgcaacggcgcgggacgccacaaagcggtacatcatactactgcccccaacagcctgaatgccccacaaagtacgaaattcgggtgagaaacccacgaacgcaacggcattcgaacaccacagacacacaacgaacaacacagccaactcgcctccctgccacacaccccacacatgaccactaacaacccaccatagggaaacacagggacatcacccatgcacaacactacatgcaactcagacggaccgagacactccatcgaacccagaaattgcccctgcattgcccccacccagaccgaccccagcccacgaacaaatagctcgtcacatgtggcaccacatccgtggaacacattgtgtgcaggatacagtgcactgcctgtggtaccctactcgctaccatcaatcaagtcatccaactaggaccgatgcaaattgaatatctaccaagatcccaccctgaaccgaacagaacaagacgacggtaaaggcctccgcggtccccacaggcacacacgaaaaaacgagcccttacacgaccacagacaaaccgtcgaaaaatgaaacccacacagccgcacaaactccaccgaccccaagtccactcggcacccaacacaatgaaaaacaaaaacagaacaaacaacctaccctcgcacgtaccgaccgcacaacaagaccacacaaaggaaacaaacacaaccacgcaacacaagccaagggagcagacctacgaaaggaccacaggggaaaacgaaacagaaagaggagaaaaccaaaagactgattaagaacagaagaagcaaccagcaccagaacgaaggcccgcagaacaacccacgacacggacgaa

SEQ ID NO: 678553 - DNA, 192 bp, Homo sapiens
tctagaggatcccgccaattgatttgtggtgtatatatggtaattgagatgtcgggggaataggtatatgtgattaggagtagggttaggatgagtatgggggataggtgtatgaacatgagggtgtgtctcgtgtgaatgagggtttgtatgttgttaatgtggtgggtgagtgagccctattgtgttgtg

SEQ ID NO: 678554 - DNA, 281 bp, Homo sapiens
  misc_feature (23)..(23): n is a, c, g, or t
  misc_feature (85)..(85): n is a, c, g, or t
  misc_feature (142)..(142): n is a, c, g, or t
  misc_feature (242)..(242): n is a, c, g, or t
cctcgtcatgggtgaagctcctnatggtcctgaccctacagttcctgtcccatgaccagggccagttcaccaaggagctgcagcngttcgtcgtcagtggcagccccatgcgagcacccgaggaagtcacaggtgcccaggncggagtgcagtggcgtgatctcggctcgttacaaccaccacctcctagcagcctgccttggccttccaaagtgctgagattgcagcctctgcccagccgncaccccgtctgggaagtgaggagcgtctctgcctggccg

SEQ ID NO: 678555 - DNA, 1661 bp, Homo sapiens
ttctctttgttggttcctttgctgttgtcttctcttctctttcgttgttttctgctttctggctgtttttttgtcgctctcggtttcttctcgttctcgctctctgtcgtcgcttgtcttctcgtcgtttgtgctctcctctctctgtcttttgtgtttggtcgcgcgattttttttctcgtcgtcttcctcctgtggcgtttgctcctctcctgcgtgcttttggtctctgccctctttgtttcctgacctggctcgtacttgtcgccctctctcgtgatgtctctgctctggtctctcgtcttgttggctgcgtgttcgtgtgtgttgtgcctgcctctctcgtttcttcgcttctcgtctctgtcttgcgtgtgtgtttatctcgttttctttcttctttgtgcctttttctgttctcatccttctgttgcgtctgtcgtgtcttgtgttctggctgcggttttctctccttgctttctctttcttgttttctcctgtcgctcttctccttgcgcgtgttgctctcgtctcgttttctctgagcagcatgatgttgttgttgttgcttgtgtcgttttctcgttgctcgtcctgctcgccggcttgttttgcttctgttccttgtttcttgttcgtctcctctcttccctactctttcatcttcttatactctctgtacttctctttacactgcttgtctattctcctacttttctcgtactcgcttccttactaattaaactccatagatgtcttccctgtttttatgcttgatatcctccgttccaagagtccgccctcctgtgattgatctgcctcaatttcccatctgctcattgctttattggaacccctctccaacttatgtattagtatcatctctggtgatccctgatgtcccaagcccttcctctgtgatcatcatacggcctcctatgtgttctcgtcgtggtgaatctgggattaatccaagttttctatcatccacgtgattgttccatgtcctacttgaccccatcttagtggccttaagttttacggttgtagccatctttatacgttacaaatgtcttgttactattcttttagcagtgtcttggttactctggtctcctcgctatttcaccccgcggaataatgtgctcggaacctcactagcagtccggcccacggcccgttcccggcactcatagggactttagcttcgagtacctggtccgtcaacctgcctccggcctccgtggcgagccatctagcccactgcgtctccggtccgcccgtcgccgtccccatcccatgtcgcccatttgcccatggagcagactcaggaccgggcgacgagatgggagcgcccgctctcaggttcagggcccagatcgtgtgacagatagtgtagtccggtggacagagaccagtggccttgatctagatggaggtcgctggatacgtggtcgctctgctgtcacctactgtgtgttaccatgccattctcgccctgaccagcccagcaccacatgggaatcatgcgtgaagactgatcgcagcgttgcccgagagcggtgagtttgggtcgtgggtggggccgggccccccctacgggatgcccacggccgttcatcatcttgtccctcgtccccctacaatcatctccccgctcc

SEQ ID NO: 678556 - DNA, 104 bp, Homo sapiens
ctccagcttggcccccaagcatacaggttatggtgtgtctgagatgggttcagtttggacaaaaggaatcgagcctgactgcctccatgctccgtgtggatgta

SEQ ID NO: 678557 - DNA, 104 bp, Homo sapiens
gagcgagactccatctcaaacaaaaagcagaacaaaaacaaacattaatgttggcacagaaaagggccccccgtttaaacaaagggcgggcgtgggtaccgagc

SEQ ID NO: 678558 - DNA, 366 bp, Homo sapiens
  misc_feature (109)..(109): n is a, c, g, or t
  misc_feature (117)..(117): n is a, c, g, or t
  misc_feature (121)..(121): n is a, c, g, or t
  misc_feature (133)..(133): n is a, c, g, or t
  misc_feature (167)..(167): n is a, c, g, or t
  misc_feature (317)..(317): n is a, c, g, or t
  misc_feature (322)..(322): n is a, c, g, or t
atagagccgggtgagagagcgagcgcccgtcgggggctgtcgagggcgggttgcctcgcgctgacccttcccgccctccttctcgtcacacaccaggtccccgcggaancgcgatgntcgngccatggcggantgacggctcttgagagtctcatcgagatgggctncccaggggacgcgcggagaaggctctggcctcacagggaaccagggcatcgaggctgcgatggactggctgatggagcacgaagacgaccccgatgtggacgagcctttagagactccccttggacatatcctgtggacgggagcccacnttccntcagaacaaggcggccctttgaaaggatctgggttctgcttgcc

SEQ ID NO: 678559 - DNA, 892 bp, Homo sapiens
cgttatgttaaaatccgctgcctgtaggtcccccatttccccactaaagtggtccctcttctgtttctgcagcttcaggccctcaggaggtttcacgcgcaggtatttctcttggactgacctcctccgggacatcttaaccgtgataaaacgcccttgtgcaaacaataccaatggtgtcatttgacatggggccccctcccactagagcttcttgaaaggcgttggtcgccagctcgcgtctatcctcaacatcgtggtgaaaacgaccgtggggcgccctccccccctggagtgatactatttcctgtggccaaacaccccggagtcacgtatctgcaacgacgtggtgccaaagacatctatttccgtcaggtaatactaatacggacgccatgtggtatcccccggaagctatcttctgtctcctgcgtggcgccgcgagttttgtgattaccccgatactgcgtctgcggtgtgagcaaaatgatgtctttctgggattgcttgtcgtcgaaagaagagttgagtgctagtagagtcaccacgacgattataagattcgcccaaaaaaggttaattgttttccacaaccccctatgacaacattcttgttgaagtaagaaccgttactttcgtgtgagttgccagtgaaactatcaactattcattcccccggtagccccagtatgttctgcatgaggttagtaagtctgcgccacacagtcgaggtgccactactaccactcgattgggctggtccccctattatacaagactggtgcttggaaggtgagcgagtcatttctacggaaaagaagacatggacatttttccggcacaaaaaattttttcccgaccaaaaaaaaaaacttttcttcacaacaaaaca

SEQ ID NO: 678560 - DNA, 292 bp, Homo sapiens
  misc_feature (182)..(182): n is a, c, g, or t
gagtccgctgggtttacccagtcctccaagaaccccagtgaaagtcgtgcctcaaattagaatcgaacgtgagcctgaagacaacgattatctttggaggagcaagggaacagaaaccacgttgtaacctgtttgtccttctcaaaactgacacttctgttgttaactgttctaattttttnttgtctatgtattttaaaatcttttgtttggtcactggctgaataatagtcactctctctgcttctctcttgcataggtaaaaatcaagacaatagtgtcccttgccttt

SEQ ID NO: 678561 - DNA, 195 bp, Homo sapiens
atggtggcggagcgagtggtatgtcttaattctgggtgcagcaatttgtctacttagcctcccaaagtgttgggattacaggcacaagttatcacgccctgcccatttcttatattttacattctttgtatgttacgtatactcgctggtgactcgcctgcttgtcctagaacacccagcgaagctgagcgtggg

SEQ ID NO: 678562 - DNA, 413 bp, Homo sapiens
ggtgattagaggatcttgctgccacgaagtggagactcacttgatcggaggagtttgagctgacatggtgaaaacccatctctacaaaaaatacaaaaagtagccaggtgtgttggcatgcgcctgtagtcccagctactcaaaggctgaggtgggaggatcacttgggcgggagaggttgaggctgcagagagcagtgatcgcgccactgcactcctgcctgcgtgacagagtgagaccctttctcaaaaaaaaaaaaaaaaaaaaccaattttttaaaaatcccttttgggatctgggttggggttggggttgggttgggtccaaagagttcttgccacttttttaaaagaggactttgggccgggggcgggggttcaccctttaatcccaagcatttgggagggccaggg

SEQ ID NO: 678563 - DNA, 173 bp, Homo sapiens
gtgtgctgctgaggtcactctaaggatcccttattcgtgttgcacagcgcatggtatgtaggttagcataagatgcctccgtgagaggctgtggtcagcctggggtcagtaaccacaagaagcgtggctccggaaggtgctggatctgttagtgaaggttccaggagtgaagc

SEQ ID NO: 678564 - DNA, 188 bp, Homo sapiens
gatagaacttctgcaaaggggctattgatattgaacattcaaagccagctgtggtggctcatacctacaatcccagcactttgggaggccaaggtgggatcacctgaggtcagaagttcaagaccagcctggccggtatggtgaagccatgtctctactaaaaatacaaaattagccggacattgtgg

SEQ ID NO: 678565 - DNA, 411 bp, Homo sapiens
ccaagccagaaagccaggcaatcctaagctaaaagaacaaagctggaggcaatttacccaacttcaaactattacttagggctacaataaccaaaaccgcatggcactggtacaaaaacaggcacagagaccaatgggacagaatagagacgtctagaaataaagccgcacacctatgaccatctattctttgacaaagctgacaaaacaagcagtgaggaaaaagagtccctattcaataactggggatactggctaggctagccatatgcagaagattgaagctggactcctttcttataccatacacaaaaattaactgaagatggcttaaagacaaggtaaaacccaaaactataaaaatcctggaagaccggccgggcacagtggcccacgcctataatgccagca

SEQ ID NO: 678566 - DNA, 752 bp, Homo sapiens
tcgaaggtctaaagagattctttgttttggagaagacctcctgttaagccccaactctggtctgacatactggcacacctctttaagattgtgttgctatgatctgtgtcttaattgttcattagagtgagaatcgacctatgattccgtttgtgaatttgtaaaatttggaaaccaagccgccagcttatggtaaagtactgtactgtgagaagtattatgatatttaatgcatctcgtggcttaacacttgtgagagttacccgcttgaaaatgatggtgttgactacctcttgagatcacatctatccacccctggcacctaccccccagctggcttccaattagtatgtggttgctttttggtattaaccactataccgtactagagacccaagtgaaccctgatttttatatgtctttaataatggtgttttatctagtgtttttaaattatgcctgtgtagtatttagattacctccttgtcccttttgactcatgttgtttacacagtgaaaataaaaacacttgaactgtatgtttttaaaagcccaaaaaggggtagatgtttggaatgcgtttcactcgcatccagtcatctggagggactgaagccctgtttgcctttctgtaccctctgggttttatattctcatttcatgcctaatgtcttattctgtccattatggatatgttgaggtttaaaacaaattacttgattaaaaataaaacatataacgttggccattta

SEQ ID NO: 678567 - DNA, 468 bp, Homo sapiens
gcgagaagcagttggtgctgataacaggcctgcgcacctacggcgggcttctccggtggcgtggtggttgactaccctaacatgtgccatggctgagacattctagcctctgcttgttctctcgggccttcgacctttgtaccagaggggctgacgtgagaatcaggatgaatgcttgaccccagggagtctgtgttcaccaatgagaggttcccattaaggatgtctaggcggagaatggtgaggaagagtcgggcatgggtgctggagaagaaggagcggcaacaggcgccagggcagggacgtcagacctgacacccagtacaccggacgcaagcgcaagccccgttaataaggtcaccacgcggtatctggaaaggcacttgcatctgaacttttctatatggtccagctgacaaagtagtattttagaaaagttctagagttataaaaatgtttactgcggta

SEQ ID NO: 678568 - DNA, 602 bp, Homo sapiens
  misc_feature (1)..(1): n is a, c, g, or t
  misc_feature (110)..(110): n is a, c, g, or t
  misc_feature (198)..(198): n is a, c, g, or t
  misc_feature (228)..(228): n is a, c, g, or t
  misc_feature (236)..(236): n is a, c, g, or t
  misc_feature (238)..(238): n is a, c, g, or t
  misc_feature (245)..(245): n is a, c, g, or t
  misc_feature (250)..(251): n is a, c, g, or t
  misc_feature (272)..(272): n is a, c, g, or t
  misc_feature (309)..(309): n is a, c, g, or t
  misc_feature (344)..(344): n is a, c, g, or t
  misc_feature (361)..(361): n is a, c, g, or t
  misc_feature (374)..(374): n is a, c, g, or t
  misc_feature (378)..(378): n is a, c, g, or t
  misc_feature (402)..(402): n is a, c, g, or t
  misc_feature (412)..(413): n is a, c, g, or t
  misc_feature (415)..(415): n is a, c, g, or t
  misc_feature (451)..(451): n is a, c, g, or t
  misc_feature (473)..(473): n is a, c, g, or t
  misc_feature (506)..(506): n is a, c, g, or t
  misc_feature (580)..(580): n is a, c, g, or t
  misc_feature (601)..(601): n is a, c, g, or t
natccacattgagtcataacacagattgcaaagggcaaagtaaaaacggagagaactaattgggagctatatacagttgggcacaatggtgtcttgtacactagaaagtnttttacaaaataatcatcttagatcaacagaagaccaatcttcaatgtcgtcctgcaagatgggttactttaacatctcctcctaagnggggaacaaaataccagttagatttgtgcnactctganangcttttnggggnncgctttcgtgatttgtttttngtcctcacttttttttcttcaatttttttagatcatntgcttatttattggtaaaatgcggtttgggtggtngatggactcgccctggngttcccgggtggnattntgttcttgtcttttcggggggggntctgggggtnngnccttccctttttctggggttcagctttgcttggttngggtcttcttggggcgtctctngtgacccaagtgaaatgctatcacgaacaccantttctgataggttttttgcgggggcgtgagttggtctgtgcgtatggtctttgttttatatcccaggttttagngttcttgttttggtttgttgnt

SEQ ID NO: 678569 - DNA, 1307 bp, Homo sapiens
ggcaccctcctggcagtcgccgtgtgttcctctgtggtctccctgatggccagctctagctgtgtgatcctgaaggccctggtcactccagtgtcagcgcctggtgagcgcaaaatgcgcttgtcaagatcctcccaatctagcgtggtaggagccctgtcatcttcgatagggtgccttgaaaaccacgatgccatgggctgccataagctgcagagaatattctgcctgacaaggatgtgcacttgtgcactgcctggtggccttatggtcaccacggacgcgagtgctgtggccatcaaggccaacatgggatgatgtccgggaagctaggtgccctgatgctgcgaggcagtacttgacgtcctcagggccctgtgtgttctgtacgcgtgccagtgtgacttgtgtaggcgatgtgtcagcagttgttaccactacgccaattcccctttctgtaccctacctggtggtgagtcggtatccttgttacatccggagagaaacgtcgacgcactcggactgggtgcccctcttggagtcaaggcccaccgaaagaacagcggacaccgagcgaaaaagtccctgggcccccctctatagtcttgtagacgcgcatgcccaggcacgttgaaaccaattccttgcgagggataggtacgggatacctcagccctagatacgcgccagttccttcccccaggggactcaggcagttgacaggtgatcggggcacccctaaacgggacttccttgtgtcaccacttgtacctcgggcattagatgtgctcggggcccctggaattgatcgccttgggaagtggcccgtgtgaacccctttggtacgccttccctttgaaccgtcagtttgcctctctagcgcgcaacccccaaacacccaaaggtgcacatcggacctccccaaccacgaaacgcaatggtagcccaagagggttcaaccgcaaggagcactcacaaatccggcgaggcttcgactgtggctactttgtggcaaacattgtgggggccaaaggcggattatccaatgcaatgggagcgagagcgacaggcatggggtcactttgctctcgcgtacaacagcggggaaccgcgggcccgcgggtcctggagacccttagcaggcgtggacagcgcggaaacgcggtcgcacgcttgcattccacactgtcccctttccatatctgtaggcggacccaattggcaaaccgctgtttgcaagagcgctgccttgtcatgtcttgagcatggctcctaaggcccttgtgccacctgggtggtcccaccca

SEQ ID NO: 678570 - DNA, 505 bp, Homo sapiens
  misc_feature (48)..(48): n is a, c, g, or t
  misc_feature (54)..(54): n is a, c, g, or t
  misc_feature (133)..(133): n is a, c, g, or t
  misc_feature (135)..(135): n is a, c, g, or t
  misc_feature (148)..(148): n is a, c, g, or t
  misc_feature (176)..(176): n is a, c, g, or t
  misc_feature (234)..(234): n is a, c, g, or t
  misc_feature (250)..(250): n is a, c, g, or t
  misc_feature (264)..(264): n is a, c, g, or t
  misc_feature (439)..(439): n is a, c, g, or t
atgagatgctcaaggggggagcacgagggcgctgggggcgcccaaaanccttgntccccgacgtcccacggtgatccacatcccgcagcgaggcctccgtgccccgaccatgtcgtctggtcctcaaacaccntnttcatgaaccccntgctgcctggggcttcatagcattcgcntacccgtgaaagtctagggacaggaagatggttggcgacgtgaccggggccccaggcntatgcctccaccgccnaagtgcctgaacantctgggccctgattctgggcatcctcatgaccattctgctcatcgtcatcccagtgctgatcttccaggcctatggatagatcaggaggcatcactgaggccaggagctctgcccatgacctgtatcccacgtactccaacttccattcctcgccctgcccccggagccgagtcntgtatcagccctttatcctcacacgcttttctacaatggcattcaataaagtgcacgtgtttctag

SEQ ID NO: 678571 - DNA, 1259 bp, Homo sapiens
gtgccaggaggctctttgggaaggagtgtcagcccagtcaggtggtgcgctcccggatcactaggggtgtacacgatgaagtatgggtgaacacctgctagctcatggatacccagatgacttctatgttcgagtgggcagctagagacagaggcccctctgggtacttgacagtccaaagcaaccgaacaagataaacaccaaggaacatagagaggatccaataaaacgacgtggcacagcacaaggtactggagaacgcccagatgatgacatcaatgctaaggcgtacaggatcgggccgctggaacaaccaacatggaaaatcacagcccataccgataccggagactccaaggaatacctgaagcgactcctacctgagcaaaaccaggaaaccaaacagaaccaagcccgtgacagaccaacacaaaaacacctccacaggggcactgaaaccctgacataaaaaggaatgcccaaagaacaaccaaaggactcacgtggaaccatgcggctatagcacaaccccaccaagccaggaacaagcgcggccagccgcaacagcgtggagacgcccactgaaagccacacacgagacacaggaaaaggcgaagactaccgaccaaaaccacgaccagacacacggcaacgaatctaaacacgtcaatagcagaaatcaaaacagaccaagaagaagaggaacgcccaacgacaccgacgaaccagagagaacaacgcagaaccgccaggcaggacgaccgagacaaacaggacgcagccaacaacagacacacagacgaggcgcagaacgaccacggagaaacaaagcaagaacacgagaacaggcgaccacatccgaactgagacagagagcacgcaagaccacaggagggcccccaatagcgacccacaaaacagccaagtaacacactagaagaaaacgaagacaaagagccaggcacaaacccaacgacaaggacgacaagcaaaccagagaccaaaagggccaaacgagaaccgacagacagacgagaagcacagacagaacgcgaaaatagagaagaagcacgaccaaacgagaagacgtcagcaagagagggaggacgcaggggcgcacaggagccaccgccacgaaggcaacgaacggccgcagacagccgcccaccgacgccagcagcgccacacggcccaaggcagggcggaacgacaccgacaagacccaaccaaccggacccgaggacgcccaacgccagacg

SEQ ID NO: 678572 - DNA, 163 bp, Homo sapiens
gctgccccacgacatgtagaggaaaaccgaccatgggggaagaatttttcccgccccccgtcccgaaggtattaacacactgcggggtgtgctttgttgtacaagctccgccgacacgcgagcaccgagctgacctccaaatatcgttaagctggagcctggc

SEQ ID NO: 678573 - DNA, 347 bp, Homo sapiens
cagctcggatccctccactagtgcaggccaagcatttgctggatcatttttctacaaaacttgtttgttcaatataaaacactctctgaagagttgactgtctttcagctacgtatcctggaaatcacattttgtaaaactggggaccacttcataattgtcagatactttttaaaaattattcagtacatcacttttataaaaaaaaaaaggcttcttgaaagaaaattagatccctgtggccccatatgtatgattaactctagaatgatctataccacgtctgtttaaattaactttttattgacatgccaggtgtccatttttgatgctaatcatggctcctt

SEQ ID NO: 678574 - DNA, 109 bp, Homo sapiens
agttcttctccttcttccttctccttcttcttccttcgtcaccgtcttctccttcttcttactttcttcttccttctcctcccttctgtcgtcttctcgcaacagtata

SEQ ID NO: 678575 - DNA, 697 bp, Homo sapiens
  misc_feature (238)..(238): n is a, c, g, or t
atagggcccgttgctctggtggcccaggcgggagtgcaaggatgtaatctcagctcacggcattccgtgacctccgtgtgtgctcaagcgatcctcccacctcagcctcccaagtcactgtgggacttacaagagcacgccaccatgtgccctgggataatttttctctatattttttgtgtggtagagatgtggggttttggcgcatgtgtgtgtgcccaggcggtgggctctcaangtgtgatctcctctcctgcgccttcgagcctctcccaagagagtgtggtgtggagacaattcacgagggtgtgtgtggagcccacagagacacaccggcgggtctgtgcgtctattctccttatctctctgagacacacttctcgcgctgtgtgggggacacactcctctgtatctctctacccgcctttcagagtgtgcgccccacaaaaagagtgttaactctctccccgcagatgatattgagacacacacactctcccctctccccccctttatctcacgtgtgagacaccacgcccacagatagtgagagggcacacgaaaacactttctttcacagagacgccacaacacccttttgtgcacagtgtggggccaaagatattcacgcggctctaaacacacccacagagacatctcacagaggggcgtccatatctctcactatcaaacccta

SEQ ID NO: 678576 - DNA, 155 bp, Homo sapiens
  misc_feature (6)..(6): n is a, c, g, or t
  misc_feature (87)..(87): n is a, c, g, or t
  misc_feature (114)..(114): n is a, c, g, or t
cggcangatgccatgtctttttgatcacttaaatagtcaatttacttatgatttatgtgtttaaattgtatcatggcatgtcatgcngcaaagttactgagttttcaagatgtntcacagttatctggcatggccataatttgttttgacagtga

SEQ ID NO: 678577 - DNA, 105 bp, Homo sapiens
  misc_feature (61)..(61): n is a, c, g, or t
agatccctattctcagcaagctaaaatcacctggaaatcataccagaccctctgaatcagnctgtcccaagcagcacgggaacccctaaagcttgaaaactccag

SEQ ID NO: 678578 - DNA, 116 bp, Homo sapiens
  misc_feature (97)..(97): n is a, c, g, or t
  misc_feature (108)..(108): n is a, c, g, or t
aacacttcatctcagcaggcagcaaccaagcagccagggcagcatgggccagcccacactcattccccaacacagccgtcgtgggggtcacgcagcntcgcacattcngtcaatcc

SEQ ID NO: 678579 - DNA, 107 bp, Homo sapiens
aggatcttttgtcacgagcagacagctgctgctgaagggaagtttggaatagcgatggtgtcattgtactgcctgcttgaaggtgccgcagcctgtgagatagggaa

SEQ ID NO: 678580 - DNA, 241 bp, Homo sapiens
ccggttgatagatacttgaggtcaggagtcaatgtactagcctggccaatatggtgaaacaccatctctactaaaaatacaaagattagctgggcatggtggcatgcgcctgtaatctcagctgttctggaggctgaggcagcagaatcgcttgaacccaggaggcagaggttgcagtccccagcccggcccggccccagcccggcccggccctgggtaccggacgctcgaaattcgtaat

SEQ ID NO: 678581 - DNA, 411 bp, Homo sapiens
  misc_feature (2)..(2): n is a, c, g, or t
  misc_feature (63)..(63): n is a, c, g, or t
  misc_feature (70)..(70): n is a, c, g, or t
gnttctaagagaccagagcttggggttggagcttggtctggccagcctctgtggacacaaagncaaaaangcattggttttgcctgtaaaactaaggaatttaagggagcgtcacatttgtaacaacacctgtatgaaaaaaacaccttcacatcaaagctaagacaccaaagggctcaagttcaccctgcaggtgaacaccaccatctccaaggtgttcttaaaccagcccttttgttgtgggtgtgtagctgtttttaaagaaaaaaaaataccaacctgttttttttcaaagttatcactgggctttgtatttcgatgtaacttcagaatacatcatgggacccatgaccaaaagtcagctcaaaacataactgaacaaggatccgaataaaccattcttgcttcgga

SEQ ID NO: 678582 - DNA, 194 bp, Homo sapiens
  misc_feature (1)..(1): n is a, c, g, or t
ntacatctccagcacacaagaacttcaaaacgcctgaactgcagcagccaggtattcctccaggacctcctcccccaggatcttgcttcaagtgccgaaaatgtggccactgggccaaggaatgccctgcagcccggtgattcctctgtaagcttgttgtcccactctgtgtaggggccccactgtgctagtga

SEQ ID NO: 678583 - DNA, 147 bp, Homo sapiens
gcagcgtacctcagttggaaatgcagaaatcatccaccttctgcgttgatctcactgggagctgcagatcggagctgttcctattcggccatgttgcctgtcaccctgacatttgtctctttacgaacacagtattctgtctggttg

SEQ ID NO: 678584 - DNA, 105 bp, Homo sapiens
ataggtggtagcgtgtatatttgtgtgtcttgtgatgaaatagggctgcctttcatcttttctttaaaaaaaataaatgtttacgaggacatttccctcaggatt

SEQ ID NO: 678585 - DNA, 897 bp, Homo sapiens
  misc_feature (3)..(3): n is a, c, g, or t
ctncccttttatattatatctattacaacgcacagacaaaataacttcactcttggtccaaacgttgccctgccaatctcccgcacgttttaaccccaaagtaaaaagaatgtgcccgaaacaaaatactccaaacaggccttcccctatcgggttcccgcgcacatcttacccccgggccctctccccccttaggtgtcccacaccccagatgtgccttccaccaatcgcaaaaaaacttgggcgcaccccgccatattcccaaactttttttatataccgccctcaaaacccagcgggggtctcccccagagttccccaccactcctacctctgcccaatttctggtggccccaacacaccccattaggggcgtctccaccaaggccgtgggcaccactgacgcatcctcgccggggtgggcttcccctcgatgcccgccgacagtctaatctaatggcgttttgccgcccggccgccgcgagtccttctcaactaagtcgggcgccttggatctgagccccttccagtaccgccctctgggtgtctcagatcattaaagtcgggcaaatgaacttcgggggtcccccgactcttagtttattcgggtactctttccctacaaaaagcatgccttcggacccccgccccctctggggcggcccaccttatagtgcgctctctgctgtggggcaacacccggaggcgctcaggctctccttggctcgtttagttgttcgctagcccagcacccggagggggcgacggtcaagccacacctcccgggtggggcagtcttcgacgcccccccccacctgcgagaaaaaacacctgggctgcccccgatagttttcccccaccccccccgtaaaaaaaaaattcccccccacaataaca

SEQ ID NO: 678586 - DNA, 616 bp, Homo sapiens
  misc_feature (39)..(39): n is a, c, g, or t
  misc_feature (98)..(98): n is a, c, g, or t
  misc_feature (182)..(182): n is a, c, g, or t
  misc_feature (321)..(321): n is a, c, g, or t
gatataatccccaggtacatatggagagaattcttgganttcatagcactgaaaggttaaatctataggttagtctcttaataagaggcaaaaaattnaaaaattataactaccaatacttgtgtttaacataaggcaaaaaaatttaaaaattgtaactgccaatattatgtttaactttnaatgtacatatacaaaatatgtatgttaactaatatacatatgtacacatgacatacatgtgtaggacatgtatacataatatcatacatatgactctaaggtagaatacatgtcatacatatttaccagtgtcttttngcactgttcctatgttttctgagtccttcacttcagatatttaagttttagtgcccatgtcttctatacttaatcctttgatttacccaacccttaaatatgcattgtattagtttactctgctgcctatttggttggggaacaaggaataaaaacagtattttatttggaataatgttggaatggaaaatgtttctgtttcagcttagataatatacaatctacagacttggactcttccaaaaaattacaatatgatacacattctaaaatgcataaggtcaggcaggtggcg

SEQ ID NO: 678587 - DNA, 498 bp, Homo sapiens
taacagtaaagttttgtggagtttaaaatatagagagaatcaaaataaaggtcatatgtccaacaatagtatattagttgcattttcctactagagggttaaggtactaattcgtcacttctagggtaaaccaatgccatagtttccagcctcacagccaaccagaacttaaacttccctcccttccttaaaacgccaagaacagagagacaaccaaacagaataggcaggacaaatagcacagtaagcaggttgatttaaacccacatttaccacttcaaaacttttgaggatgatatataggagtatattagtcctttctctcattgccataaagaaatacctgagcctgggcaacaagagtgaaactccgtctgtgtagaaaataaggtttgaaaacaggattttataagcctgcttgtaaccagtggtggggcaaaactgttcaatatagctttgttgttactggaactatgttaaaaataaattgccacaagc

SEQ ID NO: 678588 - DNA, 1531 bp, Homo sapiens
gcattgtttcagcggaggccaaatctgaagtcctttccagggcagtggctctgcttcatcttattcgccagccaaagctaggaacagcgtacagagcgagagcagacacacttcagcagccaaagcgactcgcgtggcaaacgagcagaacacccatagaacagtgcacgctcactccgacttaccctggaacaacccttaacagagaaccagaaggcgacatggtgctgtattgtcctgctgtagttggtgctgaacacggggccttgccacgggcgggcaaactgcgcgcgaaattggtccaacttggaaacctcctacgtcctctggaaggccagaacccgttccccaacagagttaacccggttgggccaaatttcctggaactgcaaccgcggagcgaaccggccccacaaagcgaattgaaaggccaacgcacttggacttgacttggaaagaccgaacgattccaccggccacttaccttgaagaaaaacccgcgcaccagcaaatctcccagcccaagttccaggaggagggactgtgacacacgcgaagagggccccaataaaaggggcggcaaaagagaggggccccaaagcgcctaacccaggggaacaccccaacatagccacaacgacaagactgggtctaacagaccacacccctctcctaccccccgttaccccttggaaaccccttcgttgtgcgcactaaaccgccgcacaacggaactcgccaccacgcttactacacctctaaacgctgaagcacggcgctaacaagcgcgaaacgcgcctctatccacgccctggggcgctcttaaacacctgcccctggcaaagacccccctatcagtcggcccacaaaccccttagcccggcaaaccccccgccggcccacccccgggccggccaacgccaaccacccacctttggcccacccccactgcgcactcccgggaggcgcacccactgcgccacccacaccgcgccgcgccctaccaccatcggcagagacacccccacgcggcccccgaaccacccacaccaccaccccgcgcgcgcaccacacccgcctcgggccaacgcgagatattcccacgacagtcctaacccaaacgccggcgcgaagcgaaccccgccaccctggcgacgaacgccacaacacgaccgggccaatctcccccttgggacccggcccaaaccgcggctaacctgccacacaaacagcggcaacggcaaaagccacgagcgcgcaggacgaaacacaccgcgttctcagaacagagaaacaaggagcgggccacaccttttagcacaactccaggctcgtcccgccaccacctatatgggtgcggcagtccgaaaacgccatgcgggaaaacgaactattcatgcgcaccgctatcggaacacatcgcgtagttgagcgaccgcacgttttccggttgtgaaccacgccgccgacaagatttgtcgtagacacaacaactttcgccgcaattcacgctctggtagtctcataccac

SEQ ID NO: 678589 - DNA, 130 bp, Homo sapiens
agagagtaaaaaatataaacacccatagtaggcctcaaaagcagccaccaatctaagaaagcgtgcacagctcaacacccacgtacctcacaacaatcccacaacatataactgtaactccatcacaccc

SEQ ID NO: 678590 - DNA, 375 bp, Homo sapiens
aatcccctacttcacaggaatgctaagctgctattatttgattataaattggagatacattccttttgaaaaagactggctctaagatgtaatttgagtattctccaaatcacatatttaaaggaaaaagagataaataacagcaactaaaacaagttttacaaatgactacaaagtaattatgtttcttttcgtggctttttgctttggcttaaaggtcagcatgaaaacagatgagagttaaacttagaactgagcatatcaggtagagaatcacttaggttccatcgaacacccactaccagccaagtttttgggtttactggtcttaaaaaaagatatatgcccttctgaactgagggaaagaagggggag

SEQ ID NO: 678591 - DNA, 389 bp, Homo sapiens
ttaaatgtctggtatgatacttctgaagcagagctgtaactattttcttaatgttacagaacatattgcattcttagagttagaatgacaggtaggtttggaggagaacttttaatttttaattaaaaatgtagatacatgatgatgatgttttctgtttcttcatgaagactacgtcaaataaactaatgaacatattcgagcccctcctacacaaaataaagttacctcccactgttttttgcaatcttgcctggatacctaaccagagaactaggatgttgaatgctctgggggaacatcctaactcaggtataaaacaaattactgtatccaaaggaaaacagaattctgtgatctgtgatataaataaaatgtggcaatttcaa

SEQ ID NO: 678592 - DNA, 114 bp, Homo sapiens
cgcgtgcgtgcgtgcgtgttgcctcgctcctgtgattgggtttgagagtttcttggctgtgcttgagaatggacggcgctccggtggccgagttccggccgacgatgacgcacg

SEQ ID NO: 678593 - DNA, 146 bp, Homo sapiens
caagcacctctgagaatgtatcagtatctcacctatctattacctctatatgttatgtaaagatacgggcgatgtctacacatctgagcatgtgcatacttagtccatacacaatatacatgtatttcatttaaagagttactttg

SEQ ID NO: 678594 - DNA, 397 bp, Homo sapiens
aatcagttctagacaaacatctatgatctatttcctttcaatggatagggaattccagcatcgctcagagcaatctaacaaatcccacatgtcttggcttgaatatgtatatttagagggacttatccttaagcaataaggcctgagggggtgtggtatatggccaatataccacggctaagggctgttcttcggcgctacgctgaggagccttattgccataataaactggttaccaacataattacagcagtaaaaataaatgttgtcatacccgtggtatatggtctgatataccatggctgtcggccaatcagcatccagggctcgaaccacccagttttgaagtcagtaacttataaagcgaatccattgcaggaaggcaagccgtcgacgc

SEQ ID NO: 678595 - DNA, 148 bp, Homo sapiens
gggggttttttttttttccccccccctttttcccccgcccccagggattaaccccttttggggggggccggggggccccaattgggccccccctagaaaggtaaaaccccccaccaaattttttttttatttattttttggttcccca

SEQ ID NO: 678596 - DNA, 228 bp, Homo sapiens
ggtgttaccttctacaagaagtagagacgggggttttgccatggttgcaggctgtcttggactcttggactccagggatcttgcctacctcggtcctcctagaagtgctgttgattacaggcgtgaggccaccaggacttgcctgactggacatttttaatttttttttttctttgagatggagtctccctctttcgtccgggctgctcaccgcaagctctgcctccc

SEQ ID NO: 678597 - DNA, 484 bp, Homo sapiens
taagtagaaccacctgtatataaccttagggtatatactcagtaatgggattgctaggtcaaagggtaattctgtcttaagtcatttgagaactcaccaaatctactttctacaagggctgaactactttacattcccaccagaaatgtctatactttccctttactccacaggctcgccagcatctgtaattctaggactttttaataatagccatttcttagaacaaattctgagcccaaaagaattcaggcctggtgatcagctcatgttgtagaaacagttacatgaggagcttctcattactgagtagggcatttgccttattcctgtgtttaaagtcacctagctctgtttaagcagcatgggtttttccattaaggtacttgttcagagttggattcaaattgcaaataatgtctgatgatcattaaaatcatttttaaaaattacaatgtttatacatctggttttaaaatctata

SEQ ID NO: 678598 - DNA, 945 bp, Homo sapiens
gacagaagcctgtataacagcacaacaatagacaattacttatgtaggacctagtaccacactgaagagaatccatgtagtaatattttctaagattaaaaactgcttaagctcatccagaatctcatcaggactggagcagattccctctggagctatactatgatatgtagcgtcacaagagactctactattcgtgtatacgctaaatagataagtgggcacgaacagttggtgtatattggcatctattaagtccatcctattttcttattacccataaaaatgggtgagctgctaggtgtctctgactacgacctcccgagaaaacgaaaggcatagttataggaaactggaaagatgaatgagtggccccgtgaaaggatcatctcagtattatgggcctgccacatgtgctacaagtagtgggtcatggtggatacctgaacccgatctacatgctcaattggtatcatacggatgctggccatcttagaaataatttctaatgaaactggcatagctttgactgttttagcttggcaagaaacgcaaatgaggaatgctatctatcagagtagactggcttagactacttgctagtagctggaatggaggagattaggtaggaaaaccgtttacttaactaagtggtggctagattataaatgatcaaggacaggtggttaaaacctaggtcggggcgtgactcagtggcacatgtgcctgtacagttgggcgagttaatcttgagtctatgacaatggttccagttaagagagataacctccatgagggattgcaagaaagaacgctgcggcccctgtttacatgctcgtagcgcgacggtgggtctgggatagaacgcattgtcgaaggcaatcacacaggaagaagaccacaacggggaaaagacgtcatcaccccgaaggagaagaaaactcg

SEQ ID NO: 678599 - DNA, 139 bp, Homo sapiens
ctgtctagaggatcccataggaagatgtgcttgaatgtgccggaaagcacagtcaaactcttcaccgctgttatttctacaccagactttgatccccgtgttaataaccttcatcttctcactgttattcagcagcaca

SEQ ID NO: 678600 - DNA, 197 bp, Homo sapiens
gttatctacgtcctcactcggcttagacacgaacggggagaggaggtttggggtgcccgtaacaatccaccctcgtacctctcaggcccaccgtcccttccccacaggtgctcagtccaccaggacaataggctcattggtgctggcaggatgtgagggtgcaggtagagggacagaaagagaaacccccaattagg

SEQ ID NO: 678601 - DNA, 859 bp, Homo sapiens
tgctgacatatctgaagtgcccgcgagaggaaggagcaggatgtggagccatctggagccgggcagggtaagcacaggacaagcatctgctggaaactttgcagagatatctagtgcgctgatttactgtcctttggggagtccatgtcagaacccagattcatgaggaagccggcatctggcaaaggttggggtacacaattgtgcttgattatcaggacatatgataaatctgtctaggcgtgtactctgtgccagattgtggatttcttatttggcccgcatcagccgtctgccagcaaagcaatacaaaagtgtcacaacaacaaacaaacaacaaacatgccaaaaaaacctagacttagcatagtgatatcaaaatatacagagtcaccttgaaataaaacagtggtggaggtgttggcagaggaaggaagggaagtgatatggtaaaaggtatttgactaacagggcagtgggcgttgttagctttgatgcatactcatgtactccacagaaaacacaaacccaaaattatatggtgcttaattttccagatgctattttaaactttttacttatataaccttcacttatttctcacaataactctaaaaggcaagtactattagtatcatcctctttttacagagcagaaaacaagtacagagaggtgaagtgacttgcccccagacacacagctactatgcactagaacccagactggaacggtagtggtctgattccaaagtgcatgctcttcacttctatattctcagaagcactgttttatttcaaggtgactctgtatattttgatatcactatgctaagtctaggtttttttttttttttttttt

SEQ ID NO: 678602 - DNA, 816 bp, Homo sapiens
  misc_feature (137)..(137): n is a, c, g, or t
cacttttccccccggagggggggccgctcgtccaaggattgactccaagcccaggtcagttcgcggacctttgccttctttggagtaagataccgccccttcccgcctctctggttgactccccttcaacaaagtgncttgtcatgttggccacccgcacggtgtttgctcttcctgccaccgtcgtcgccacctcgccgttgccattgttgagcggtcgtggaccctctttgttgacttagtgggcctccgcaccgcctatcagcggggcgtgagctctctggtatcttcttggagggctcaaccttccgtgtgtgtggcacccccaagcactccggttcctttcattggtaaccccaacacttggaagttaggagactaagtggctcaccacgacgatatgtctgtcatagacaccacgcacttggatttatgtgtcggggccactccacagtaacatgtgggagatacgatatggggattctgttcccctgttagagcgagatgcaaaataactggcccctaatccccctttccacaattcacgcgcctcgggtaactcgcgcgtctacaatgacaagaatattctcgcgaccattgtgaacccgctcacgactatttctgccaccactcacctcctctacctcactcgcattgtcgtccttcctcttctgctggggctatatcacccacgcgatttttgttcctgttcccgcccgaacctatagagactccgttatgagaaacttcccataaacccatacaataataaatgaaataacaaataaagaaaaaaacaaaaaacaatagatacca

SEQ ID NO: 678603 - DNA, 122 bp, Homo sapiens
  misc_feature (5)..(5): n is a, c, g, or t
atcanagcaatggccgaggtatgagacagcaaagaccaaggcctggaggtggagcgtctgccccagtgaggaggcaggtggccggcgggcactgtgtacagggagcaggctgagccccgccc

SEQ ID NO: 678604 - DNA, 640 bp, Homo sapiens
gaacctgggaggtggaggtcgcgttgagctatcatgccattgcacaccatccctggcgacagtgtgagtctctgactcaagaaaaaaagattactgatgtaatatgcatattgaacttattttgatattatctgttaatattactaaaattaattcctaagattaaattgttgtttttatttcagaattataatgattctttgcttttttcagtttgaaaagtgcaaggtgcataagttttttttttttttttggccttgggtttttacccaagaaagagatcaagaattgagtgttaagttcacaagaagtggggaaataacacgtggttagatttcaataaccaacacttaaatgggattacgtgagttagactacttttgaaattttctctaacagcttccacgggtgaacaaataacactataaaaccacgagccttacactttcaagcttcccgggctctcctttgagtaagaacgggctgtgatttttcaacaattttgtgtgtcacatttctcacttgggatcttttcaaaaaaccgttgggaacaattatacatctctatacatgtttcaagaaatttccataaaaaccattcccttaggtagttaaaaaaccccatgtaagtcttatccag

SEQ ID NO: 678605 - DNA, 377 bp, Homo sapiens
ctctacgaggatctctgcgaggataggaagtacgggcttgaaatacatcccccttgctggactctgagctgacgaattcccctgcgcatgcgggactggctcaaagaacggtctgggtcacctgtatgagaaggcttgaggacaacaaccttctgactgagaagcagaagctgcgggtgaagaagatccatgagaatgagaagcgcctggaggcaggagaccaccccgtggagctgctgggccgggacttcgagaagaactataacatgtacatctttccctgtacactggcagttcggccagctggaccagcaccccattgacgggtacctctcccacaccgagctggctccactgcgtgctcccctcatccgcag

SEQ ID NO: 678606 - DNA, 101 bp, Homo sapiens
acgcgggatcctattaaaaatatataatacagcaagactacgtgcttacttcagaagtactaaggtcctttgaaaactatatgactgctaaaatcggggta

SEQ ID NO: 678607 - DNA, 116 bp, Homo sapiens
gcaggaacgacttcttggccttctcctcctccatgggggacaccccctcctcctccacctcctggatctcgtcgaaggtcaccggaagagtcttgaagcgagactggcgcggccgc

SEQ ID NO: 678608 - DNA, 162 bp, Homo sapiens
gactctccgctcggacaacaacagagaagagagtggcgaccgctgaggggcgtgacgccaagttggtccgagcggacccgctcggaccacatctacaaatatgccagtatcaggcgcgcggcttcgaatgccaaagtgatgtttggatctaatagtgaaata

SEQ ID NO: 678609 - DNA, 481 bp, Homo sapiens
agctgaattagccctattcttatcatgtgctaaattaaatgattacttgaatcatactattggttgttctcaccaacaggaatccggcatggccataggaccaagtaagtagaaagaaaggctcagcagatacaacaagcaaacgaaggtctctggtatacctaggcagacagtccctgtgtcctcccgcattgctttgtactccctgggctacttaacaattcagggatgctgcgtcgtattgattactaaaacagagcatgctgcctctcaagcatctgtttaacaaagcacatctggcactgcccttaatccatttaaccctgagtaggacaccgcacatgtttcaaagagcacaggattgggggttaaggacacaagatcaccaggatcccaaggcagaaaaatttttcttagtacagagcaaaatgacaagtctcccatgtctacttctttccacacagacatggcaatcaagctg

SEQ ID NO: 678610 - DNA, 645 bp, Homo sapiens
tccgtctacgacggcggttgggggggtttagcccgaagcccgcgtcccgcgaaattgtgcaaaaaggcgctcggatgtacccccattaggggggataaatgccagttgtcccggccaacgccgtacatggagccatggtgaatgtacgattgtagattatcccgactagttcccgcctatcgtcgtagctgactccacgttgttactcgccgccgcccccgacgcccttgcgttgctattttggcacaccggaaccaggtttaccatggggtaccacccgcccttatgtccccggcccccctccctgctccccttagggggcctgtcccccgcttaccggctttttgcccccaaatggggccacttatcggtaggattccccaaaaacccatatgccctcaatcactccccacccatcatagcccccactcacccctccttaacctctaacttcttaaacctacggcctattttatctccacccctccattcacacctatctccccactatttgttaaccaacggttaaaaattaaaatgaccacgcgtgttggaacaatacccaaaacccacccccctttctccccacaatttttgccccttcccccctatcctacctatttccccctttaaaccaaaaaaaaa

SEQ ID NO: 678611 - DNA, 944 bp, Homo sapiens
gaggagaactagtctcggttttttgttgtttttttttcaaacaaccggttaattggggcttatgattaactaacggcaggtctaggtgcaggaaggccagggtcccctccggcgcgtggtcacccaattccacagagcagccctagggccaggtgcagccacggccacccagggcacaggggaacgggacccagtgctgcaggccgtgctctccgtgcccagggaagatgccacggtggtgtcggtccggacagcttcagtgacacagttaccaagcagcatagggagggctaaagattggtggggtgtccccaggcctctccctcgggggctggggcgcatccccacagcccccaagggaggggggctctgccacggggcccaatgccacagctccacgggggggcccctccggggcccagggggcagagccaagtattctccaaagggggctgggaggcccggggggggcggggagaggagcggggagagcctgaaaaagacccaaagggatgaggccaaccccttgcattaattccacaagagctcctcgatggctgaaaaggagctcgggtcaaggatggagtccggcgtcgaccccgggccgtgaggtcctccagaaaagccagggtcccagaaaaaggtcacgggagggcaagagggagaccagccgcatcgtccaaggcaggtctcagcctgcgaaaagtttgccctcccgaagcagaggccaaagggaacagtgcctcagagggctccggggagaacggaaacggcccagcggccaaggtaaaggccggagagaaacacgggagggcagcccagtgagtgatcggcagccggacccccccaggcgtgcgaagagcagcgccgcgaaaaagttcgcagccggaggaaacgaaaggggggtcaaagggcagagaggcatgccacggcgagacacggaa

SEQ ID NO: 678612 - DNA, 164 bp, Homo sapiens
acacacaataattttacatatttatggggtacaatgtgatgtttcaatgcatgtatcatgtataatgatgaaactggggtaattaccatatccatcactttcaacatttatcacttctttagggtgacacatgttcaccagacctcagttctcccaagcatgct

SEQ ID NO: 678613 - DNA, 726 bp, Homo sapiens
  misc_feature (350)..(350): n is a, c, g, or t
gcagccagcacaccggcctcgcgctctgggccgttccgccgcagccggcctggcaccggacatgttgggaagctctgggacgcggtagccgagggagcagtctccgcaagtgccggcccccggagccagcacgtcgtcttcatagcctcccgcttccatgggccccgtaggccagtcgtcgcccccaatcctcgccgtggcaccgctcaagtaggaggccaaacgccagcgccgcagcccttgcccgcccctcggcccgcccctgcgctccggctccgcctcgggaccggggtctgggccccgcctcagccagcggcctggcatgggaagcgctgggtcaggttggggcncggggctccgctgggctccaggccgcggggtccgggcgcgaaggcggggtccgagccgtggcgcacctcgcgggacgcgctggacggcacgtagtccagccgctggtgcccgtcgggtccgagctccgggaagcggggcccggcgcccagggtgaagtcatccgggtccgcgaaacccgcgcggcccccgcgaagcttctcgaacaggccttgcgggcgcgccggcgtgagctgcgggtcccactggtactgctgctggtagagctggtcacggtggaagtggctggtctggaagcggaagtcgtcgccgtggctgaggaacgtctgccgcgacacctgccgcgcggccgcgaattctccacggcgcccgcgccct

SEQ ID NO: 678614 - DNA, 650 bp, Homo sapiens
  misc_feature (12)..(12): n is a, c, g, or t
  misc_feature (46)..(46): n is a, c, g, or t
  misc_feature (60)..(60): n is a, c, g, or t
  misc_feature (136)..(136): n is a, c, g, or t
aaaatcctaganccacaaacaaagccagttaagacctttaaaagtnaccttttgaccaancctggtgacccaaaaagggcccataaggaagacctacctaattaccccttaagggccctcttgaggaatgcagganacgtgctgctgacccctttcaggtcccctgtctccctcaacagaagccctaggtgttgtaaaaaaagttccctttgtggcccaagactctgctgtttttgcaattgagaccccctgaaatttttttgggcccttcaaaatcccaaggtaaatgcccaagagtgagcatttgactttggagtactgctatgatttgaatatggtgtgtcccctctgaaactcatgttaaaattttattgccattttggccatgttgggaggtggggtctttaagaagtgattaggtctttaagagggattagtgcctttctcatgggagtaagttagcaattaaagaagttcagcccccttttctctggtgtgtgagtgctctctctcccctgctcctttcacttttccaccatgctataaaacagcatgagggcctcactggatgcagccacccaatcttggacttcccagcctccagaaccatgagctaaataaacctccattctttataaattaaaaaaaaa

SEQ ID NO: 678615 - DNA, 1803 bp, Homo sapiens
gtgcaatggtagcgatctcgtgctcaccacaacctccgaccttccaggttcaagtcattttcctgcctcagcctcccaagtagctgggattacatggcatagtagcctaccatgcccggctgatttgtggatttctcaaggtatgatatgtactactcactcagtcgtttgggatcggtgggatgctcatacagacaatcgccaatgcatcatgctgagtgatgcacgtaccctgccccaccctacgtgccttccctcaaaggtggcctggcgattcattacgggccatgcaggaacaactggtggcccacctgaacaaaactaggcgcctaaacattaaggtgtcgttactacatttggaaaaccttgggttcgacaccctactttgcgccgcaacttaggttagttctcctgtcgtgtcaacaagggacacccgcgcaacgatctttagaatcccgaggccagctaatcgcagggtaagattacagctggaaaccacacacagctctcaatacgtttctcacacctactatttccccgttatacccgatcgcggattatcatctaccatataaccccaaaggaggtcttcaaggggtacctcattttccgattacgggattcatacaagcagtgcttaagcccgttgggagaaacctgctgctcacagtttcaacggccaaacattctaggggtacagcaggtatcttacacaaagcaacagcactaaggtgggtcccacccaggattagcacgccgccccttatagacaccccggacattgctgctatggcacattataacattaactcccatttgggccatcaccatcagttgtccattgaaccccccctaaccaatcagcaacagatgggagccgaccatagagcattagacacctacacgatccttgatgcaaggactaatgtctacactagaggcgggttctcgcacttagtaacttcctcccgcgatgtatttgtaatagcccgcacccttacatttatcgatccccaaccacagtatattcacccgccgagccaacaagacattccagctgtgatctgcccccctcctactaacagctgcagattctacaccaacttccatcgggcgctcgccctgcaccacccccctataataaaacacgtgtcggaccatcaattacgacgaaccagctatcatcactgccacctaactacagtgcagcaccgatcctcacactaccctgcgctacctgcggcatctcgctgcgactctactcctacactgctctctatctaaacaaccagtatatataatacaccattggtatacacattacgcaccatccacccacccccgccacccaaaaaagcatcaaccattctatctcacaccacaccacacgcctctctactttatgtacactacctccctcctatcttcaactacacacaactccgtcattctttttgtaacacatcacactataaaactcacaccaataccctacacatctctatctccactcccacacatcaataccactaattcaatccacaccactcagtacatagtacctctcatcggactcataaattctgtcatagatgtcacagaccaacctataacacccccatacgctacttagactactctcccccatctaccgatactattctcttattattctccaatacacccacctccttacattgccgctacaaatacttacctacgataccaatcaacactatctttgctgcatctcacctaacctaatcactacacatttttctaacaactatcagcaacccatat

SEQ ID NO: 678616 - DNA, 643 bp, Homo sapiens
cgtagtcgaagtcactgcccatggtagttgctggtgatccgcaattacaggacccgaggtgtgggaagacatcaaagacagaggcacaggtagatgaagaaggatcagttacttgtcagaatactatatgatgactccaaaacttatgtattaggtatagctgctgcaagcatagatcctcaatctcaatgctggagaaatcctccaaatagtaagggaagatgtttattcgtctttatgcccagaatctggttatgatacaatcttgcgtgtcctgggctctaatgtcagagaatatctacagaaccttgatgctctgcacgagcagctataggtaccatctacccaggaatgcgtagcaccttcctttaggtagcactgatgcagaaaagggcaaaggactcatttagcactacatactcagagagcagaaggaacttacaggatattgtcataggaactcactccaaaacagatggcacaacaaatccatggcactgacaaatagacatgaaggtatattcagcaaagaaatgaagaatgtgatcatactcaaaattttaattggaagaaaacagagtcaaaagaagaggatataacatgaagatcttgaaagaatatgaagaaaatggtaccaggaatt

SEQ ID NO: 678617 - DNA, 522 bp, Homo sapiens
ttccgattacattagaaccccgacaagcgggccccaggccccagtatttttaaaaactctctcggtgcttcctatgcaccgcccagtttagaagctgttgtcttaaagcagtggttctcagaattgagctcatgggagtcgcctggagggcttgttacatcacatattgctgggcgctaccccagagtttctgacccaatacttctgtagcttggccctactcgctcttacaaggttcccaggtgatgccgatgctgccgctccgggatcacacctggagacctagtgccaaaccctcctaatcaaggcaccgactcagccggcaccgcgggatcaccagggagcttgttagaaatgcaggtttagagaccccgcctcagaaccattgagagagaatctacatattttattttgctttttattgacccataattgtacgtatttttggggtacaatgtgatgttttgatacatgtatgcattgtgtaaaaatcaaatcaaggtatttagcctaaaaaaaaaa

SEQ ID NO: 678618 - DNA, 130 bp, Homo sapiens
tagcacagcaagggcaaaactctttgcacctgatttttgctgcctccagcagcgatgactggcctcgaagcatgtatccctagccccgctgcgagacttttttcccccccaggagcggccccgccccaag

SEQ ID NO: 678619 - DNA, 825 bp, Homo sapiens
ctgatacgggccgcgtttggaatatttcgaccactgcggtcgggatcttatagtggataaatgggaatggaaacgtgtgtgttcctccaaattttcgtattatgagtcatagctgtgtcctataagaagcctcatattacagagttagcttttgcacctaaattagaatgtatccatgaactgttcctcccttttctctgcttttctcctctctgttcctctttataataccacacgtctgtagcttgcattataagttagtcattcttccttcagctgtgatatcccaaaactgttaatacagaaaagagacatttcagctgtgattatgaccattgtttcatattccaattaaaaaacagaacagcagcctagctacttaaggtggggatttccatagttccaaagaagatttagcagattagagtgagttcacactttcaggtgacactgtaaggttctctcagacctgagaaaactatcaactactttctttaaaacagccagagggttgaaaatcctctggacgacaccgaaagtcactttggcatgttccgtaaggccaaatgttaacacacacgtatagcaggaggcacaacgttcaacacctcaagatcaaaatggatttgaacatatattctatcgatatcatatagacagaaaccccaagacgaataagcattacctcctaatttgacttcataacctttcatatagaaattggcactgattaagaccaacgtagggacaatgaacactttcattctgacacacgtaaactgagacatcaaggaaaccgacatatatcttactctgaattcataa

SEQ ID NO: 678620 - DNA, 320 bp, Homo sapiens
tcggtaccctgatggcgctgatgacaccttccgcctctggaacacctaccgcctgccaggcgaatgggacaagctgactgtgggtgggggccgtgaactggaactccaaatccacactgcaatatgcgcgctataacagccacgtcacccaggatgactacttcgtcaccagcctgatggctcgctaccgcatcaaccagaacctggcggccacgcttaacgtcaacaacgtattcgacaagaagtactatgcaggcatggccggcagttatggccactacggtgcaccacgcaacgctacggtgtcatcagcgccatca

SEQ ID NO: 678621 - DNA, 1400 bp, Homo sapiens
ctgccgttcggcgcctccctgatatgtactcgctcctccgtgtgagtcgcatcttgtttgtccgccgcgccacctcgctggtgggttgtctccactgctgggtgccccccctcgctcggtgtttgttatggctctctctcgtgcttgcatcgtccctcgccttctatcctcctgccggctctttttctctctttgttggtcgcccgtccccctggtggtgggacgcgggtgttcccccctcgttcctacggggtgggcgcccccccagtgggtgatttgtctccccccatgggggtattctttatgtgggccctccgcactttttttgtgcttcgccccctggaatttccaactaccttggggggggctgttttaccgccccctcttcttcagacgaggtgttcacacccgtgcgccaccacaaggggttttttagagtacacacactttgtgtgatcccccccgcggagtgtgattaatatgtggtggcccacttttttggatgagaagacacgttgtttcgccgcccagattgatcagtttttttggttgtccaaccccccgatatctcttttatatttagaggatgatagggggtcactcacagctgtgggggagagacacttgttgtgtgggaaagccttgccgcgtagagcccccctacacggaagaggtgggcgcccgaagatatttttcctccctctcttcatgagtgatatattctctacagagagaacacccacgacaccctcttgttatgatacatgtggggagaaaacgggcgcggtgtgatataccacacataggggagagatgtgcactacttctcacactttttgtgtggaatacatatatattgtagactcacacatctcccttttactgctgtgtgagacatgcgccaccatcactttgtgtctcgcccttacaccacaaatagtgagccccccccacttttgtgtgttatacctttcttcttgtagacacacacaccttttctctctatatatgagagacaccggggtatatatagccacacttcacaacagagaagtgtgtgggggagccacaccgtgtgcccacactgtgtgcgcgcacaaaatgtgtgagagcgcgcccgcgatattttggcttgtggcggagaataatatttttttgcccacggcccaccccctgtggagagaccacactgagatatatatgtaaagtataagcctccgcgggtatattttcccaataagccctggggggaactttcctcggtgacccaaaggcacgtgcactgcacatgttggggttttccttatccttttttataaaggtgtggccccaaacactccaccttaaagtttttttaatttgaacccttccttccaaaaaaaaaaatttgggcccccaca

SEQ ID NO: 678622 - DNA, 165 bp, Homo sapiens
ataggtatggtaaaattatctacttttcttaatcactgctagtctcccgtgggggtgtaggctaggctaagcgtaaagagctgcattgtagcgtgcttgatagcttgtccctattagatcgtggtgatttagagggtgcacagtatatctacatttaccgggagt

SEQ ID NO: 678623 - DNA, 567 bp, Homo sapiens
gcacgcggtacaattaaacactatttaatcttccagatatcacttctggtcaaactcaagagtaatgaatggaccttaccatacgggtgctttctgactgagctcctctctactctgaatgcaagagaccctcataggtaggcagaaatatcgcccctattcagccggaagaagttatagaggatggatcttcgtccctctgcaacccttagaattaagggttctcttataaaagggaagggggaaaatgttggaggcgtgtgacacagagctccatctttaacaggagcagggtaaaatgaggctgagacctaccatgcagcattcccagagaggaattctatgtcacaagatgagatgggaggttagcacaagatacaggtcataaagatcttgctgataaaacaggttgcagtgaaggagctgggtaaaactcgccaaaaccaagatggtgacgagagtgacctctggtcgtctttactgctacgctcccatcagcgccaatgacagtttacaaatgccatggcaatgtcaggaagttacctatatggctaaaaggggtaggct

SEQ ID NO: 678624 - DNA, 278 bp, Homo sapiens
ccccccccccccctttttatccggggggggaggaggggttctccactgtttttttcctctggcccctttagttttggggggaaaaccggggtttttcatcccacgtccttgtcccccctcaaggggaggggggagttttttgggccccccttggtttttttttttgggggggggcggtttttgttttttgtttttttaacccggcctttttttgggggcccccctgccccccaatttttcccccgttttttggccccccttaaaaagttttttgggga

SEQ ID NO: 678625 - DNA, 174 bp, Homo sapiens
agcaccttctgagactcgcttgcacttggcggcgaggttgcgtgagccgatgatcaccccactgccttccagcctgcgcaacagagcgagcttccctctcaaaaaaaaaatttttgttttcccatgggcatactgggtgcttgcctggatgtcccgacttctcagcacgggggt

SEQ ID NO: 678626 - DNA, 118 bp, Homo sapiens
aaggcaggaatggacaggtgagacattctgcgcatggtgagtgccgtctgtgcagggcagctgtggattctaggtgccgagtaccatcctgtgacccctccccagtgcctggctccca

SEQ ID NO: 678627 - DNA, 287 bp, Homo sapiens
acctacagtggtctgtatgtatatggccaccacagctcagtttcttctgttctggcggacataattcctcagtttagccttcccacctcaatacagtctgaaaacagatgagcctttattagtcaaatcagctaagcagtttttcaggctcttagtattcagtgaaacctttatatcccttacggtcctccatcttcaagaaaagtagaatggactaaaggtcttttaaaaacacacctcaccaagctcagccaccaaaaaggaccggacaatactgttaccacttt

SEQ ID NO: 678628 - DNA, 447 bp, Homo sapiens
tggatgttattgattgtacactcctggtgtagacaatacactctattgtcctctggattttctatcaattgggaggcagacccaaagggttgattatacttacattcgacctcttcggaatgattatgtgtggcattgtactctttcatcaggaggtatataatgtctagtttttgttctttgtgatgtttacacccattgctgcttaatacctagatatattaatttattaacaattgcaaaatggtgatattttaattctattatgttttaaaactatttttgagaataactttaatgagacatttcctctcattaacattgttattaatgatgtaggccaaataggaaaggcaagagaaatgcttgtttcttttatatatccagctttttaagaaatacgtgtttgccagtcatcctaataaagtaaatagtaccattataaaa

SEQ ID NO: 678629 - DNA, 835 bp, Homo sapiens
  misc_feature (339)..(339): n is a, c, g, or t
  misc_feature (360)..(360): n is a, c, g, or t
  misc_feature (639)..(639): n is a, c, g, or t
  misc_feature (737)..(737): n is a, c, g, or t
atgattccaagcttttagatccagcaagccatcctgttgtgggacactgctgatcgctgggcctcgttagctagagatgctctggtccatgcacgcctgcctagttttgccatcccatatgccattgatgtactaactactggatcttacccacggctgccaacctgcattagggtaagttctttgcttgcccccatgttcctaaaaactaaaggttttggcactggattggattgtattattaagtagcccagcaaaaaacattgttaaaacaaacagtacatatagtttgctttttttctctgtaactaaagttgtgcttttttgaaataagttggngccagatgtgagtagatatcnaaatgggtgaaggttttatttttttttcccccagggatgcgcggatgtgcagacataacatctatttcagatgtgaaaatgctacatgctagttgctttttgaaagtgttttaaacttttattgttttggtagtttactgacttggtgccatattgtattttatacttgtaagaacttgtggaagctatcaagtgatatttagttggtttataaatagagcattaagggaggtcatgttgtattatgatcttagctaaatgactagaatcattgttgtncttatgcacgatagtaatggccattgtttttgtaagtagactgcagaaatgagtgttaagattctcttaggtaaagtacgcaacactgtataaagacnggaaaagattgaaaaaaaaaatccccgtttgtacattatttaaaaatcacttaaatttttttgcaggataaaattattcctccagacccgactaccca

SEQ ID NO: 678630 - DNA, 544 bp, Homo sapiens
gatggttctgacctgtcgattttcaagtgtcatgactggtgaaaacccctgcgtgagtccatggtagctgatgatcccccgatcgtgaggtcggcggagggttgagtagtgatgccactgtcagcaggtcgggtgatgagcagcagctccctatttaagtgtctacctgtgcgagcgacccccctgaggactgacggactgtgctttctttagaagcacaaaacacacgggatcccggtggttgtggcctataacaggccaaagtgccaacaaaaccacactcgccttgcaatccaactctttgaatgccatgtacatacttgcctcttgggtttcatgttaacattagtccacttcagagtcagcactaagcaaaccgcttctccagggcccatgcctggatgcttgaactaaattgcccccaaggagccatctgggtctgattcaagttcccaccccatcctgtggtttcagctcttcaatcagacggcacccactttcctgaaagtcatctttccaagaaacttattatctagttaacaag

SEQ ID NO: 678631 - DNA, 142 bp, Homo sapiens
ccgaactcgagctggtaccccggcggattgtgtccgcactagtctcaggcttcaacatctgaatacgccgcagccctcttcgccctattcttcatagccgactacacaatcattattataataaacaccctccccatactca

SEQ ID NO: 678632 - DNA, 359 bp, Homo sapiens
catgtaatgaaatcattttagctttgcttctcagagtgtcttggctggtctcctaggaatatcggtacttcttaatatagttattttaacttaagaagaaaatataagatcttaagtcagttatcactatagtatcttcgtattttgtgtatcgcactctcagtcttttattctgtgtgtgtgcatgatcataattcatgttatcctctggatctcttagactgtgaaagccttcttggtagggaccctgcaacttgcagcagagttctaaacaaaaattacacgctgcttgtgtccatggcccccttcagcaatgaaatccggcctgtcagcagctgcacccctcaggtaaagaccgt

SEQ ID NO: 678633 - DNA, 254 bp, Homo sapiens
tagctatcctgaaaattttcatctgagggtagattgcgtcatggtcttctgaagttgtctttctctttaagaccattcattgaataaacctattagacgctttggagtcataattgaatataagacagaaatggtttgatataaaagcaaccaacatgcagtagataacacagcaatagagtgaacacattgcagaagatagggcaacctctaatccagaaattatcagataaagaaaaaccaagacactttgc

SEQ ID NO: 678634 - DNA, 357 bp, Homo sapiens
cccgtcagatcatcctgaccctgctcctacgctccacctgccccttcatttgctctccctcgcgccccgtgacatcttctctctccgtgctgtgtcctttgtaggtcgtgcctctgcacactttctagcatcaaactgggccgtcttctcacacagtttcacttcgcccaagacagcccgtaactggggctgtctaacgcaggcgatgaaccagcgactgccattgacaaaggcctggcgaaacgaaggctctacaacctgctgatagagccacaacagggtgcagacaactgcgatgtcagccagtgacactcgctcgcccaccagaagagtcctcgtcatcaagtaagcatccag

SEQ ID NO: 678635 - DNA, 166 bp, Homo sapiens
atccggacttaactgcggtgtgatgctgttgggggcagtgccctcctaattggggggtaggggctaggctggagtggtagacggctcagaataatcctgcggggggaaacacttctgaggtaataacataggattatcccgtatcgaaggcctttttggacatgtg

SEQ ID NO: 678636 - DNA, 108 bp, Homo sapiens
cgtgcgaaggataggaagtagggaaatgggcgaagagggggaaggattcagcaatatagcacaggtcacagcgttgcacacaaaaacgagcgatacttcctatccttc

SEQ ID NO: 678637 - DNA, 246 bp, Homo sapiens
gcgcggtgaggttgtctagtccacgctcggagccatgccgtccaagggtcccctgcagtcggtgcaggtcttcggacgcaagaagacagccacactttgggcgcactgcaaacgcggcaattgtctcatcaaggtgaaccggccgcccttgagatgatttagccgcgcacgctacagtacaagctgctggagccagttctgcttctcggcaaggagccattttctggtgtagacatccctgtccct

SEQ ID NO: 678638 - DNA, 523 bp, Homo sapiens
gtaatcatggttaactgtacaaatgaatcggtatcaagaatgttccatgttggagtagtttatcaactggagttgggaatggcgcatgtaaataagaaatgctgatgttatgagctgagtcctgaagcacagagagtatacaactttgacgtgcgccagttgaactggttggaatcaattgaaaattatgttctgggagtcaaaaacatacttatcgacaagcggctatggctgggatcccaaacagcaaatgcaacgcttaccaaggctccgaaatattcactacctctttaatactgccctcttccttatcgcctgccgccttctccacttgcccgctctcagatgcctcgcaatgtccggtacttcatgtgtacccttctgtcctacacttcctctcctactttacacgccctccagcacgctcaaagcttcaagagcatttagcccatcgcactttatatctggaacctctcaagatacccttctcaaaccacgcaaacagtgattcccaacgcatgcc

SEQ ID NO: 678639 - DNA, 597 bp, Homo sapiens
taacatcgtgtacctgtaaaacaccatttgctaggacaagaccctgtactatttcctctgaaacctaaatttcggcagggtatgcataatccatacgcatcatcagggtgcagccatcgccatcttgtattaaatctctctttgccaggctcacactcatctcgcctgtatctatggcatgaaaataggtcctacaggcgaccaccccgtctatatgaccagaaatttccatgtcttctgccacaattgtgacatcgctcagcaaattgtaacttcttaattcgttcatgacttttaaagctttcttcatatgccaagaattcactgtccctgcacagtgtttttcggtattatcatcttataaatccagaggcttatgatcaccctcctttgtgcatgcatgaggcagcgccggcgtatccactgtggctcctctaggtcttcaaaacgcaggcaccgaccatcacagccagcaccattccatccgcggacgccggctctgaccgcccgccgaaccgcgttccacacgccacgcagggggcgccgagctctcctcaccgtgcgccacctcttgcggcgacggccaccgagaccatg

SEQ ID NO: 678640 - DNA, 455 bp, Homo sapiens
tatctatggtttacctcgtagaaaactcaggacggtacgagagaatgaagacaacaaagctactgacaattccatctcccagaagcaatcactatatagtataagagtatatgtcttactagtttcccttcacaatggttgaggttatataccatgtataactttgcatcttgctttttctatattaaatatcttcccatgttattaacattaaggttgcatgatattcagcacatggataatctcaaaatttcccttgctgctaagtatgcattgttttcaattatgatgagatgaacctacatatacactctgtcagcataatctgatcagactcacaaatgttttaatcactcggcatttcttggattagtagaatacatttcatccatgtgtctctcattctgctgatggtctttgcctaccctgcctactagaatgtgacttattgcaca

SEQ ID NO: 678641 - DNA, 565 bp, Homo sapiens
  misc_feature (238)..(238): n is a, c, g, or t
  misc_feature (451)..(451): n is a, c, g, or t
  misc_feature (453)..(453): n is a, c, g, or t
  misc_feature (456)..(456): n is a, c, g, or t
  misc_feature (463)..(463): n is a, c, g, or t
  misc_feature (485)..(485): n is a, c, g, or t
  misc_feature (504)..(504): n is a, c, g, or t
  misc_feature (506)..(506): n is a, c, g, or t
  misc_feature (526)..(526): n is a, c, g, or t
  misc_feature (528)..(528): n is a, c, g, or t
ccgccagttgtacacctagtgccgttgggtaccttctcgcgaggagaacttatatttcgatacagacttggccactgtccacaaagaatccggtcagcaccaccagatttccaaaggtgcatatcaaggaagggcaggcgtatgtgcttatatgtttgtattcaatgattgtctttccccattcatttgtctttttagagcagccatctacaagaacagtgtaagtaaacctgctgtngccctcagcaacaagttcaacatcataagagccctgtagaatgacagcctttttcaggttgccagtctcctcatccatgtatgccatgctgttcttgcagtgttaggtcatgtgctgagaggcatagtaggccagcaggcgcatgaaggcaagttgggtagccatttccttgagaagtcactccttctacataatattcgaactggctgccgnantanatagttnctcctagccagacgtgtttctngtcccttggagctcctatnancagttcttggctgggatgtntncaggttaggccccgaagctgtggggtccgagctcgaa

SEQ ID NO: 678642 - DNA, 697 bp, Homo sapiens
gggccgcctgcctgcggcctttgttgcgggtgccggtgctggaggtcgtgcctgggaggaaaaccaattctgtgtcctcggaggaccacagcccagttgtgcccctagtgcgaaacccagcctgtgagcttgcaagtgcacggactgacgtgttcatgcacgcagacctgccgaggacaaggaggaacccctgtcgctcgattatcagcaggcagcagagatgctgtgcagggttccacttccaaacatgagttccaggccgagacaaagaagctttaggacattgttgcccggtccctgtactcagaaaaagaggtgtttatactgggagctgatctccaatgccagcgatgccttggaaaaactgctgtcacaaacatggtgtctgacggccaaagcactgccagaaattggagattcactttgcttgaccaatgccgatgaaagtgcaccatcaccatccaggatactggtatcgggatgacacaggaagagctggtgtccaacctggtggactgattgcagatcgggggtcaaaggccttcctggaatgctctgcagaagcaggctgaggccagcagcagatcatcggccagtttggaggtgggttctactcagctttcatggtggctgacacagtggggtcatttccgctctgctccctgggagcctgtgtacaggtggttcagatgtctgc

SEQ ID NO: 678643 - DNA, 503 bp, Homo sapiens
  misc_feature (269)..(269): n is a, c, g, or t
taacattttttagtataaaaggggaaataggtaggagtaggggggtaggggcgagagtggggggaggaagggggggggttggtttgtccaacgcggtcatttatttttccgtgggtcacacaactctggggacgatacggtgtgactggacgggtggcggtcgtgtcaagttacgatactacgtgactgccacgcaagcatacgagaccggggacgacgactacggacaaccactttcgagaccgtgcgtggtgaccttacggacccgnggacttcacaacgcaacacgacggcggggcgatgtgtggaacactggggcgtataccgtggcaccgggggtttcacaaatacgttgggcaccacacgtgggtggagcgcacgcgcacacactgggcacggtgggccccatacaggacctcacgacgagacaaaccacccgtgaatacggggtggtacgagggacaaaaaacacgtgggctcaggtcatccggacggacccccag

SEQ ID NO: 678644 - DNA, 106 bp, Homo sapiens
tgtcaggcactgatagcttgtcaggctcttgtatgtattttgtggttgtttttaaaccaatgtgatctgaggctcgtgtggacaccactagcatgacagtctaaag

SEQ ID NO: 678645 - DNA, 118 bp, Homo sapiens
  misc_feature (114)..(114): n is a, c, g, or t
gctcggtaccctagttgggtccagagcggtcataggttcctggaaaaccattccaatactgccgccccgaagggccgacatggcatggtccgaggcacctagtagctccttagnggat

SEQ ID NO: 678646 - DNA, 405 bp, Homo sapiens
ttaacacagacagttgacggaccaggaagcttgaatgcatggtgaaagaattggtctttcttgcccgggcttggtggctcatgcctgtaatcccagcactttgggaggccgaggcaggcagatcacttgaggtcaggagtttgagaccagcctggccaacatggtgaaatcctgtctgtactgggattacaaaaaaattagcccggtgtggtggtgcatggttgcattctcagctacttgtgaggctgaggcaggagaattgcttgaaccccggaggcaggggttgccgtgagcagagatcatgccactgtactccagcctgggcaatagagggagactccatttcaaaaaaaaaaaaggggggtttttatctgggaaaagggaggttgcccagttttcaaagcc

SEQ ID NO: 678647 - DNA, 334 bp, Homo sapiens
  misc_feature (223)..(223): n is a, c, g, or t
  misc_feature (242)..(242): n is a, c, g, or t
ctcggtccctgtgtgatagcacaacctagggtcagttttgcaggtggtaagccatttaccaagatagttgtaggtaaagaagggcagatttattagagaaattgtgaaaatatgttgcagtgggcagctcagcagagaaggggctacctgcaaagaggcaagggctggaggaaagttttatagggtcctgctgaagggtgctacgtgtggaatgaggtcattngtgcccggtcaggttgttncgtgattagctgtttcctgcgtttgttcatacaataattgttcattattgttctcaacttggggctctccccaacctggggacccttcctta

SEQ ID NO: 678648 - DNA, 241 bp, Homo sapiens
ggcggaccggagtctgtgcttaagtcactaactatatttttatgtaaagtaaacactgacaaacattaacttctctgctgtatgtctcaggccttttaacagcttgcaatcctaacgagctgctgcatgatcgatttaaattacatgtgacataaagtctcttggcattttaattagttggcttttttgggtttttgtttgttttgagacagtctcgctctgtcgccgaaactggagtgca

SEQ ID NO: 678649 - DNA, 262 bp, Homo sapiens
aaaggggggggggggggggggccccccggggttttggggcccccccggtttttggggaaaaggggggggggcgggccccccccccccccccgttgttttgggcgggggggggcccgccccccccccccccccccccccccccctttttgggggggggggggccccttgggccccccccgccccccccccttgttttgttccccccctgggggggggccccgtttggggggggggccaatttcccggggtttggttttcccca

SEQ ID NO: 678650 - DNA, 359 bp, Homo sapiens
  misc_feature (33)..(33): n is a, c, g, or t
  misc_feature (43)..(43): n is a, c, g, or t
  misc_feature (85)..(85): n is a, c, g, or t
  misc_feature (101)..(101): n is a, c, g, or t
  misc_feature (136)..(136): n is a, c, g, or t
  misc_feature (138)..(138): n is a, c, g, or t
  misc_feature (154)..(154): n is a, c, g, or t
  misc_feature (159)..(159): n is a, c, g, or t
  misc_feature (314)..(314): n is a, c, g, or t
  misc_feature (349)..(349): n is a, c, g, or t
tttcggcacagaaaggtcagaatttcttttatngaaacggggncttactctgttgcccagtctggagtgcaatggcaaggtcatngctcaatgtagcctcngactcctggggctcaagcggtcctcccacgtgagncncccaagactacaggtncacancatcatacacgggacagggtctcgctatattgctcagactggaaagttcagcatttttaaatcaggtcttgggactcccgattctgtttttccacagagtcaccatctatcctgacaatgctccatttcatgctgtttttcctcaccttcaatantgctcccccatccccccacctctagggtgtggaangttaccgggg

SEQ ID NO: 678651 - DNA, 1267 bp, Homo sapiens
  misc_feature (441)..(441): n is a, c, g, or t
tttttttttggagcagtaacaatatgtttattataacatccagccaatgaatacaagacacaaaagtatactcttaagttcagggacgaactaagaaaaacactcgagggtggatcacgtggaggtacctatctacaaattaacagcgcttaaccgtacgagtaaaagatttaagccaagtttcaactccagtctgtgggctctatcatcccgagttcttgtcttccccacttgtgggaggcttgtgtggccccaaccaagactgtggttttgtggcccagtgaagtgcactctgtgattcccacttcttagagttcacgaggtgactgtgcgagcccattttgagtatacgcggagtcttgtgcatttaggccgcaaaaaatatttatctccccgagcgtttacacgtatatctcttagaaaatataacgccaaggctcnttccgagggcatgtgtgtcgctttttattagcgagcgcgagggggcacttttacaaggcctctcagaatgattcttaaatctcccagagcggtttgttaatattttctccgtatcgtgtggagtgttaacgtggcattaaagagcgttttacgcacgcatttcacttctacattgtggggccttataaagtcttcacgagaagttattagcgtggcccagagtggcgcgcggggggaaaatagcgctttccaaaagtgtgccctcaggagaaaaagctctctttttaaaatagccacatagcgtgggtctcaaggttcccaaggggaccatgtgtgtctcttctactcaccaatatgttgcaggttggctgaactcgtgtgtaagagggacactaaagattaccaaaatctctgcgtgtgtgtggggctccccacccttcgccgggcggttacaccaaagaaaccggctttataaaccccccgttggtgtttaaagagaaacctttttgtgaacacggttttttttcacgccccccaattgtgggcatataatagagtgccccttttttccataaattgtgttagatcctccccatcacaaggtaatgtggtgtgcttggttagaaaagccctcccgagaaggcaactatgtgtgcggcgacaaacaaatgggggcggggccgaaaatatcacccttatataatcggggggtgtaaaaaaaccacccacacctggtgagtgagtattctccgcacacatttctgctgataggaggagaccaccatgttgttacacaggagtcccgcaaatatcttctcaaaagaga

SEQ ID NO: 678652 - DNA, 1646 bp, Homo sapiens
agtgttttatcttttctttttttaaatttaaatggcgaatataacacagttttcccttccatattcctctcttgcagctttatgcacatctctactaaatcattacgttttctacttcttattacatacaacattctttcacaaacactgcaacactagtgaactctcgtgcacactgcgactctttttccactactccatcttacaacttccctcacatctttcaaactgacatacctttccatcttcttctaactctctacacacaaatctacctctcagctcatcactgcagtagcgctccttacacctccagcctgagtgcggctctccttctccgcgctagcgtggagaccactacacaactcgtgcactgctcaacgtgtctgcgcctcgtctagcacagcctcactaccctctcactgcgctctctcacacagcaccccacacaacaaacgtgcagggcttctgctgcctctctgcgctacacctccagcgcacacactcaaacacaaaactataaacgtgaccaccctttaaacacaccaacacacaaccacaccgcggttttctgtcgacgcgcggcacaacccccacggcgcgcgcttcccccacacacaccctcctcgagcgcatattcccctcttataacccggcccccacgacctctacaacgggcaccagagatagcagcacacgtgcgtcgcacacgagcccattcaaccaccaccgcagacaacaacacacacctgctacatcacccaacattgtgacaaacaaagcggcgactccgaccaccccacggccccgcccgcaccaaccgcgacaccaaagtagccagcaccacaccacccggcgaaccccaccgcggaacctcccatccaccacgacgacacacagcaccacaggaggtcactccagcgcaccacggcacacaccacggcgaccacagacaacaccccccgtcgacccaggcccgcaccgccccacccacctccgggcgacacacacaccgctctcgccccagcccgacccagcgccacccgacagatacacgggcaactcacctggcggcccaccccatacctcgccaaaaaggacctcctcacaaacgcccaacacccggcacacccccccagcagacctcacaccgcagccaacactcaccccccattgatcgctggcaacacaccctcgagtcacagatccactcagcaaccacaacccccccgcagggcgccatcgcacgcgacccctacttcccacacccgcgaaccatcaacacccagtgcgcacacccacaccacgagacacaaaaacccgcatcatcacctccccgcgacacacctccagcggagcagcaaaacaccatcatcctctatcgcgctcactcacacatcctctagcagcatcgaccatcgccaactaccgcatccacagtacatcacatcgcgacatcgtcagacacacagctacaatctcgcacacaccgagctcgcagccaacactcgccgatacataagactttcacacagcaacgagcacatcagcgccacgtagtctatccacactaggaacacgcgatgagcgaacactaagcgcgaacctagcctggaagccacactcacgtaggcgaccgtcacgcc

SEQ ID NO: 678653 - DNA, 561 bp, Homo sapiens
agaaatgtaaagggtcagccaatgatcagctgtgagaaaagaagggaggggaggactgggcttgttcagagagcaggaaaagtttgagaccagttgtacagagtggaacagtgagagaactaaagaaatacaggaggattgttgaatggtgctgacaaatcttttgaagttgatcatcatgaatttatagtgaatattttacctcgaagagtgacttgctccagcagcactcagctgctcttttccacatatgaagagaaccagtgattaggatcacacatgattggaattttgccagatgggtatgatcagtatagttttggacttatcatattaagtcaaaatatcaataaagatcgtgataaaatccaatttttcatcccattataaggacagagaattttcaatattcacctgcccagagtttcctgggaacatggaaattcatctgagaagatgagagagagatgagggaagccagcgtgacatttggacccttggtcataggtcataggtctccagaattactcctctcctctctaagtataatttctgttggcg

SEQ ID NO: 678654 - DNA, 419 bp, Homo sapiens
  misc_feature (413)..(413): n is a, c, g, or t
cgtgtgtagggcagtagggagtgcacctcatggagactgcttggcccacagaaagctgagcaggaggtggcacagtggaaaaaagaagcgtgccaggaggaggcgctgatacccgggaaaggggagccccaggaaccaagtcaacggcaaagggccggtggtcacagatggacctcatctctgagctgaaacggaggcaggagaaggaggcactcatttatgagagcgaacgtgatggggccattgaagacatcatcacaggtaagggcttggccaggccttggtcttatcctcagtctgtccttctatgctttcttctgaaccaatgcgctatcctctgggggactggcttgcacactgcttcttgctaacttttctgtttttctttcctttttcctttctctacccacaancaactg

SEQ ID NO: 678655 - DNA, 394 bp, Homo sapiens
ggtgaaagaattataacacgcgagaacgcttacacgaccgatagtgcagatatgacaacgacacatctttgaagaacggcatatcttctttggataaatggtccaaagaaagtaaatgttttagaaatgagctccttgaaaacagtgccagcatctaacacaggtatactttccacaaaaatggaatgaatgaacattccttgcagtatattaagtatggtaatgattagtgtagaagccatggggctatatagttgtcaatacttatcttatgagttgcattttcaaaactgtgcaagtgaggctatgtctgagcaaatggtagcactctagcctccacagcgcacttacttttatttttgacctttctctcactaatcctaactgccaggta

SEQ ID NO: 678656 - DNA, 222 bp, Homo sapiens
cacacgcaggttgatgcgctgggcgcgggccttgtcgtgcagggcggccgtgtgggcgccagtgttgagggtcagggtgtcgaagaaatggtcttgctcgaccttcacgcccagggcggtcaagcccttggccaggatcgcggtcagctggtgaatgcgctgagcgatctgggtcagtcctttgggaccgtggtacacggcatacatgctggcgatgtgggc

SEQ ID NO: 678657 - DNA, 341 bp, Homo sapiens
gtttttgttccctcaacccatttgggtaaaataacggatctaattagaaactgttttaaggaggggctgggctcggtcgcacgcctgtaatcccagactttgagaggccaaggcggtcacgaggtcaggagttcgagaccagcctagccaacagggtgaaaccccgtctctacaaaaaatacaaaaattagccgggtgggacacgcctgtaatcccagctactcaagaggctgaggcaggagaatagcttgaacccgggaggcagaggttgcagtgagccgagatcacaccactgcactccagcctgggtgacaggcgaggctccgtctcaaaaaaaaaaa

SEQ ID NO: 678658 - DNA, 100 bp, Homo sapiens
tatcccccagcatggcgtaccgctccgcttatgcccggttactgatgctccgcttactgatgctccgcttactgagctccgaactgatgctccgcttacg

SEQ ID NO: 678659 - DNA, 269 bp, Homo sapiens
gctgccgctgccgcccaggctggaagcccagacacggaatcccgaataaccaaaaggacactgtctgtgaagacgctattctgattatttgacacaggccaggtgctgtgcagagactgaaactcacgctcagctgaggccaccatccagacctgggcagaaagctgaagaacccctgaacagagtacaatatgctagcgaaggcttccatgtggccagagagagtgcacaacccaagcagctacctctagctagagtcacacatgcgc

SEQ ID NO: 678660 - DNA, 898 bp, Homo sapiens
  misc_feature (32)..(32): n is a, c, g, or t
  misc_feature (111)..(111): n is a, c, g, or t
  misc_feature (123)..(124): n is a, c, g, or t
  misc_feature (165)..(165): n is a, c, g, or t
  misc_feature (167)..(167): n is a, c, g, or t
  misc_feature (181)..(181): n is a, c, g, or t
  misc_feature (186)..(186): n is a, c, g, or t
  misc_feature (213)..(213): n is a, c, g, or t
  misc_feature (255)..(255): n is a, c, g, or t
  misc_feature (288)..(288): n is a, c, g, or t
  misc_feature (291)..(291): n is a, c, g, or t
  misc_feature (296)..(296): n is a, c, g, or t
  misc_feature (305)..(305): n is a, c, g, or t
  misc_feature (309)..(309): n is a, c, g, or t
  misc_feature (321)..(321): n is a, c, g, or t
  misc_feature (351)..(351): n is a, c, g, or t
  misc_feature (385)..(385): n is a, c, g, or t
  misc_feature (394)..(394): n is a, c, g, or t
  misc_feature (401)..(401): n is a, c, g, or t
  misc_feature (407)..(407): n is a, c, g, or t
  misc_feature (420)..(420): n is a, c, g, or t
  misc_feature (422)..(422): n is a, c, g, or t
  misc_feature (441)..(441): n is a, c, g, or t
  misc_feature (445)..(445): n is a, c, g, or t
  misc_feature (450)..(451): n is a, c, g, or t
  misc_feature (453)..(454): n is a, c, g, or t
  misc_feature (461)..(461): n is a, c, g, or t
  misc_feature (464)..(464): n is a, c, g, or t
  misc_feature (472)..(472): n is a, c, g, or t
  misc_feature (476)..(476): n is a, c, g, or t
  misc_feature (486)..(486): n is a, c, g, or t
  misc_feature (490)..(490): n is a, c, g, or t
  misc_feature (514)..(514): n is a, c, g, or t
  misc_feature (690)..(690): n is a, c, g, or t
  misc_feature (887)..(887): n is a, c, g, or t
tttcttgttaaatttgcatttgctggggaacnggtgtgtataaaaccttaattaagtataagctctgatcttcatcgtggtgcctattgggtatgtgatataactgcagtntcccttttgggnnggggggaggggatttctttacaccaagtcctaatgaaactntnattttcactttttnctttnagctatcaacttaggacttggcaaaanaatttttgagggtggttcaatagaggatgcttcaccactggncactcactgtcatcaaggtgctttagaaaattnaanacatngcacaaatntttnttctcttctctncaagttatcatgacctgcataagagatggnaagctgattcacatgtttacagtgatcagcaggnagaaatgcnctaatgnaacatnccttttacctaanangctaaactacagccatatnctgntttcnntnntttttgnganggcttcanaatntccaaatgtnaggnttcgctgtacaattgtcagttttngtctgactttttataaagggacactgcagtatttagtacaagttcggatgcacttttttgaacatctgatgtcttacaaaagtaacatcttgctaaactattatacatccaaataactacaatatctgaagaagcaaggctgctttttcagccacaaaatacgacaaaagcaaggnctgttatgatggtcatgaggaagtcttacaagcctctgaaactaaaggcaactaagaatgttacatttggtatattaaaatcttaccctcatatcatatttaacaagccttgcttttatctacaaagattttctatgtacagtacagacagggtatagttcaatcctctgctactgaggtagttaaccaaccctttnaaaaggttctg

SEQ ID NO: 678661 - DNA, 462 bp, Homo sapiens
actgtgttatcgctggttcttcctgaggctccaacactggggcccctcatccggtcttcatgctcctctgatgaagccaatccaggatgagcatatcccaggcctgtccctttcctccagccagtagcctgttggacacagcctcctttgctgctagtgtcgatatcttctttatcaccaagtttacgatcactgtcagtttccctggagtacttaatccgtattcctttctggagagtccaaagactggagcttttccctgcgatcatttcctcttcctttaaagttaccctctcgttctctcctttccagataggctagctcctgctcagactgttttatcttccggtggatttaccaggttttgcttgtgcacggtctgacagctgctggtgttcgatcagaactactttattgggaaactgccttctgcacagcacaacaagccagtttattccagtc

SEQ ID NO: 678662 - DNA, 843 bp, Homo sapiens
aaggtcgtagtatagctgaggtgttactcggacgagggcactgcgcatgtaagactgtggccagtaactgtatttgtgatggctcgcggtggcagtggccatggaggccgtgctgaacgagctggtgtctgtggaggacctgctgaagtttgaaaaagaaatttcagtctgagaaggcagctagggctcggtgtccaatgcagtcacgcagtttgagtacgcctggtgcctggtgcggagcaagtacaatgattacatccgtaaaggcatctgtgctgctcgaggagctgctgcccaaagggaggctagggaggaacagcgggattacgtcttctacctaggcctgtgggtgaattaccggctcaaggaatactgaggaaggccttaaatgtactgtcctgcgggttgctgcacgatcagagcccgagaacaagcaggccaaggaactgtgagcgggtcattgacaaggccatgaagaaatgatggactcgtgggcatggccatcgtgggagtgcatggcccctgggatgtggcgtggactggtccggacgtcattcgacaattgctgttgttccaaatgtccaaatcctgaaggtcgactgcgggtagctccacgtagaaaccaattccaaggagggccctgtccatccatcgcttgtcctttccctgttctcccccttgcccccgtctctatcctctgtggccttcagctaaatttctgcgtcccctgagattcgtccttcagcccccatcattggtgcttttgggatgagtgtacaattaaaacgggggcttgtgggtttggggaacaaacagatatctaaatcaacacacaaaatcctc

SEQ ID NO: 678663 - DNA, 167 bp, Homo sapiens
cgtggcgagccgctcctcatggacgtacactgctctttgagagatcgaggagacgcgtggtgccctctgtcatcaccagtttggaggccaccgatggctgtgaggagagcatctaccgtcaagcataactccacattgtcagctgccctggtccctcttctgggcag

SEQ ID NO: 678664 - DNA, 643 bp, Homo sapiens
gctgggaaggggacccacccgagggtccagccaccagccccctcactaatagcggccaccccggcagcggcgtgcagcagcagcagcgacgcagcgtgctgacatgctcatgatgcatgggatggcctgctgccacctgcgggcctggccggagctgggcatgccccagtgccccctccccgtgtgcaccctgctgttcatgcaacgcctggtggcctggtgacccagcatgtctccccctgccgccgcctgccgcctgcctttaaatccatggaagtggccaacttctactacgaggctggactgcttgtgctgctgcgtacggcggcaatggctggccgccgctggaagccccccgacggcagacccggggccgcgcccaccccaaacggcgagctgggcagcatcggcagagcacagaagcgcagccatacgacgttcagccgcgtacctggaggccgctgggcgcgccagaaggcccccggcagcaccgcacaaccgggacagcggacacctttcgagggcggcttccggacacacaggaccaggacaagaagccgggactcactccagggcaagaacacaagagtcgcgccaccgaccgtcgttctcgcgaggactacagacgcagaaactgcaaaag

SEQ ID NO: 678665 - DNA, 1062 bp, Homo sapiens
tgtgcaagaacctcaggacagaagcgagagcccattgctcctgctccgcagccgggctgagctgagcaggagcaatgggctctcgcatcaggtcagccctggctgctggagcgaacccattgagcatggcagagacctggaggtgtcaggagagctcaaacatccatccatcataacacagcagggcatcccagaagtccccgagaagagccttgctgacagctagaagcaggagttgcttcatagagtggacgagtggtcaacttggcggaagcgggaccttggcacatcaaccattccaataccgtgattgcgctgtcatcccatgaaccagtgactactggcagagataagagcacagatcagacaatggagcagatagacttcccaatgcaggaacaagaaatgctcatcccaccgtaagagacacaggcaatcatgaggatccagggacatgggacatgagcgtcaccagaggacaagggagatatcgaatagatgcattagtcaagtaagagaaatacttggacgcacatggcaaaaaagaaaaaaaaaagaaaaaaaataagaaagaaataaaagagaaagaatagggaaaaacaaagaataagtaaaatgtgaaaaaatggtacaaaagaaagaaaaaatataaacaaaaaaataaatgtagaaaaaagggagataaatatagaagaaaaaacagaatatagagagaaagaaataacataataaatatggcacaagtttacacaccgtacaataagtgaagaatcgtacacaaagaccgagaataaatattaacaattacaactagatgcataaaagttaataagaataaaaaaagaatgagaataaaaaatcacatgagtaaaacatacacactaatcaaaatagaatagcataacattaaataaataagagaaagagaagtatacgagaaagagatagtagagaagagagaaggataaagagaagaagggaggaggtaagtagacataagtaagagagaagagaaagtagagtaaaagagagcaggagagagggagaaggaggagagagatg

SEQ ID NO: 678666 - DNA, 821 bp, Homo sapiens
ggtcactaggtcctggtcttggggattgacagccacgggaagccatgagcgtgctccgcctcgtcaccttccatggagccacccgtcttggaggtgtgggctggcgctgcgtgcacgcgtgctccatatcctgctgtgagtacgtgtcatggtgaaccgtggtacgacgtggggtgggacgatctctagatattgcacagatgcacgacccatgtaatggtagcgaaggatgcctgtgtggatgaaggcatgcatctgaggatgtacaccgcagccatgatcctgcatgctcctgcaagacatgtgtccatcttccaaccgcggatccatgagaccaatgaatggcctcgcgtcgatggaaaaggcatggtcggccctggcgagcgggtgtactatcgcgttggtggcgaacatacgcacgacccaagtcttcttccatctactcggccaaatcgaggcgatcgcaacaccgtggaaagggtcgggcgtgacagtgacggccccccacaaacattttctcgaaacaaacgacgcgtctgacctaaagggatgacccacccctgatggctttgtaatcccgtgaggctttggaacccgtggaacatgaattccctttgccgagcgccaatagctgaaattcgaccccgtgaaaccaatggtttcctggaccccaagttttttgcacccaacaagcggtggatccaatttggaattcccaaaaacacctttctaataatgggcaacacgagggggaaggcggaaaacctctttttggcttggccttgtgggtaaccaaatttggaaaccataacgaacattag

SEQ ID NO: 678667 - DNA, 345 bp, Homo sapiens
gaaaatccgtattaacttggatggacggcatcgaatgctacctctgagtcgttacatggctagtgttctggcctgaaagtccgtaatactggtagaaaacctaggatctcatgtcaggacaaccgtacttctgcacgatgtacactgtcactctcaagtcatacaagcattcaagatccctgatggcccagaccttgtcatctctgatccatgtgcgggatgacctgctactagtaagcactatgaaagctaaccagtcatcagttagcaccgtaaggatcttactgctagatgatttctggcaatgtggtcagtatctactagctccatgactaattgtgactt

SEQ ID NO: 678668 - DNA, 152 bp, Homo sapiens
caactccatgtcccggtgagactgagctatttctcggatactgtgaatgaggacccctgctgcctgcccaaacgggtccatctgggtggcctcctcctcggacagcatctcctccactggatgagggcatggggccactggatgagggcatg

SEQ ID NO: 678669 - DNA, 290 bp, Homo sapiens
tcgcctgcccatcctgtagctgtcttacatattatactgagagaaatgggcaccaaacaatttgttgaacaaaagagagaaagcaatacatgtgaatgaacgccacatacaccttttacaaagttgacaaaaacctaaggtaatagatcattatatagcctctgtctgccatctcctctcttaaggacgcatgctcagaacttcttggatgctctgataactccagctctgaccgacatatgtttacctttgttggcccggtatttcccgtactttgtgcggcctttgta

SEQ ID NO: 678670 - DNA, 109 bp, Homo sapiens
atcgtcctgcctgctctggcacccagccaattcctcctccctcccatcgagcctgttgtcgcctcctggaagaactcttccctgagtctgtgacctcccccagcacatg

SEQ ID NO: 678671 - DNA, 178 bp, Homo sapiens
gcctgtagtcctggccttcaggaggctgaggcaggaatatcaattgaacccaagattatgaggctgcagtgagctatgatcatgccactgtactccagcctgggaaacagagcaagaccattttttaaaaaaagagagagagaaaaaggaaaagaaaaaaaagaaagtgaaagaatga

SEQ ID NO: 678672 - DNA, 169 bp, Homo sapiens
ttggtcatgatatagatgcggacagagcagagagggtctgtaggccatggacaagagtgagaatttactcaatacacagctggaagttggggatgagggagaagcaccagagtggcacactgatttctacaacagtcagtctagctgctgggagcagcagggaaagaca

SEQ ID NO: 678673 - DNA, 336 bp, Homo sapiens
attcaattgcggagccatccctacagtgctagctactcgggaggctgaggcaggagaattgcttgaacccgggaggcaaggttgcggtgagctgagatcgcaccactgcactccagactgggtgacagagcgagactccatctcaaaaaaaaaaaaaaaaaaaaaatttggaaaacagagtattttttaattctgcaagagctttacagccttttattccattattgttttggattttaaagattgatataaattttagggggtggatttccattcattgggaaatctcctattattggcgggttgtaattccattttaggggagtgtgcattaag

SEQ ID NO: 678674 - DNA, 306 bp, Homo sapiens
gatcccaggactcctcagtgggttaaggatccggtgttgccctgagctctggtgtaggttgcagacacggctcggatcccatgttgctgtggatgtggtgtaggccggcggctacagctccaattggacccctagcctgggaacctccatatgctgtggatgcggccctaaaaagacagaaaaaaaaaagtagattacatacacatttgagttgcattatgtgtttattgtgtgagtgtgtgcagacacacatgcgtgctcattgtgagagcagcccctcccagtcccgaggaaatccctggcacc

SEQ ID NO: 678675 - DNA, 490 bp, Homo sapiens
cgcacgacgagacctttaaatacgcctgtttttcccacgggctagtgagccttatctctccacttcccaggcattgtgaagaccctgtttctctagctgtgcagctgcaaggtcactagacagataatctcaagtcgtaaagcatgttgttccttaaaaagtaagaaatgatgtaatgcatgtcttaactgaataactgtctttgtttcttgcttctgtaatacgcttccccctgcacagatctacccccaccccacgaaatgcttaaaaggtagcttgactttttgttcaaggctcagtcctttggatgttaatctgactgggttgatgcacctaaacaattaaataattccacctcaacccctccggtctctctgattccttaattatcccgctgcagtgtctctactaaaaatgcaaaaaattagccaggcatggtggcacgtgctgtagtcccagccacttgggaggctgaggcaggggaatagtt

SEQ ID NO: 678676 - DNA, 469 bp, Homo sapiens
  misc_feature (64)..(64): n is a, c, g, or t
  misc_feature (86)..(86): n is a, c, g, or t
  misc_feature (153)..(153): n is a, c, g, or t
  misc_feature (309)..(309): n is a, c, g, or t
  misc_feature (407)..(407): n is a, c, g, or t
  misc_feature (464)..(464): n is a, c, g, or t
cagctcgggaaaaaaaaccagcagaaaagaaaaaaccaggcgttgaactccaccaagggggagntgaaagaggacgacccaagggnggggcaatccaacgccccgaaaaaagcgcctgcaaaggtggaggtggccgatgaaaccaaatgatgntgtttattcaagaggagaaagagaaaatcgctgcagcgacacaagtgaccctgggcgcgtgcagccccatgaatcttctccgtgcagccccttggggcgcgaccttgtgcgaggccctcggggcccacccacagcggcccagggccagaccctggntggaagccagaacgcagactgcaggggccgcgcccggctaaaaaaaagacccacccccgggaagataaaaatcacttccttcaatgtaagactttggnccgaaatttctacacctgggtgtctaagtccctccccctccaagagcccattaactnattta

SEQ ID NO: 678677 - DNA, 269 bp, Homo sapiens
acggtgtgactcgatatcacctatacgttattcattaatccatgtattcaacatgccttttttttttcacttttctgtcctttcagggccgacactctgcggcatatggaggttccccggctaggggtctaataggagctacagcgtaagacataaccgcggccgcggttatgtctcacgggatgagtagcgctctgaccgccatcgattgtcaggatcatgttgctgttatttacccatttgaccgtgagcgtaagacataaccgcgg

SEQ ID NO: 678678 - DNA, 576 bp, Homo sapiens
  misc_feature (5)..(5): n is a, c, g, or t
  misc_feature (25)..(25): n is a, c, g, or t
  misc_feature (91)..(92): n is a, c, g, or t
  misc_feature (119)..(119): n is a, c, g, or t
  misc_feature (124)..(124): n is a, c, g, or t
  misc_feature (140)..(140): n is a, c, g, or t
  misc_feature (242)..(242): n is a, c, g, or t
  misc_feature (313)..(313): n is a, c, g, or t
  misc_feature (372)..(372): n is a, c, g, or t
  misc_feature (458)..(458): n is a, c, g, or t
  misc_feature (480)..(480): n is a, c, g, or t
  misc_feature (489)..(489): n is a, c, g, or t
  misc_feature (494)..(494): n is a, c, g, or t
  misc_feature (511)..(511): n is a, c, g, or t
  misc_feature (540)..(541): n is a, c, g, or t
tgccnttatggtctcatgctcttgncccactcccaagggttgaaatcacagtagcatggtttgtggtctacaccacaagttcttgggaatnngcgactaaaaccctggtggaaaaaagnagggncctgtcagttctcagnggagaaaaatgaaggatccgggctctgaagatgattctgctcctcttccctctccttcccaacccaggtgatcatggtaacaggagatcatcccattacagntaaggccattgccaagggtgtgggcatcatctcagaaggcactgagacggcagaggaagtcgctgcccggnttaagatccctatcagcaaggtcgatgccaggtgagatcactaaagaatcaagatctgncatgttccctccatccccaggctgcccacccagatgcacttttactaaagtcttgggagtttctttcaatagggtaggattgtgtnggggtttacaattacaaaggtnaaacattantaggnaaattaaggtgattttntcaagggggtttttcaaaggggaggaaannttaaggaaagggggttaaaggggagggggggggtg

SEQ ID NO: 678679 - DNA, 165 bp, Homo sapiens
ttttttccaggaaaattggaccaatttaaaaattaaaccaaagggggggagtcttctgttaattccttttaaagcttaatgttaaatggatgaccaataaaacagtcattgttaaaagggaaattttaaaagggaaacattgaacatgggaaaactgtaaaatct

SEQ ID NO: 678680 - DNA, 280 bp, Homo sapiens
  misc_feature (38)..(38): n is a, c, g, or t
gtcgtacggttcgcatgttccatttatagatgaggaantgagctagagaggttaaaaacttgccgagagccagggtggtggctcacaccgtgtgatcctagcactttgggaggccaaggcaggcggatcacctgaggtcaggagtttgagaccagcctggccaacatggtgaaaccctgtctctattgaaaatagaaaaattagctgggcgtggtggcacatgcctgtaatcccagctactcaggaggctgaggcaggagaatggcatgaacccgggagg

SEQ ID NO: 678681 - DNA, 435 bp, Homo sapiens
  misc_feature (10)..(10): n is a, c, g, or t
acttttgctntggaaaatgcgtccacgaatatacttctctccctagggactgggaaggaggaagaattgtgcagcagggagaggtgaaggccccactggagagaaggggagcccggccagggtcaagggggtttgtccctatctctgtgaccccctcctcccacctggagttctccgctcgacgttcatcttcctgaccagactctaccctcggcagggcttttgtttgtggtttggtttggtgatttcctacttatttcaagcctttgttgctaactcattcctacttgggcctgagcctttggggaaagctcgctcccaggggcaactcagtggagctcagcagtcccagctctccttccccaccctagcatatgctcagcacccaagcagagcccagcctctggtgagtgctcattaaaccttagccaatga

SEQ ID NO: 678682 - DNA, 107 bp, Homo sapiens
  misc_feature (45)..(45): n is a, c, g, or t
  misc_feature (74)..(74): n is a, c, g, or t
  misc_feature (76)..(76): n is a, c, g, or t
tacggcgacaacatcctggccatcatggcaatagcggcagaaggngaagaccatcatggaacaggtgatgccgnanagcctggccatcacgatgccgcggctactga

SEQ ID NO: 678683 - DNA, 106 bp, Homo sapiens
cggcccgagaaagatcagcctataattcttgtgctgttggatatcacccccatgatgggggtcctcggacggtgtcctcaatggaactcgcaagagctgtgccctt

SEQ ID NO: 678684 - DNA, 458 bp, Homo sapiens
  misc_feature (6)..(6): n is a, c, g, or t
cacccnacaggatcctcccctagaagttcagaaatttaccccaaaagaaaagaggtagtactcacagccagggatttaatcaatacagatataagtaagatgtttgaactagaatttaaagcaatgattataaagatattagagggcttgaaaaagcatagaaaatcccttcttgtagagataaaagaactaaaatctagtcaagctgaaattaaaaatgctatttctgagatgcagtcccaagtggaggcccataaaaataaagatgaacaaatcagaaaagtgaatcagtgatatagaaaacaaagttatagaaaataaggaagctgaaaagaagagggaaagaaaactattagatcacaaaggtagacttagggaacacagtgactccataaagcaaaataatattcttattataggagtctcagaagatgaagaacaggaaaaatgggtaaaag

SEQ ID NO: 678685 - DNA, 734 bp, Homo sapiens
cgtggacttgaactcctgacctcaggtgattcaccaggctcggacctcccaaagtgctgggattactggtgtgagccactgcacctggcctattattatttttaaattttttgcttgtcaagttgatcattcttgggtgtttctcacagagggtgattgggcatgggtcgacactgacacctagtggaggggaaggtccgcagcataagcataggtgatcaagggtctctggtctaccgtaggcagaaggaaccctgcggaccattccgcagatgtcttgtgtccctgaggtacattcaaattagggagctggtgatcgactcttaaggagcgatgctgccgttcaaggcgatcttgtttagcaagagcacatcttgctctgcgccttaatccatttagaccctgtagtggactacagcacatgtttcagagaagcacagggttagggggtgaggtcgtagatcgcagcgaggatcgctacggcagagagaatttgtcttgagtacgagagacaaaatgaaggtctcgccatgtcctagctttctttcttacaaccatgacacaggaacgaaatctgattactctatcttttccgccaccctttcccgcctttgtgtattccatcaaaacctgcctatcgtcaatcatggcctgttctccatgagctgttggttacaggctcccagatcggggtggcgggtgggcaagaagggctccttcactgtcccgcatgg

SEQ ID NO: 678686 - DNA, 545 bp, Homo sapiens
aatggtccagtagggttgaagtttatatttgcaagagcttgaaggctggcacggtaaagtacactcctttagtcacagagggaagctctgaaccctcagagcagccatatgagagggcagagcatggtcatcagcagcagtcagaggggtccccttgtcctgcccttttgcaagggttcaaggctggtgcaggcctggggcttctgtcgctcagcagttcaggggtggtcgcagaaatgcggcaagtatagtggttctgtagatagtgagagcgacattcctagagatatgctcatacagaccctcagacagcccgagaaatatggtcatacggtaggtaagttaaggtaccgacttcgatataaagacaatgtagcagtgggaatggtttgtgctgactgagtatggtgaagaagcagtctcactcccttcttaatgtctatagatcaacattgaggtaagatatcaggacagggagctgatggaacacatcttgacacctgaaccccgtcccccaacaagccttgtgccgaattcagcgcgag

SEQ ID NO: 678687 - DNA, 136 bp, Homo sapiens
ttggtttacctattaaaccatcattgactatggaaatacttactaagcaatatagagacagacaatattatttttccccatccatttcaccaagagccaggtcccccactcaataaacccttacattcttttttca

SEQ ID NO: 678688 - DNA, 317 bp, Homo sapiens
tcccgaggcttcaacggaactttcccgtaatctgtcccctcttacggaagctagctcgtccgtatctgtccatgggctatcttctggagacttctaggatccagaagagtatgttatcaatatctcaagcctaggagaggtctaggagtagagaacagctctgagaagatactgttgtccaactgatctccaggcaccagggagtcggttccctccaatcaggaaggtcggaatctcgtgatgtcatcgttcatgccaacctgggaaccagtttgaaaaaaaacacatgtaactgccaggctgatctcttgtcctgg

SEQ ID NO: 678689 - DNA, 161 bp, Homo sapiens
  misc_feature (155)..(155): n is a, c, g, or t
  misc_feature (157)..(157): n is a, c, g, or t
cgtggccggcagtcatctagcggccgttcagaattataaggtgtctgtgcagagatttgaaaaatggcaacaaattgaaagtgtcagcatctttagttcagcctctggctgtggaatatgtagattacttttcctagatcttgcagacattaaantnacta

SEQ ID NO: 678690 - DNA, 175 bp, Homo sapiens
cagctgcacaaggatggtctggaacggaggcgtccgggaagcagggcggagagcatggccagtggtgggcttcggccgcggttctacctgtggccactcactctcggacgtagaccctggtgcacacaacgtcatccgccgtcatggtcaggatcagctccccatcggtgtccag

SEQ ID NO: 678691 - DNA, 520 bp, Homo sapiens
  misc_feature (348)..(348): n is a, c, g, or t
ctgccgggtttcgttgctgcctttgtcaacattcatttatggcttcttagcgtcacttccatacatcctgcctgccctgagaacacttagtgtggcaaagtaagtcataggtatttgctgcaggaaaatcagaaaattcaagtcagatgaaaagaaaacagttaaaaacccaggaactccctggagagtgcaccctgctggtgcctccactgctcgtgcccccccagcgcccccgcaacgtgccctgcgtgactttccgcagcgcctgtcgggtgttttccactcagcagcttgttgtgaacgtctctgcgtcctgtggtttctctgtcacactaatgattttggagncattatttcatacttttacaacaatgtctgttgctggacgtttacgtcataacaatttttcaaatgttataaactgtgaacacttgaaggtaaacttttcacagttgcctgatgaattttctggtgcgatctaattttcccaaatcgcctccagtccaaggggaatggtggt

SEQ ID NO: 678692 - DNA, 1036 bp, Homo sapiens
  misc_feature (488)..(488): n is a, c, g, or t
ggcggcgcacaggtcctaattcgggagacgctgcgacttgtactagttgcggtgctgtgtggctactagatgcaaagcccggttcgtctagtgggagtctccagggtctgccgaatacacgcggcgatggagaacggcaccgtggccctacggacatgaacgtccagcgctgataaggtccaggatgaccgagagtcagcgagggggctggcaaaatcgactttcccagctgcctagagcgcaagggtactttttattaacccggctgcaggaattcaatcgggacctgacatgtgctgtgatcaccggaagtttgcctcgcattcagtcttgggggccaaaggaatccagatcgaaggttccaggagagaaaggacacgcaaaaagtggtcgtggacttgtcagagcaagaggaggaaaaggttgctctgtcggactagtggtcctgctggggctcacggtacgtgcacttgcgctcatcgaccagncggccggaggggggtacggatctcgttgagcgcacagggactgccgtgtgtcttgggacggcgcctgggggtcttccgggccctacggttgccattgcgccctcgtgctgctgcaggatgcctgtgctgctgcattggtgcggtctgcggagggatgcctccacccgtgggctgctggctcttcatgcgcgcgtgatgtcccgatggtgccaaagaccgtggaccagctggtggcaagacagaatccaggcagagtgtcccggaatggctgatgttagcaagcacgcagagggttgtctggggaaagagtagagcgtacccgagtctggacccctggttgcaggcccaaccaacctttctggccatgacgcgtggtccgctgtgacctcaagaacgggttgcgtgcttatacttaacgcatttagagtgagggcaggtgcgatgatctgccggaaaaggaggggggaacaaatcggtatcctcgtgtgcagtaatattatttcctgcaagaagtctagtatactgaaatagcgcatcgattgtcctca

SEQ ID NO: 678693 - DNA, 156 bp, Homo sapiens
cgtctctagagtatccccctctgagctgttaagacacgtagtttgtcttaccgaccccctcaggacgcgcaagtatgaccgtttggatctcattcgtcgatctttgatagtatgtctgcagtcactccccacgagccaggacaggcgtcaagatac

SEQ ID NO: 678694 - DNA, 87 bp, Homo sapiens
accagtgcaccttcatttggtacaaccagtggcgggctctttgataatctcagtgataccttgaagaagctgaagataacagctgtt

SEQ ID NO: 678695 - DNA, 374 bp, Homo sapiens
tggccctgggcggaatgagaagcagaggcgccgtccgtcctgccgccgaagtccgcagcctcgaacgcaggggagtgcgaggtcggctgcggacggacggacctggagaccgcgcttgggaaaccgtggcttcggaggagcgtggtgtggaccccactgcggggcgcccgcacaggccacgcagagcatgaacccgactgggctcccggggctgggtgcatgggcgggggcgcggcgcgggccggggtttctttttcgggggaataggcgtgcccttgcattacggtggtggtagctcacaactctgttaatcgtgtttttacagggtgggtttcaggatgtgtgagttatatctcagtaaagcaattatttta

SEQ ID NO: 678696 - DNA, 275 bp, Homo sapiens
actcgtggcgagcactgtactccaatctggtgacgagccagactccgtcctcacaaaaagaaagaaagacttaaatgtcagacctgaaactataaactactagaaaaaacatagagaaaactcttcagaacatcggcttaggcagataatttatgagatgaaataccatgacaacacaggcaaccataagcaaacagtggacaacatgggatcacattcaagttaaacaatcttctgcgattgcagacggaaatatgtacacgtgatcgaaccaa

SEQ ID NO: 678697 - DNA, 186 bp, Homo sapiens
ctactgcttctgcctgatcaggatggtggtttgctgaacgctggggtggctgtggcaatttcttaaaataagacaacaatgaaatttgctgcattaacttattcttcctttcataaaagatttctctgtaggatgtgatgctgttttgcttcctgttctgccttgcttcctgcttctgccgcggtg

SEQ ID NO: 678698 - DNA, 101 bp, Homo sapiens
aagaaatgtagtttttgtagacatgggcactttcttattaagttctgtatgtgcatttatagagaaaactgaaagtctgccactgatttgacagcattgga

SEQ ID NO: 678699 - DNA, 520 bp, Homo sapiens
aaactacgacccccacctgcggccggctgagcgcgactcacatgtggtcaatgtcagcctgaagcttaccttgaccaacctcatctccctgaatgaacgagaggaggccctcacaactaacgtctggatagagatgcaatggtgcgactatcgcctgcgctgggacccaaaagactacgaaggcctgtggatattgagggtgccatctactatggtctggcggccagatatcgtcctggagaacaatgtggacggtgtcttcgaggtggctctctactgcaatgtcctcgtgtcccccgacggttgtatctactggctgccgcctgccatcttccgctcctcctgctccatctctgacacctacttccccttcgattggcacaactggtcccctatcttccaatcccagacttacagcacccgtgagatcaacttgcagctgagccaggaggatgggcaagccattgagtggatcttcattgacccggaggctttcacagagaaaggggagtgggccctc

SEQ ID NO: 678700 - DNA, 974 bp, Homo sapiens
gtaatatgccagccctcagttctgcttccctttctgagtccacaaaagccagatgtagaagacataacacctgtgtcgatctggaaacaaaaaaaaaaaaaaaaaaaaaaaacaaaaccagacaacgaacaccacagcacagccccccgcgcgcgacaaagcgggagggagagccgagcacacgacgacgcaagagccggagacacggaacgaagaagcacggaacgacaaacaccacagaatatacaaccgagacagcacaccacgcagcgcgaccaccacacaagcacaccaccacaagcacaagcaagcgcgtagtaggaacacacagcagacagacagccggaagcagagacaggacgacgcagcaacttacagcgccaagcacagcccaaagacgagaggagaacaagagacaaagagaagagacgggaaagagagacccgcaatgacaggcacagagcagagcaaaccacagaaagcagagcgacagaagagatagagcagacagaccaagcaagacgacgccgcgacagagagacgcgaagagcgaggaaaacagaagaaaacaggcccggaaaggaaaggcaacgaaagccgacagacgagacaacgagacgaccaacgaaacacatcaagagagaagacacatcgaacgaaaggacacgaagaagacgaacgaacggagaagcaagagacagaagaaaacaaacgacagcggagaagaaaaacgacaccaacagaagcagcctggagaacgcgactgaaggagaactgagacgaagagacgacgacacggaggacagcggatgcgacgacgacagagaagacgcggagcgagacagagagagacgacacagagtatcagagacaagaccgaacagcgcgcgaaccaggagatcacgcagacccccgaacgactagtgcgctaggtgcagattgaggagcgggagccggagcagagaccagagaat

SEQ ID NO: 678701 - DNA, 667 bp, Homo sapiens
  misc_feature (137)..(137): n is a, c, g, or t
gtgctcgtgagattaccatattacgtggggaggggccaagttgcttctctgaccagatccaatacgtcccagaggggcgtatttctttttagagaagcacagctggcagggccagtgttagtgaaaaaggagggaanagtccaattttcatccggttaacaaggatctcagccgtatatgaatgggggtacgagtaggacccctggtatcgccatcgtacccaccaaggcacaagagagggttctgtacccaaccaaggtagagcccagcttcacatttacgagcggcctccctcccacattctgtttgtttttcctggtaggctaagtttggccagtgctaagctgcccatcgagaaaccttgtacaaagagtagagtgttgggcacgggattttaggaaatctcgcattcatgtattgaggcacaggtcgagctctgtaaccgaagccgttcctgggttgccattggtgtcgaaagaacgcggcactctcccttggcccggtcttataccacacaagaagccggtaacttagtcgtgtgagcacgcattcataggctcgtgaacacgcggggcaagttgtactgcacccagttttgtaaaaccggcccgatatggtcatgccccttcattgacatctgacccacgttgtcatcctttcacaggca

SEQ ID NO: 678702 - DNA, 534 bp, Homo sapiens
aagatcacgtgtgtatcattaaacaataattcccccttcccaactttccacagcctctggtattctactttctgtccctatgaatgtacctattgtaggtacctcaaacaagtggaatcacaacagttgtcctcctgtgtctggcttatttcatgaagccgaatgtttccaaggtccatcatggtatatagcatatatcaagactgccttccttttaaggccgagtaatattccattatatgtatatacaccattttgtttattcttctgttgatggacacttgggttgttccacctttggctattgagaatagtgctgctgatcagacgcagtggctaatgcctgtaatcccagcactttgggaggccaggtgagaggatcgcttgagcccagaagttcgagaccagcctgggcaacatagcaaggcctcgtctctacaaaaagtttaaaaattaggcagccaggcatggtggtatttgcctgtagtcccagacactcacggaaggctgaactgggaggatacacacgtactt

SEQ ID NO: 678703 - DNA, 1101 bp, Homo sapiens
gcaggaagcctaggtgtcttgagaggccccacaacgatgccggaggctaccagagactcttgcgctcctcaccagaaatcccgtgggcgttctcaacaatggtgaacgtcacatcaatctgtcacgagtgatcccgtggatgtgtcttgtggcacaggtagatccttgtcctgggcccaatgcaatgttgcgatgatgctttattcattgactgcagagtgtgtatgcgatatcttcttgatgtgacgtgtcgaggatgttgcgagactgggcatggagtaccaaaccagatcgtactatcatgaaagaataatcgctgtccaagaggggttgaataatcactgagggtgatggtcaactgctagaataggatgtgaatctgatccttatataccacaggatggggcagatatacgtgagcatattgcctccatcatgagaccattggtagagcgaagcaccatggggatcgacgagaaaacggtagtaggcttttggcattgccctctgcatgtgaatccttgccccccgtgacttcctcgtagagtaccttgcaccaaggagatgaagagaatgattcagggacaaagccttggagaaacttgaatatactttcaaaaggccatgtagctgcagcatttctcatgattccggtaacataagcgttctacagggtctctaagtttcaaaaccgaagagtgacctgttaactaagattgttctaagacgcccaaagtcaaaccatttcttgatggcgcacagtgttcccgcttggggacactaactggatggccatggacctaatctaagctcaagagacgttgtatcatgagagagtaaacgctgaggattaacacctgcgaaggaaaagatatacatatgaaaaaaattgtgaggaagatgaatgaacaggcagctgcacgaacagcaaaaacaaagcgccaaagggcgaaacggggccccaatgaggtcccaaaagaggaacagccagggggcccagaaataccctggtacacacaagaggcgaaaacccagggagatcaccctaaagaaggaaccggaaaatactgtacacaaacgccccgataaccccgccaaccg

SEQ ID NO: 678704 - DNA, 288 bp, Homo sapiens
cggatcttcctttcacttatttgcatgtatttaacttactcctttgtcttagaaggctaaaacagttacgggacatctgaccagcatcttagcattcattccctcatcattcaggcagcaagtatttattgagcgcctacaatgtgcaggcagttttctaggtggtgggtataaataagtgaataaatagaccaaaaatccctattcgcatggactgtggttctgacgggggtgagggcacagacagtactgaaataagttagattatgtattatgctagaaggtgct

SEQ ID NO: 678705 - DNA, 241 bp, Homo sapiens
ttatggcgtcaagacctaaatgcaagaaactaatcaaaggttggtccgctggcttacacctgcaatcccagcatttgggaggttgaggcgagcagatcaccaggtcaagagatcgagaccatcctggccaacatggtgaaaccccatctctactaaaaatacagaaattagccgggcactgccggcgcacgcctaatagacccagctactcttcgggcactagggcaccgagctttaaatc

SEQ ID NO: 678706 - DNA, 670 bp, Homo sapiens
gaacggggtatgcggttgcgttgagcaggagctgtggtgaggctggggcagcgcccacatggctgggcatgctagtgaggtgcagcagctcatcactcagccccggtagaagctcaggtccagcaccgccatcgagagcaccatggctggctcagtggagcgtagtgattgtgttgcacggtcgctgtgtctgacagctgggactgcctgacgaggtccgacagtctcccctgtccagcagacgtcttcttggaggctggctcttgagtgcagctctgggctcttcctactggtctgcagtgctggccccttggctgcttgcttcgacgtgacggggtgacggtgctacgatgagctgtcgggagatcttgttcgaggacttccagagctcatagtccttgtgaggaagggccgtgtcaccaatggtgaatctgagcccctcctggccacctcagggccttggggagaggggacccaggcatacacgtgttttgtgtgcatccactgtcatgcacaatgcatcactgagttgccaccagggcctcccctcctaaccccaaatgctggctgtggcctgctcatagccagggatgctgcctctggagctgacaggctggccagtccgcagtgcccgcggaggagccagagggtacgagtcgatcgaatctgg

SEQ ID NO: 678707 - DNA, 714 bp, Homo sapiens
  misc_feature (656)..(656): n is a, c, g, or t
gagaactgggcatgagccctcatgccttgccttttaagaggccaccatcagagggacttggtcctccttgactggtacttgtgtacatgccggcgacctgaggactccactcacactggcgagcacaccagtttctcatggggtacatgattttctgaattcttaaacaatggtggtgctgtggctcttctgggaactgataagtgctttaagcaatgcccataccctgtcaagactaccagctcagtcatttgctctgatatgcctaggcacagtatcctgggagtgtgcttgtgtcagcagctcattttacctagattatatattgcacgatgaatagatcctcttttttccctaagggatatcacttgcctgtgatgtgtaatatcctgcttgcgaatagctggagcaaacctgaggctgacacacgtgagctagtgctgcaaagcgagaagagagccgctagagtgtacttgtccctgacaggctgacctacctgagtatctgagctattcactccaaatctgagcaaggctcaatatgccacagaacctatcctcttctcaccactccccatggtagggaccggaccatccctacatgctacatgcagctcctccagcccctaccattgccatggctcatgtaccttacgngcatggggacattacatgcgactgcttggttcgaccacctatcctctctgtcccctcc

SEQ ID NO: 678708 - DNA, 379 bp, Homo sapiens
aataaaactttttcaaaagtttttaagaagtgttttaaaaatatattattactatcagagctgtaagagaagataattattatgaagcaagaatataccattaggcctggcgcagttggttacgcgtgtaattcccgcactttgggaagccgaggcgagtggatcacgaggtcaagagatcaagaccatcccggctaacatggtgaaaccccgtctctactaatacaaaaattagccgggcatggtgcgggcgcctgttgtcccagctacttgggaggctgaggcaggagaatcaattgaacctgggaggtggaggttgcagtgagctgagattgtgccactgtactccagcctggtgacagagcgagattccatctca

SEQ ID NO: 678709 - DNA, 268 bp, Homo sapiens
ttttttaaaggtttaaaaagtttaggaaaattcgcccccccaaggctcctttttttattagggggcggtttccaagggggaaaaattcgccttggaaattttgggccccgtttttttaaaattcaaaaaaaccgcccggccccccgggtttaacctttattttcccatttggaacccgtttaaaattgggcccccaaaaatttgggggtttttcccccgaaggccccaaatttttttttgggaaataaaaggccctttttttttttca

SEQ ID NO: 678710 - DNA, 246 bp, Homo sapiens
  misc_feature (20)..(20): n is a, c, g, or t
  misc_feature (25)..(25): n is a, c, g, or t
  misc_feature (30)..(30): n is a, c, g, or t
  misc_feature (45)..(45): n is a, c, g, or t
  misc_feature (54)..(54): n is a, c, g, or t
  misc_feature (59)..(59): n is a, c, g, or t
  misc_feature (70)..(70): n is a, c, g, or t
  misc_feature (92)..(92): n is a, c, g, or t
  misc_feature (102)..(102): n is a, c, g, or t
  misc_feature (104)..(104): n is a, c, g, or t
  misc_feature (108)..(108): n is a, c, g, or t
  misc_feature (112)..(114): n is a, c, g, or t
  misc_feature (120)..(120): n is a, c, g, or t
  misc_feature (141)..(141): n is a, c, g, or t
  misc_feature (146)..(146): n is a, c, g, or t
  misc_feature (152)..(152): n is a, c, g, or t
  misc_feature (165)..(165): n is a, c, g, or t
  misc_feature (177)..(177): n is a, c, g, or t
  misc_feature (195)..(195): n is a, c, g, or t
  misc_feature (197)..(197): n is a, c, g, or t
  misc_feature (214)..(214): n is a, c, g, or t
  misc_feature (237)..(237): n is a, c, g, or t
  misc_feature (246)..(246): n is a, c, g, or t
tgaagtggactgtgtgagcntgggnattcncagagaggaagggcngctgtgcantgccnggccttcaganagacagaattcatcacccaatncagggggagntnttcntggnnnaagggnggagccgctcattcacccaanaaaantgtgtnttatctgccaggnaagaccagcctnacctgggaactgtctggnanggtaggctgggcccccnagtgctgttagaataaaaagccncgtgccggn

SEQ ID NO: 678711 - DNA, 316 bp, Homo sapiens
aggctcaggcaatcctcccacctcagctcccaagtagctgggaacacagacttgtgccaccacacccagctgtagagatggggtttgctatgttgccccgggctggtcccgaactcctgagctcaggcgatctgcctgccttggcctcccaaagtgctgggattacaggtgtgagccactgtgcctaaccaacaatataatttttaaataagtaaaagcatttctgaaaatcagcctatgtaacatgctgaacataaaagatgagtatttatggagaaaaaaataaattcagtaaagcacagaggcacagacagtc

SEQ ID NO: 678712 - DNA, 147 bp, Homo sapiens
cggcgcttgataaagaacaagatttaaggtgccaagtgtcagtgaaagaaagttaaaaattcctcaaagacgcaagtctgagtgcatttacccaggtctacaagcaatcatcatttacaaggttagggggccaaggcaatgcattgc

SEQ ID NO: 678713 - DNA, 431 bp, Homo sapiens
aagggaaaaaaggggaaagggaaaagaggagaggaggaggagggaaggaaagagaggaaggagaagaaggaagagaggaggggaaagggaaagaggaggtgagaaggaggagaagaaagagaggagagagaggagaagacaagagaagagaagaaaaaaggaggaaagaaggagagagagaagaaggagggtatgagagagaaggagaggggggaaggaagaggaggaaaggaggaagcgaagaggaaggagagggagacagaagagaagggagagcaggagagagaagaagaagtagaaagaagtggaagagagcaagaaaagtaacactatctcacactctctctaaatctatctctctctctctctctctctctctctctctctctctctctctctctctctctctctctctctctctctcctagagc

SEQ ID NO: 678714 - DNA, 113 bp, Homo sapiens
agaagagagagaaagaaaggagtaaagagaatagagggagaaaggaagaagaaagaaagagagacgaagacgagaagaagagaaaaagacacaacgaaagagaagagaagatc

SEQ ID NO: 678715 - DNA, 213 bp, Homo sapiens
gctgtacctacctcacagggctgttgtgaggattaatgagatggcatgtgaagcactttgaaattgtaagcgctatgtaaatgtaaggtattatagacacatctttaacatatagtgtcataccctcattttttcacacagagagggaaagtctgcttgtaagctcggttgagaaaggttatctcgatatatatctgtgtgtgataaatatct

SEQ ID NO: 678716 - DNA, 423 bp, Homo sapiens
gggaatacacagctaccaataaccagcccgattattgtccatacgatgcatatgaccagcaatcaggcaatgatcaacatcaaggctcatatgatgagcagtcacatcatgatccgtagcatgatacctatagtcaataccagcagtcctatcattcacaaagggcaaagtacagccatcagacacaagatgaccgtcgtgatgtgagtaggtatggggcagataatagaggatatggcgggtcaccgggaggaggtagagggcgtgcgggatatgacaaggatggaagaggtcctataacaggatcaagtggtggtgaccgcggtggcttcaaaaattttggtggtcacagggattatggacccagaacagatgctgattcagaatctgataattcagataacaacacaatctttgtgcaag

SEQ ID NO: 678717 - DNA, 168 bp, Homo sapiens
acttcaagctcaacctattctcgttctctttgttagaggtgtattgaggatagcatattgagaatatattctctggttcaaaccaaagattttgtgacattaaaactacttgaatttctacttcataataggagtcagtcacttctgggactatagtgatgcttgcaa

SEQ ID NO: 678718 - DNA, 620 bp, Homo sapiens
ccccgtgtggtcttgtgctgggagaaggcagcggacgcatcacttgcacttctagaaataagatgcacgatcaggacacaaggacatcctatagaattggagacactggagcagaaggataatcgaggaaaccttgcatccagtgcatctgcacaggcaacggccgaggagagtgggaagtgtgagaggccaccacctctttgcagaccacatcgagcggatcttggccccttcaccgatgttcgtgcagctgtttaccaaccgcagcctcaaccccagcctcctccctaatggccactgtgtcacagacagtggtgtggtctactctgtggggatgcagtggctgaagacacaaggaaataagcaaatgctttgcacgtgcctgggcaacggagtcagctgccaagagacagctgtaaaccccagacttacggtggcaattcaaatggagagccatgtgtcttaccattcacctaacaatggcaggacgttctaactcctgcaccacagaagggcgacagggacggacatctttggtgcagcacaacttcgaattatgagcaggaccagaaatactcttccagcacaagaaccaaacgccagcacaagaaccaggcttc

SEQ ID NO: 678719 - DNA, 211 bp, Homo sapiens
gaatctgacagcgtctctagcattgttatgattaggacatgatgcctgtaatcctagcgctctgggaggttgaggcaggtggatcacttgaggtcaggagttcgagaccagcctggccaacatggggaaaccctgtctctagtaaaaatacaaaaattagctgagcatggtggcaggtgcctgtaatcccagctactcaggagtctgaggc

SEQ ID NO: 678720 - DNA, 364 bp, Homo sapiens
  misc_feature (15)..(15): n is a, c, g, or t
  misc_feature (162)..(162): n is a, c, g, or t
  misc_feature (164)..(164): n is a, c, g, or t
  misc_feature (331)..(331): n is a, c, g, or t
aagatatgaatcatnatattatcacctccatctcaggaaaaaccaattttagattctctattaagcaaagagggacaaaaagtgtgttcagtatctgactggataactcaccttagggtaagaataaggaatgtggtttggttcattggataagcacaaagnangaggaaaaaagtatcacgttagattcacaggttataagcttgaatctcagttcacacagttttttagatcttgcagatcttttcttgctaagctttattttgaatgagaaacactgatctcttaggtgaaaatttgggaaagccatcctgatctgaatttggggcancagaccgttttgagcagtgtgatatcaaaaaat

SEQ ID NO: 678721 - DNA, 209 bp, Homo sapiens
acatcagtgcatccgaagtttgttctcaggagaaaatctactaaaaatggccaaataggttgttaatactcgtgaaaccctcttaaaaataatccctttaacagatgacttcttccccaccacaatcaaaggatgggaagttactcaggggaggactggcagatagaattcgcccatattccccaaataaatggcattcaatgtccaaa

SEQ ID NO: 678722 - DNA, 338 bp, Homo sapiens
tatagccggtcggggatctgtacagtcgaccctgcgggcgtggaacagagtgatggcgtcggtaagagaacgctcagttgatgggtgcagttgcttgcctctcctccctgaatccaagaatctatgttctcagccccgaggacaacacacaatttaaaaccggttctacaaggccacctccctatctgttgctagaagcctgctcccaggagttatgtgggccatccccctgcctctgcatgagatcgcctctctttagcccagcctactctggcttatccccactctccctttcgcaaactcagggaaagagagagtggagacaaggtagagccgag

SEQ ID NO: 678723 - DNA, 886 bp, Homo sapiens
taaaagggtttaaacgcttttttgtgcccaaaaaaaggcccttggcattgaagggaaaacgccgcccacccttgaaccccggaagcgatggttagtcgcgcccccaaaggcaaggaggttgtgggacctggaaaaggttgcgcggcctctcctgcgttcccccgcgccgccttgggccctggccaaccacggtgacccctgcccgtggtgtggcatgtgccgcggccttctggccatctctggccgcctagggcgccagtacccattagacgaaacgtgccggttgccagtggccggaaacgccactatatgatggcatctccgccgaggtgagctttgttctcaaacaaacaccctataaaacgtagccacacacaacctagaaaaacccgctactaacatctcggctagagtgtagtgagaatgtgtgagacaacagactttagaagaatgagacggcgatgtgtgagcccccctctacccttaggatgcgctctcaatacacacaaggcctctcatgcgggaggctccccgtgtgctcgtggcgcgttttgacccccctgttaccacaacatctctatacggtctccactgtgtgcggggtttaagaaaaaccccactaaaaaccccccggacataacgcccccatctggctcggccctgctttcagtagacctcgcgccacagcacaccgcgctctccacttgttggcggtgcccctttgtcgggccacctttgtggagagacccgcttagggcgtatatgggcacgcgccggtctctttcacccctctttttggccccctggaggggagcccggacggtccttctttgggccttatgccccgcctttgtgcccctctcctttgagcacccagcggccccta

SEQ ID NO: 678724 - DNA, 212 bp, Homo sapiens
aagctcggtacgtgatggctcccaggtgatgttaacacagagatgtggcaggcgcgtggtcacgctgcatcccaacaccttgggaacgccaaggtgggcggatcacccgaggtcgggagttcgagaccagcctggccaacatggtgaaaccccgtctccactaaaaaatacaaaaattagccgggcatggtggcaggtgccccattcccagc

SEQ ID NO: 678725 - DNA, 145 bp, Homo sapiens
ccgtttactgcccaaactccagtgacgggtctctatgaacatgccataacacactccagtgaagggttctctctgaacaagcctaactcactccagtgaagggtctctctgaacagacctaacacactccatgtgaagggttccc

SEQ ID NO: 678726 - DNA, 422 bp, Homo sapiens
  misc_feature (82)..(82): n is a, c, g, or t
  misc_feature (309)..(309): n is a, c, g, or t
ttcctttcccctttctcacatggaatgagggtttgaagagcaagccaggaaagtttagggtttcagggtgtcccaaaccccnacaccggccagtgggggaagtgaccgcccctcacattcctttaaataacagcctggttcccttggggtgcagggccctcaatttttttaagggtccaaaaggagggggtgacctccggccaggtgcctcttaaaaaacctgaagcctccctccggggggggccctgcccacccctcttggggggggtaaggcccgtggggccggggtttttgtgcacctgggttttnggggccttttttttaaaaccgttttcctccaacccctttatgaagggccgtttttggggaaatgggttgcccataaaagggcagccccgggcaatcaataaacagcgggtgat

SEQ ID NO: 678727 - DNA, 239 bp, Homo sapiens
tggtgattacaggatcgtgggagccttaccctgcagccccactgggtccaggggtcacggaaagctctgggaccttcatcacctttctggcccggaaaagggcctgctggccccgaggccccgggtcgcggtcagctccagaggggcctggctgtccgatggggccttgaggacctgtaggcccaggagaaccctgttctccttggtcccccttgcttcctttcggccccgggtcccgg

SEQ ID NO: 678728 - DNA, 375 bp, Homo sapiens
cattactcctgccactagtgctcttcggaggcagccatcatcactgtactgacaatgacctggctaaggtaatcacggccctccaagacaccaaattcaactgacttcatcactcatatggacctgactaaaacatttggcgatactcttttcctcagtttcttctgcagactatttgactcctgtgacatttctttgccaatttactatctacttttcactattctttctgcctgctttactagatcctttctttgcctgcccacccatccctaaagaaacatacttcttaaggcaccagcatttcttctcacattctcctagagaaagacttacaagatgcttggcttcaactgtcatctgtatctgcgggcc

SEQ ID NO: 678729 - DNA, 182 bp, Homo sapiens
caatagcagaatggaaaagacagaggaaagaatcagttatactgtctacaaggaatgtcaaagtaatgatattaaataggttgaaagaaaaaggatggaaaagataaaccatacaaacattaaacacaagaaagcagagtctgtcaaataaacttctggagacatatcccatcccccgaatt

SEQ ID NO: 678730 - DNA, 300 bp, Homo sapiens
  misc_feature (65)..(65): n is a, c, g, or t
  misc_feature (190)..(190): n is a, c, g, or t
tgggtgattagaggatcccactttacgcatgctctattgactgggttatcgtgtgacgggtggtnacgaaattgacaaccctggggttagtatagcttatgtaacttcggttatgctaaggttatcactgctgttttccggggggggtgtggttaggtaaaggtttgagctgatggtgcgtgttgatgtngtccctttgatcgtgggtgattaggaggggtgaacttcaactggaaacggggatgctttgcatgtgtaaatcttactaagagctaatagaaaggctaggaccaaacctat

SEQ ID NO: 678731 - DNA, 1935 bp, Homo sapiens
  misc_feature (1933)..(1933): n is a, c, g, or t
cagaatagaatacatgggatacagaatgtacatgaagaaatactcttgattttgtatactcagtttatctttggacgtctggtgataaagtacttattaggaagtgtcttaatttcactagtgtcaagatcctaaatacaggaatttgacatgtcatgtctgaacagtactatagtaaggtagtttgatgggatggagtgacactgaatgcatgaggtttatcctgagttatctttggtgtggttaagcttggacgtagtaatgagtgtttgaatgactgcattcatattcgataattttactatgtttaaatcacgttcgttagctcagtcaagattttacatctgattgaaattgcagtacgctggttgtcgataataacataagatcagagataattagaaaagataaagagaggggtgcgccgttttccctaaaagagggatgatttctcacagcaggctgtaagtaacggctctcgccaaaatccaaatgcgatactgatgcagatatgcacacccctaatccgttgtgctttgatgtctacccagggaacgtgaggtgccacactctcattatttagagcgatgagattagcactattcatatatatcaagtccaagcgagtaagagagggtagtgcgaattacgttgtgaactagataaaccgctgggactagagaatggtgttgtgggtggacaaacgacatgagtgacctgacatgctgcaatgggagggacaaatcacctgggggggtggggaggaggtggagatacctcctcaaatacttaagttgagggcgacgcgaagaggggggctcattcaaaatgtggagtgcaaacaaaaacgatataacccaaagggggaggaagaattttgtgaataccgaagcatatgtataaggcggcccataatatatgtagagaacgaccttgctgaaccactgggtgtgggacataacaaacgcgggggtgattataaacccctataggtcgcgtgaaaaataaagtgcatgctgcgcattaaggtatttggggaagagacaaacctttcggggaaatataacccggggggaagagatactatcacatgtggagtctaggtgaaacggaaatataattcttaaatccgacgaggacgagggaggaggggacaaaaaaaaaaaacacggcggcgacaaccacccgagcggcgaaccacactcactaaagagaggacgacgcaagaagtgtagacacaggacactaaaccaccatagcgccgcgctacgagacgctgcgtgctaccaccacacccaacagctcagagggggccacacgcaaatcaacacagctgcgccgcaaaaacgacctactaactcaccgaccggaccacttagagcagtcgggaccaaggctgcacagccccacaagcatcttactgcagcgcaagtaactagagcaagccggcgatcaagcacacgcaacaccccagtagttgtatctaccctagggccacggcaagagaaaaacacaaacacacactgcacaacaaacggagcggcacacgagacaacatagcaagacaatccgatcgcacacgaccagaacacctgagcgagagaacgaaaccacacccacacagaatcaccagacacgaaagcagccatggtcgagcccgggactaagcaacaacacaaacccagggcgagaccacaacgtagcgcgaagccgccgacagccacaaaaccaaacacacgacgcgcggacaaacccacatcgaccatacgacacgagcagagagagacagcacccgaagcacagcagcaataacagcagagcaaccaagaagacaacgagacgcacgcgcaacaacaccaacaagcaagacaaacgcagctcagcaagaaaaaaagacaagaagagaaacacaaagcgacacaacggcacgcgngt

SEQ ID NO: 678732 - DNA, 198 bp, Homo sapiens
  misc_feature (39)..(39): n is a, c, g, or t
accatcggtgcggtctggagcgggcagctctacggatcnggcttggctgggggtaccactggctgggtctctctctgcgatatgccgggttaggtaaacgactggcggccgcctggagggaggggtttggattcctcgtcctggtcgggttgtcgtggtccttaagcgtaggtgtgtatggagtctctagctccccga

SEQ ID NO: 678733 - DNA, 406 bp, Homo sapiens
  misc_feature (387)..(387): n is a, c, g, or t
tgtctagagatctcgtctcaccacctcactacacatctcagtcagtctcgctcggtatcgtgctcaccctctggccggtatctgcctgtcgtgcacaaggagagcccggacggacagcgaggaggggagcagcgggagttggggcttcccccctggccattccttggcgctgccccgggacgaagccactttgagcgagcagagagtcgtcaccttgtctttccttttgcccttcaggggtaggagacgcgtggttacttttcgcggggaactggggcaggaatccatggtggcatgaacttggtcgtgccctcggcgtgagtgaatcgatctaggcgcgtgtgggaatgcccgtgtgttctactttctttgcagctcgccatgagnttttttgtggatgtgcagc

SEQ ID NO: 678734 - DNA, 216 bp, Homo sapiens
gcgtcgactcagtttacatacttttcactctctgtgttctggtcacattggctgcctttgttggtccttaagcaggaccaagtccttaagctccatcctgctagaaagcctttccatattttattccttctgcctgaaacactctgctctacccctgcctcttcctcagcttgttagctcctcttgcacctgtgatgtcaaggaagctttccctgc

SEQ ID NO: 678735 - DNA, 112 bp, Homo sapiens
atgctggttgggttgcacagaggtggggaagatctagaagccccagcgacgtggcgctctaggtctctcagcgacaggctggtctaggagcagaaatacccagagaagaggc

SEQ ID NO: 678736 - DNA, 394 bp, Homo sapiens
tgcacacgccgagagaccatactgatcttactgaccttgtacgagcccagccacgagagctggccatggcagccctgggggaagacgattctaaagacggcatgggaacggctgctgctctcattcatgttggagacagccacagtccgagctttatttccacagtccatgaggtcagcaattactgcgagggaggacacagccaatttggacaggtcctgcacgtacgtgcctaggatggtgtgctccaggacccgcagagaactccgactcttgaggttcaagaggtctcgtacccgctcacagtagatcttcatatagctcacctccacagagtaggatagctgagcactctggttctcactaacgcgagagaagaggtcctcacagagct

SEQ ID NO: 678737 - DNA, 544 bp, Homo sapiens
ccctgttaaacacagatcttacttacagccaccaacaaaagccctgcctttgacttgtgtagcttcgtcattgtaaatcacatgcaagatcctccagtaccagtgagactttcactaagatccgcgcccttgcagaccccacataagtcctttctaggcatttgggtgcctcagttccaccctcggctgcctcttgagtgtaacattagtgcagaaaagtccgttaagaagagctcctatgtaaggccagaatagaactgtaaagttgcaagatcctctctcaatatgcaagcatgggggcccgcccgtacatgttgagacattacgtcctgcaccgctgttctttcatgggggccggtttctgaccccaaatggaaaaggggctggatttttgaccccccagaacatgtgactgttgccattagggcccgagacatgtgtgagggtattggcccaggttttagcattcatagcaccactggcacggcatagtgatttggcaatggtctctgaacagagagccacccaataaaaagcctgtttc

SEQ ID NO: 678738 - DNA, 334 bp, Homo sapiens
  misc_feature (276)..(276): n is a, c, g, or t
ttttttgagatggagtctcgctgttgtcacccaggctggagtacagtagcgtgatcttggctcactgcaacctctgcctcccgggcccaagcaattctcctgcctcagccccctgagtagctgggactacaggcacctgctaccacgcctggctaatttttgtattctcagcagagacgggatttcaccatgttggccaggccggtctcaaacacctgacctcatgcgatccacccgcctcggccccgcaaagtgctgggattacaggcgtgagtnaccgtgcctggccaagattcctataatttgagtgtaacaatctggtaattttacgtcg

SEQ ID NO: 678739 - DNA, 672 bp, Homo sapiens
gatgtaccagaactgcaattcgatggcgaggatgcccaaaaagctggccacttctagggacccgccaggacccccattggcctttgtccatccagaatccagaggtatccatgggagtgagccccaagagttctgaaagagtgtttgccaagacattttttcgcccttctgtccaagttttccaatgggacaccttggtgaagactccacacaggcgttctgattcaccatagctgaggattgtagagcccatatattgccatgggggtacccccatctggaagtccacggttaatggacttaatctcacccagcgtggttatggcccaaatccattaagagagcgagattgctttgacaacgattacgctttgattgctcgatctcttggtaaatacggcatcatctgcaactggaggatttgattcatgagatctatactgttgggaaacgcttccaagaggccaataacttcctcgtggcccctccaattgtcttctccaccgaggtggaatgaagaaaaagacccccccttttgtagaaggtggagattctggccaccgggaggacccgatccaccggcttattagaagaatgaactaaggtgtctaccctgaatatttttctaagctggttggttaataaaccagtaccctgctctcccaaattgga

SEQ ID NO: 678740 - DNA, 374 bp, Homo sapiens
tgtaaagcacacccgatgctgaaccgatgactgatcgagaacggtatccagaaagtccagtgcctgggtttgagctgctgttaaaggcactcctgccttaaggtgagctgactcaatgtagactcgaaagtatctgatcagtggaataccttcactggaaaagctgaggatgggggctttaaacagtttttcatcctctgacatgccgcgattctcaaaaaagaagtcgcatttgagcgcttccaatacttctgggaacgccatcagctcggcgtataccgcgcttgcatcgatgagaatgctctcacctcctaaaagtgctttctgtccacaggccaagatcaagtaatcgataggcaacgggtcgctcacac

SEQ ID NO: 678741 - DNA, 117 bp, Homo sapiens
agtagagatggttacgatcccatgatcgcccgcctcagctgcgaatactttatgtaatcccatctattctaatttcacttctgttgcttgtgcttgtagggtcatatccaataatgt

SEQ ID NO: 678742 - DNA, 481 bp, Homo sapiens
tgcccacaggaccctttctctgatcgctcctagaacatctgaacttcctgcgtatcttgtgtatgaaaaaaggctttcttacttctgcattatgaccattgatggtatggtattctgcaatacgatatatccacagagtcatggtcatcaaaagtaacaaagccaaagcctcttttctttccagactggctatcagtaattatctcaatggtatcaatttttccatattcctcaaagtaatctctaaggtgatgttcctcagcaatcttctttaaattcccgcaaaaaaaaggttcttcacagttacatgagcccctggttttccagattcctctcttgctgcagaacgttttgggtcaactactctcccatcaattgaatgaggtcttgcagccatggcagcatcaacctcagccatggatgaaaaagttacaaaaccaaatcctcttgatcttttgcttgcagagcgatcagagaaagg

SEQ ID NO: 678743 - DNA, 263 bp, Homo sapiens
gcccccaaaggtggtttgcttttgctggggtaaaaaggatgaaagtttgagaatgcccaattttttattttgggtttcaggccctgaaggttcttggggatttagtttcatgcctcggtttccccattgacttggacatttttgcggtttttataagaagaatattttatgaagtttttgttgccccatggatttttttcaaagattttcagggggaccaatccgggcgggaggtttttcccgatatccccccctccccaata

SEQ ID NO: 678744 - DNA, 716 bp, Homo sapiens
  misc_feature (405)..(405): n is a, c, g, or t
gctgcaggaattcggcacgaggtaaatgttaataacagactgaaaaagataatgtggcctgtgatcaggtgaagatagtataaacattattgaagtcatcaagaattttggttcaagatattacaaaactatagtcggaattactaaaatgcaatatttttttcttctgacttcatcgctaaactctccttttcgtagatgcatttaatattgttacataatatacttttatttatgtaagacttaagttgaggcttgttgaaattcctttacaattttctgctctgacataatattccatccaactctccacacactattatttagtaactatgagaaatgactaaatactagtaagaagctaacagaaaatctactcaggtacactcaaacataataaagcanatttatataaattaaacattaaaaataactgaaagagaaaatacaaattaaaatgatcataaaatatacctatctgaaggtcatgaaaatattatttttgtcttagcaacactattttattttaatatccatattaacatatttaccagagtttgtcttgcatgtgatttgaactatgggtaaagaatcaaacttttcaatgtggctccccatttgactcagtaacatgtatttgtaacatcaatgtcttattataccgcaatactgctggtatattttacccatcacacattgggctcttaggtactgct

SEQ ID NO: 678745 - DNA, 491 bp, Homo sapiens
  misc_feature (9)..(9): n is a, c, g, or t
  misc_feature (70)..(70): n is a, c, g, or t
  misc_feature (76)..(76): n is a, c, g, or t
  misc_feature (82)..(82): n is a, c, g, or t
  misc_feature (90)..(90): n is a, c, g, or t
  misc_feature (146)..(147): n is a, c, g, or t
  misc_feature (157)..(157): n is a, c, g, or t
  misc_feature (238)..(238): n is a, c, g, or t
  misc_feature (263)..(263): n is a, c, g, or t
  misc_feature (287)..(287): n is a, c, g, or t
  misc_feature (317)..(317): n is a, c, g, or t
  misc_feature (332)..(332): n is a, c, g, or t
  misc_feature (373)..(373): n is a, c, g, or t
  misc_feature (386)..(386): n is a, c, g, or t
  misc_feature (404)..(404): n is a, c, g, or t
  misc_feature (479)..(479): n is a, c, g, or t
ccgcccagngctttttccgtggtttcctgtgtgccgcctcccgcttgccgaagcgctaggccgaagagtnccagtngtagtncggcaggnccttctcccgctgcaccagctccgcgccctggggtgcggggatctggcggctgttnngggcggacangccggctgctgggggctcccggagctctcggggggcggggacagcgagggcccccgagggctcagcctggcagtagcagcnggcttcctctcggtgcacggcaggntctgctccccgggggccaggaggnccagggattctagctgctggcctgttggtntagaattccccacanaggccaccttttctaatggctccccaaagtgggttgcacanaggaaaagcagtngctgccaagaaaccagtnagtccatctcggtgagaagaggcaggtcctagaagtgcctcgaggcttgcctcagtcctggcctgggcaggagtntggcggactcct

SEQ ID NO: 678746 - DNA, 136 bp, Homo sapiens
cactctcgaggatcccgaaccgggtactgcggttgctacaccgaaagccgtttgtgagacagaacgccgccgcggacctgcggccgacgaggaagttttctactgtaaatgtcaccaacgagactcttccgccact

SEQ ID NO: 678747 - DNA, 239 bp, Homo sapiens
agattctgcagtgtaatatgaccaaatcaaatccgttgtatgatcgaataaggccgtcataaagtaagttgaaaatttcgttcttggctgaatcgtgttaaaccgttgtacacaacgtagtaaaattcataacccatctgcataccaatcgtcagccgtgatgcatttactcactttacgtcgatgaatgtcaaacatcgcaccttttcaatgtttactaaaaacatagcacgcaatat

SEQ ID NO: 678748 - DNA, 598 bp, Homo sapiens
  misc_feature (52)..(52): n is a, c, g, or t
  misc_feature (123)..(123): n is a, c, g, or t
  misc_feature (138)..(138): n is a, c, g, or t
  misc_feature (163)..(163): n is a, c, g, or t
  misc_feature (524)..(524): n is a, c, g, or t
  misc_feature (537)..(537): n is a, c, g, or t
ctttccgagtagcttctaagagacaaagaccaacgagccaccacagccaccngtcccagaacccgccaatgctggggaacggaaaatgagggagttcaactctggccctcacaatccagtggnggagacgaaactcanctgcctctgtccctctgggcacgcntcatgccaggtgcatctgtggacaggggccatgctcctgggcttccaaagttggagaaagctgccaggctcaggtctgaaggccagaattctacagtaagtcctactgagtcaaggtgggagcagggtcggtggcttccgaggctctgcgggagaatccgtttcctggccgtggaggtggcctgcactcctcagcttgtgctgcccgtctcgaatgactggagtttcctgcttctgtcactacacctcccaccctctccatcacctgctctgctcttacaaggatccgaagaaatggaatcatcgtatcgctgatctacgtaaacaaactgaagaattgtctgaaagaaaatatgacatgnacttatgaattcnacaggtgaagatttacacttgataaatcaactttgtcagctagacctgagcagaccggggc

SEQ ID NO: 678749 - DNA, 459 bp, Homo sapiens
  misc_feature (431)..(431): n is a, c, g, or t
ttatagtaagagaaaaaatatatatgcagtttctggagaagaggctttttatttctgaactttctaaatgctggtcagtgaatgccaccaataaaaaatattatgctcgccagaaatagagatatgcatccctcagagtcaggcatgtgggttttatcaaatgtagtggattttgtctgtggacatctgcggattttttctgcccagattcatttaaccctactttgggtaaaactaccccgacctctccctattccatcttatcttaatggcagtatcacatgaggtaccccttcccaaatgcatgagcacttgactcaagccatacctatgagagtgttcttttcctgagaaatacctacctcataaaactattgtatggattaagtgtgttaataacatgcaaagtatttagaagcattactgcatanggtaagcagtacatgagtgcactcttat

SEQ ID NO: 678750 - DNA, 125 bp, Homo sapiens
ttttttttgcaattttttttccttttcttttctctctctctttttaaagcatctcatcagctgtcataagtgtaagtgtatattatgtgtggcccaagatcagtgtggcccaggaaagccgtggt

SEQ ID NO: 678751 - DNA, 205 bp, Homo sapiens
  misc_feature (2)..(2): n is a, c, g, or t
  misc_feature (6)..(6): n is a, c, g, or t
  misc_feature (8)..(8): n is a, c, g, or t
  misc_feature (16)..(16): n is a, c, g, or t
  misc_feature (25)..(25): n is a, c, g, or t
  misc_feature (42)..(42): n is a, c, g, or t
  misc_feature (44)..(46): n is a, c, g, or t
  misc_feature (64)..(64): n is a, c, g, or t
  misc_feature (77)..(77): n is a, c, g, or t
  misc_feature (105)..(105): n is a, c, g, or t
  misc_feature (107)..(108): n is a, c, g, or t
  misc_feature (112)..(112): n is a, c, g, or t
  misc_feature (153)..(153): n is a, c, g, or t
  misc_feature (155)..(155): n is a, c, g, or t
  misc_feature (186)..(186): n is a, c, g, or t
cngcangncgaccggngcggtaggngcagcaatttatccgtntnnngccccaaactggaaagangatgctaattaangtgaagacgctgaccggaaaggagattnannttgncattgaacctacagacaaggtggagcgaatcaaggagcgtntngaggagaaagagggaatccccccacaacagnagaggctcatctacagtgg

SEQ ID NO: 678752 - DNA, 106 bp, Homo sapiens
cgactctgaggatccctgaaatcttgaacagaggtcccggaaacttcagctacagaatttttgaaacatcaagcagtgaataactgctgtccctggaaaatggcaa

SEQ ID NO: 678753 - DNA, 210 bp, Homo sapiens
ggatagtaatttgtaaataacttgccctcctctctacacacaaaattgtgtgtgtagtttgtagtgtgtgtgtgtgcgaagaaaaccgtgcacttttaccgtccctcagaaaagatgtgactgaagaaaatatctagaagataccgtgcgttagaatagtagagtatgtcaacgtgacccacactcaaatgctctgagtgactaagtagg

SEQ ID NO: 678754 - DNA, 133 bp, Homo sapiens
gggaagctgaggacaagtgagttcagagctagcgcgtcacctgttgtgctggaggagcggaggactcaaggtgcacgtccgagagagctttctcttctcgatggcgttggacacattccctgacagagaggag

SEQ ID NO: 678755 - DNA, 314 bp, Homo sapiens
ctcagccactggttgatgcacagaatccactaatgtgacacatggatggttgttttattataccgaattttgagcttgtttgttattccacgcaatagatagctagaatataggatttaaaccacaggcttctcctcactaggagattggggctggggctggtggtcagacgagctccttccctccctctcctgatgttgctgctcgaatgaccttccgcctcagtaatccagccactctctttagtccttgcttttcttgactactgggtagctcctggtgtggttacccattcccttctcgaatcactcctt

SEQ ID NO: 678756 - DNA, 204 bp, Homo sapiens
ttttttttttttccagtctcaagcccttcctgtaatattcagccagggggggaggccaagagaaatggaaggggaaggggattgaagggaagcagaagaaggaccaggtttattttttttttgggggggggggatatttaacaccccaacttttttttcccccatattaaaagaaagggggaggaagacacttttggggaatat

SEQ ID NO: 678757 - DNA, 438 bp, Homo sapiens
  misc_feature (5)..(5): n is a, c, g, or t
  misc_feature (10)..(10): n is a, c, g, or t
  misc_feature (110)..(110): n is a, c, g, or t
  misc_feature (239)..(239): n is a, c, g, or t
  misc_feature (371)..(371): n is a, c, g, or t
  misc_feature (424)..(424): n is a, c, g, or t
  misc_feature (426)..(426): n is a, c, g, or t
  misc_feature (429)..(429): n is a, c, g, or t
  misc_feature (438)..(438): n is a, c, g, or t
ttaangttgnaaggcccaatgccttatttcccccatcctggaaaatcccttggggccccttaagaattatgcctaaatcctactcctgccctatggctcctacaaatagnacaacaaagtgtgggtgacagtatatctgtcccatagcatggtttacctgaatatttaaagttcactgttgagacctactgctcagaaaaaagatttctttccaaatattactactgcttgacaatgtncctggtcacccaagagctctgatggagacgtgcaaggagattaacattgttttaatgcctgctaacacaacatccgttctacagcccatagattaagaagtaatttagattttccagtcttattacttaagnaatatatttcataaggctacaatcgccgcagtgattcctctgaagaaaacagncnttnaaaaaaaan

SEQ ID NO: 678758 - DNA, 1376 bp, Homo sapiens
tggacaacaataaatttatttattggggggtgaggcaggcaagcggggagggagggtaggggtgacctcttctttccctcacgagggccaccaggccttggtttctctctctcccagaatataagcataagggtcggcaggggcgtgaggggagtgtgaggcagggaggagtgcagtggggccgtgggggaactcaaaaaaaagccgcgggggctcagagagggatgaggagagccgtgagcgcgcgtgggggggggtgggggggtgaaaagggtggaggcagagggctcaagagggtgaaagcgggcagcccgcggagaggggaggggctccaattaataacaccgcaggagacttgtggcggggtgtgtagaaagttatacaagtgggacacctcaaatagagagggtgtgacaagaagaaaaggtgtgggagtctcagagaggggagaaatctcagagagaactctaagagaagaaagcgtggtggggtctcagagaggtataagcgagagcgcgctggggcccccgacgggtgggagaggtgtatacagaggcgttggaggccacgagggctccagcgcgcggtgaaaaagcgtggcacagtctctccagaagaggggcgagggggggtctcacaaccatatataaacccagagaacactctcaatgagggcgctcactagagagggtgctaacagagggggggaactcacgagggggggggggggacacaagagggtctccacaggggggtgcacagcgccagaaaagtccccacgagggcgcgtacacacgggaacgagggggctccgtgggcacagaggcgtccaaaacgaggggggggcgggcggggggattccccccccaagaaaggacgctgcgcacacaccagcggtgggggtgaacaaaagacgcgggggaggggagcttccacactacgccgcgggggccaaaacgttggctcccacaaggcgtgtcgtgcgggcaaacacgagaagggcgccccaagagcgggggggcggggctccacaacagcggacatcatacaaaccactcaaaggggggggcgccgccacaaacagagggggcggggaagccccccaaagggggggtctcccgcggacgcaaacaatgctgaaacaagggttatcgccccccacaacaaaggggggtcgtaaaacaaggcaggagagaaggcgccttccccaacagacgagggcgggtctccatccgtcggtcacccaagcaggcggcatcccacgagggggggggggcgaaagcatcaacacaccgcccctctgtcgagggactggctgggcaacaacagcggccgggggcgagcacacccacaaagaaggcgcgttcaccacacaa

SEQ ID NO: 678759 - DNA, 90 bp, Homo sapiens
gctgtacaccgttatgtgtcgtgtatcatttcatcaaaactcttattttccattatgtagttttccccacaggtatgtttttctcactgt

SEQ ID NO: 678760 - DNA, 144 bp, Homo sapiens
aaaaaaataaaaattgcctttttgcttgtacaaataggagcaaaactattatattatgtaggccgttaaccccacttaaaagtttagggtttttttttggttgtaaaggggcccaaaattgccttttgaatgaataaaggttta

SEQ ID NO: 678761 - DNA, 391 bp, Homo sapiens
ggcaaagctgactggttctgtatgaatgcaattttaggaaatataatttttcatcttaggggactgggtaaatctcagtcgcttgagtagctgggattacaggtgcatggcgacattgtttcccttaagtgaaaatgatttttttttttttttttgagacggagttttgctcttgttgcccaggctggaggccaaagatgcaatctgggttaaccgcaaccttccgactcccagtttaaagcgattttcctgcctaagcctcccaaagggctgagattacaggcatgagccaccgtacctggcctgaaaaagatttttaaaaggcattaaacataaaaccactttttaggaacaggggggaacatttgactgggaaccagtcagcattaac

SEQ ID NO: 678762 - DNA, 483 bp, Homo sapiens
  misc_feature (20)..(20): n is a, c, g, or t
tgatgagctcggcctctttngcccaaactcaccaagctcactatctacataaaacctctgctgtcactgcctgataagttgatgggccaaatgcccaggatgaaggaattctacctgtatgacaccaacctcagcaccgtgccctggagcctgtttgccaacatgagcgggatggagaggctctccctgcacctcaacaacaagctgagggagctgccccctgaccttttttgctgcctgcccaacctccagaagctttctctcaagtccaatgacatccaggatctacatccagatatcttctccaagctggccaatatgaacactctgctcctgaatgataacaagcttcgctccctttctgaggacatatttaagggcaaccccagtttggccagcgtcgagctgaagaacaaccagctgcggacccttccgggggaggtcttctctactgcagggggtttaagggttgtcactctgagt

SEQ ID NO: 678763 - DNA, 757 bp, Homo sapiens
  misc_feature (12)..(12): n is a, c, g, or t
  misc_feature (77)..(77): n is a, c, g, or t
  misc_feature (129)..(129): n is a, c, g, or t
  misc_feature (220)..(220): n is a, c, g, or t
  misc_feature (284)..(284): n is a, c, g, or t
  misc_feature (286)..(286): n is a, c, g, or t
  misc_feature (294)..(294): n is a, c, g, or t
  misc_feature (317)..(317): n is a, c, g, or t
  misc_feature (338)..(338): n is a, c, g, or t
  misc_feature (358)..(358): n is a, c, g, or t
  misc_feature (373)..(373): n is a, c, g, or t
  misc_feature (376)..(376): n is a, c, g, or t
  misc_feature (380)..(380): n is a, c, g, or t
  misc_feature (386)..(386): n is a, c, g, or t
  misc_feature (388)..(388): n is a, c, g, or t
  misc_feature (392)..(392): n is a, c, g, or t
  misc_feature (394)..(394): n is a, c, g, or t
  misc_feature (397)..(397): n is a, c, g, or t
  misc_feature (400)..(400): n is a, c, g, or t
  misc_feature (403)..(403): n is a, c, g, or t
  misc_feature (470)..(470): n is a, c, g, or t
  misc_feature (481)..(481): n is a, c, g, or t
  misc_feature (488)..(488): n is a, c, g, or t
  misc_feature (491)..(491): n is a, c, g, or t
  misc_feature (496)..(496): n is a, c, g, or t
  misc_feature (498)..(498): n is a, c, g, or t
  misc_feature (506)..(506): n is a, c, g, or t
  misc_feature (514)..(514): n is a, c, g, or t
  misc_feature (603)..(603): n is a, c, g, or t
  misc_feature (692)..(692): n is a, c, g, or t
  misc_feature (731)..(731): n is a, c, g, or t
atattaaaaaangaacaaacgggggaacccaaaatgagggggaaaacttagagctaatttcctagagtatgtatttnaatgggaagtcggggctcacagagagcagtcaggaattctgcattttctggntctatcttttgtgccttctcatagtactcagcagcttgcctcttttctccttccagcttgtaaacaaaccctaggggacttaaactctgcncatctaaagcattgtgacaaagtctcttggtagacaatttcttcagagcacttgtcagtttggngngggggggnggtctgtctttgacctttaaggnttctgaataatggtggatggnagtattttctggtttacggnggaattcctggaagnggncatngtgggnangggncnggngtntgnggtcatcggttatgttctccaggcggggggctttccgggaaatgtcctcagcattgctatacgggcntccttcagcgngcatgtnggncgggncngtgtaggnagatgcgnacatagggtctcgttccatggctgctttgaaatgaaatatagcagatgaaatcagctcatcaacctttagtttatcctttcctttaggnctgttgtgtgtggccttcttgatttggatcatttgtgccctgtagcaaagtcccatctggtgatgcaggaaagaagaagttggtgtcanctccaaggccttttttaaaagttcgagagctttgttccnggaatttttctcctatagaacttggc

SEQ ID NO: 678764 - DNA, 536 bp, Homo sapiens
ctcgaccagtacgaaacccagggccacccctactactccagcgcacgactgtgggacgacggcgtcatcgatccgttgcagacccgcgacgtgctggccctggccttgtccgcttcgctgaacgcccccatcgagccgagccgcttcggcgtgttccgcatgtaaatggagctgcaccccatgaccgatttcaacaccctcgaactgatcaccgacccccgtggttttgccaccctgtggctcagccgtgaaaccaagaacaacgcgttcaacgccgaaatgatccgcgaattgatcattgccctggaccaggtacaaggcgacccggccctgcgtttcctggtactgcgtgggcgcggcaaacacttcagcgccggtgccgacctggcctggatgcagcagtcggccgagctggattaccacaccaacctggacgatgcccgtgaactggcggagctgatgtacaacctcgccaagctgaagatcccgacgctggcggtggttcagggcgcggcctacggcggggccctcgggtt

SEQ ID NO: 678765 - DNA, 390 bp, Homo sapiens
cggtgccgacctggcctggatgcagcagtcggccgagctggatttcaacaccctcgaactgatcaccgacccccgtggttttgccaccctgtggctcagccgtgaaaccaagaacaacgcgttcaacgccgaaatgatccgcgaattgatcattgccctggaccaggtacaaggcgacccggccctgcgtttcctggtactgcgtgggcgcggcaaacacttcagcgccggtgccgacctggcctggatgcagcagtcggccgagctggattaccacaccaacctggacgatgcccgtgaactggcggagctgatgtacaacctcgccaagctgaagatcccgacgctggcggtggttcagggcgcggcctacggcggggccctcgggtt

SEQ ID NO: 678766 - DNA, 1464 bp, Homo sapiens
  misc_feature (1464)..(1464): n is a, c, g, or t
gccaggctaggtaccggtaccggaatgtaccagggatacactgacaatccgctcataccatagggaacgttcaaggagacctatcgtcgaatataccgacgaggatagagacgcagcaggcgctaccctggacagcatttacgccgacgccacgacattcaactcatcatgcattccataagagtgcaggtggaaaccatactaccccaggagacgggcgcacctataccccaagcgcggccagacctagcgtaggtagcactaacaccgggatagctatagaagataggaaagaaataaagatatacctacccgggacagaaacaagccctatatacagtattatagctaaggcaagcaggcaggtagataccgaggctagggaagaaggggttagcccagatagagtagtagggtcagagagccaaactagactaataatactaccagatatatagcctaataggtagccactagggcacccaggcatacatacgccaccacaatagccactactacgtactatacgatagtaggagctatactaaaaactaggaatagacaggaataggcctacctaccctataagctacccctagtaactatagggatactagcccataggcagggatactaggtagcctaccaagacaatagtaagcacatagaataccataataagggagctataatcctagatagtatccactaccactatagtaataagacatactagcccctaagactagaaatagtagtatctagtacacttccaagctttggctataccgaacacctactagtattaccctacttataccccctatatctacctacgtaatagtagtagtatttacctaaaaataaaaatagcccataaaaaccttacaagtaaataccattttattaatagatataccattattgaggggtagccagcattcgagtttcccagccctattgcggcatcataagggtttcccgaatttcaaggtaccatgaggcccaaggtatttaaacgagcccaagtgggcaggttcaaacttatagcatttatggcaataaggcggttagcgcgccggaggcggcttttgccgcacacatatttatctaggcactatctggggcaggcaacacaccaacacacacatagtatattaacacaactactgtgcggatgggagccggcgacagacactgagtcagatataggagggccgcggcgaaggaacggggaatagactaccacacatgaacgaacaacagacggggggaagagacagccaacaccaacagaggggggagggggaggccgacccaccacaacgaagaaacgctcacgcatacgcgacaaaaacacggtaggacaccgacgaacaaccagagaacgaacagcagcacgcactcaagctaaaatcagcaacacggcgagcaccaggtgcacagataccgccactaagagcn

SEQ ID NO: 678767 - DNA, 715 bp, Homo sapiens
  misc_feature (3)..(3): n is a, c, g, or t
  misc_feature (68)..(68): n is a, c, g, or t
  misc_feature (70)..(70): n is a, c, g, or t
  misc_feature (73)..(73): n is a, c, g, or t
  misc_feature (81)..(81): n is a, c, g, or t
  misc_feature (88)..(88): n is a, c, g, or t
  misc_feature (91)..(91): n is a, c, g, or t
  misc_feature (102)..(104): n is a, c, g, or t
  misc_feature (107)..(107): n is a, c, g, or t
  misc_feature (112)..(112): n is a, c, g, or t
  misc_feature (127)..(127): n is a, c, g, or t
  misc_feature (129)..(129): n is a, c, g, or t
  misc_feature (133)..(133): n is a, c, g, or t
  misc_feature (136)..(136): n is a, c, g, or t
  misc_feature (165)..(165): n is a, c, g, or t
  misc_feature (173)..(173): n is a, c, g, or t
  misc_feature (176)..(176): n is a, c, g, or t
  misc_feature (258)..(258): n is a, c, g, or t
  misc_feature (298)..(298): n is a, c, g, or t
  misc_feature (308)..(308): n is a, c, g, or t
  misc_feature (331)..(331): n is a, c, g, or t
  misc_feature (339)..(339): n is a, c, g, or t
  misc_feature (363)..(363): n is a, c, g, or t
  misc_feature (378)..(378): n is a, c, g, or t
  misc_feature (441)..(441): n is a, c, g, or t
  misc_feature (483)..(484): n is a, c, g, or t
  misc_feature (499)..(500): n is a, c, g, or t
  misc_feature (504)..(504): n is a, c, g, or t
  misc_feature (509)..(509): n is a, c, g, or t
  misc_feature (528)..(528): n is a, c, g, or t
  misc_feature (548)..(548): n is a, c, g, or t
  misc_feature (551)..(551): n is a, c, g, or t
  misc_feature (561)..(561): n is a, c, g, or t
  misc_feature (676)..(676): n is a, c, g, or t
ganaggggctggggggggatccagagcaacctcgagggcgtcctggtgcttaccacctggaaactggngnggngggggggngggggtnggngggtggggggnnnggnggggngggggtgggagtggngngggnggngaggggggggggggggggggggggggggngggggggnggnggggtgggggggggggggggggggggggggggtggggggggggggggggggggggggggggggggggagggggggggggggngggggggggggggggggggggggggggggggggggggggngggagggcgngggggggggggggggggtggggngggggggnggggggtggggggggggggggggnggggggggggggggngggtgggggggggggggggggggggggggggggggggggggaggggggggggggggggggggngggggggggggggggggggggggggggggggggggggggggnnggggggggggggggnngggnggggnggtggggggggggggggtnggggggggggtggggggggnggngtgggggggnggggggggggtggggggggggaggggggggggggggggggggggggggggggggggggggggggggggggggggggggggagcagctctggatggtggggaggtagaccagggancaggacaccctcttgtcctggaagaggaagctggggtgt

SEQ ID NO: 678768 - DNA, 989 bp, Homo sapiens
  misc_feature (758)..(758): n is a, c, g, or t
taaaggatcataaggctttcatttatggaaaaaagaaagcaaaaaaaactaacaatggggaggggggaggaaaaacagttgggaacatccctttaaagttaagtaagcttaaagaaaacaatttttagtaagagtgaaatagatttcccaggggtgaacgcaacaagctagtccccccaagaacaggtatttggggatacaaaaatccagttgtacacaacccagtcagcatccaaaatacgcttagtgcagtatttatccaattcacacaaagtgcgggatcagtggtttaaacaagcgtatcttataaaagctcaaccattttaaaacgggcacaaatatctctaaggcgcatagtgcttttcaccagtaggcctttgtgaagtggtcctcacctcccaactttcacaaactcaaactctctacaggaagcgggcaaacgagactcagcagttcccagaggggctatgttttatttttcccctattcccctatactaaggggtggcaaacccctttgacaggggcaaataataacacacgttttcattagccaaaaaagcaccaacaaacttgggattgtgtcaccccattaggcttctcccccgtgggaaatttcacaccaaaattacaggggtccttgtggccctcacaacaagcggcgccaaacctcctggaaacacgggaactccacacggcgacaagaagcaaaaagttcacccccaaatcaccatggtcgaaagggccttaagagaaggncccaaagggataatatcgccaggaagacctgccataatccggggacacggggcctggtggggggggggtatcacactcgcggcctccgcgggaaccgcccccctgggcacacaacacgacacctgctcaacacgtcgcatcataaccatctacgttcgccgcaaagagcaactcgatcacacacagcccgcccaaccgagagacagaatctagcacagcagaccagacctc

SEQ ID NO: 678769 - DNA, 601 bp, Homo sapiens
  misc_feature (566)..(567): n is a, c, g, or t
atatggttctgtggaatctttaacaacaaacatacctgaagacccatttcaacaggttttgtcagtttcaaagagctaaggagtcactgcctggtgggtcatccacttccgacagagaagggtgacccagatgatgggcactgatgccctcagccttcttcacttcagtagaattcatctggcctttttttggtttgtttccaatgtaggtaaatgagctctgcaaatattaaccggtgtcaggcatgctgtgagcctcttcctaacgaggccctaaggacgtaagctggaggagctatttcagctggtctaaaggcactacctaacagtcagacttttaatttcacttaagtgcaaatcagagaaggatagtcctggaaggctttttaaatatgaaggaataaactcaaatcatagcataattcagttaatgacacaatagggctttcagaaatgacctaaggcaaatgataaagcaatgattaaaacaaaaaacaaatcccaaactagtcacacagcattatgaaggtctgttattttgaagtgctcctttgcagacatggaannaaccaaaaaaggcgccgctgggatcctctagaat

SEQ ID NO: 678770 - DNA, 496 bp, Homo sapiens
tcaagctttatacttccacagtaacataggtggaagttgaagtttgtttttgaggttgatacagaaggtctcaatctgggataatcatgccagtacttgtatttaggtagactaggtgttttggtatacaaagctacttttatagtactgaaaatatcagtaattatatagtaccaagtattttagtatatctggcaatctgcattattttgtgattgttatttagttaaggcataaagacaaaccctatagtctacaggtctagatatgaaagctgcaatcagccactccattgagtgacccagagttctgtattagttcggagactttctatccaagtataatagaacacttgacagcattaatattgtctaggcaatagcatcagactcttcatttatatatgatgaagcttaacaaaaaaagacaaatgctttcaaaaagctatagtccctcacctccaaattacagaagatctgttgtaagaactataaag

SEQ ID NO: 678771 - DNA, 140 bp, Homo sapiens
cccgtagcagtcatggacagatgtactatgtcatggactgaaagacccacatatcgtaaaaaggttatcttatgcagctgggcgcagtggctcacacctgtaatcccagactactttgggaggccaaggtcgggcagaca

SEQ ID NO: 678772 - DNA, 183 bp, Homo sapiens
cctcacacgacctggaagagatttgacagttattaattaacagcagtgatgaagaggaggaggaagaggaagaagaggaagaagaagaagaggaagaagaggaggaggaggaagactttgaggaagaggaagaggatgaagaggaatattttgaagaggaagaagaggaggcagaagcggaag

SEQ ID NO: 678773 - DNA, 956 bp, Homo sapiens
attccggaatagcgggaccactgaagataaccaaagtaggtgtactcccagatacatgaggatgggtagttatcttgacattctaatcgtgaattattaatgataattgacgtcaatgtcgaattacattaacgctaatttaagtgtagtataccttaacgtagcattaccaaataccatggaatggatgagaatgaactactttaatgggacaactatagacaatcagaaataaaatcgatggactgtctccagcaggatcacatgtggagtaatgtgacgaagtcgattgaaggaataagaaattcagctaggttgcacagcatgacttggtgagcatcagggaaagatttgtggaaaaagtggcacatgttcatatgagatttaaacatgaaggatgaaggtcagatatagttgatggtggtcgtatatgaatgggaccacgttttaataagacgctagatctagactagtggtttggatcttcctatgtcgagtcatagtcatcgcgaagggcatgcaacagggcagaaccgtcaataccccttcatggactccttctgatctttgatttgtttgacgctttgcatatctagttactcagtaatattagagcgaaatttcaaacaaccatggtgctgcttctctctcaccaagcaatgtaagatgacacaagactgatattactcagggttggaagggatgtagcggcaggaaaaattcttacacaaccattagtagaagtgtaaactgaccggcttctagcagtcacttgagtacctactcattaagttaccctgaacatatccttgtgaccaacatgcttcttggaatttcagccgatgtagtcacaactacgagcagaaccttcgaataagctgtatgctcaccgcgggagcctaagttctactgggcacgtaattgttgacatccagggagacccccatagaccgttt

SEQ ID NO: 678774 - DNA, 161 bp, Homo sapiens
atggaggccagaggggaacaggtgcggtgcagaggcagatcaagcgggacccccaggagctactacataaccagcaggccatttgatcatcagagttctatcgacgaggacacagcctccgtggccattcaacgccatccgagaccattcaactgcctccg

SEQ ID NO: 678775 - DNA, 222 bp, Homo sapiens
actcgatccgctgatccagcagcacctgtgactttggggaacttttggtttgagacagggtgttgctgtgttgcccagaccggggtgcagtggcatgatcatggctcactgcagcctcgacttcctgggctcaagcaattctcctacctcagccccctaagtagctggaaccacaggcatgtgccaccatgccctagcttatttggaaagaatttttttttt

SEQ ID NO: 678776 - DNA, 363 bp, Homo sapiens
gagtccaacagtgcccttgttctgaatttaaagggtacactcccagtcatactgtgtggggcttgtttctagtagactccctttatccagtgaaagttttcttcaagtttgctaagagttcgcttgtttttgtaatcatgaataggttctgaattttatcacagccttttatgcgatttatccttctttttattgctttatattgaaggacagagtcttaacctgtcccccaagatggagtgtaaaggtgccatcacagctcactgtagcctcgaactcccaggctgaagctttcctgaatagctgtgactataggcatgccccaccatcttttctgcatttttagagatagttatgtctgtt

SEQ ID NO: 678777 - DNA, 312 bp, Homo sapiens
tcaggtagatgcacaaagtgaagcccaggctttgtcctggacggggttcctctcccaggatccatccctccaggcctcagggagccggcaccagggcggcggctgggacagtgtttctgggtgcggctgggagggtgtttccggacgcggtgacccccgtgtgctgggcgtcatccaatcctctgacggcctgaaggtgccgcggtggaggaaggaggaatcgctcctgctcgcctgccttccttcctgcttgctccaggacgcctcatctcaccgtctctggaccaaggtctggaatttacaccaacctcc

SEQ ID NO: 678778 - DNA, 661 bp, Homo sapiens
ggtttataagggttttcccaagcccgcccccttgttcacaaattggcttattaaccaaatttttacccaattttaccgaaattttaccttatatttgccatccactttacagttcgcaactgttgggaacactgatcgtaacggccctctttcttttccccccgctgttaaaggggctgttcatcaaggctattaactttggtaattcaagtgttttcccacaggatttgttgtaacacgacggcgagtacatcggaacacgtctcctgtaagcgcatctttggtacgggcctccccctccaggtccacgccaacagatagcctgaatcgataatcgggaccaagactttggcacgaggagataactagtcgcgagttctttttttttttaggcccatttgagtattttgtttccacttagtaagatagttggtattagtattagcattgttgtagagcatagtacggatgctacgtgtccaatcatgctaacagggtagcttactggttgtcctccgcttcaggattagaatgaggagtgtattcgactagcagtcaatacagtgattggcttagtgggcgaattattatgctttgctgtttggatatatggagcatgggcattgtcgctagtatgatgatggacagtaataggccaagg

SEQ ID NO: 678779 - DNA, 310 bp, Homo sapiens
  misc_feature (210)..(210): n is a, c, g, or t
  misc_feature (243)..(243): n is a, c, g, or t
tgcagtggcgtgatctcagctcactgcaagccccgcctcccgggttcacgccattctcctgcctcagcctcccgagtagctgggactacaggtacccgccaccatgcccggctaaatttttgtattttttttttagtagagatggggtttcaccgtgttagccaggatggtctccatctcctgacctagtggtctgcccgtctcgacctnccaaagtgctggaattacatgcatgagccactncgcctgacccttatttagtcttaagtaacttaactgaattactagtaatttttaaaaggttggaatt

SEQ ID NO: 678780 - DNA, 282 bp, Homo sapiens
ccttgcgatgcaattgaccagagacggccaatgcatcagaataggtctcattggaaaactgagcagaagagctgggcctggaaagagacttcctggacatcccagtgccttgtagtagccagcacaatggtctatgagacctcaggtactgtccaggagggtactgtggtctggtgtggaaggggtcaatatttcctattaaagaaggagtgtattaggggtagataagaactcagccatctctaccctaatttaagaggaagtcggtgtgagtccttgggc

SEQ ID NO: 678781 - DNA, 100 bp, Homo sapiens
aagtatggctacctttcacttccaaagccaatgaagaataatgcaaacctgaaatcattaaaaccagacaagcctgactctgaggagcaagccaagatag

SEQ ID NO: 678782 - DNA, 862 bp, Homo sapiens
ttttgcgattcttccatactcagagtacgcacggtcctgatttctcttgggattcttccaaaatcagagtcagatgctcccggtgccatgaaggagacgacgcctttgcaaggagacccacgttggtgctcaattaccagagaagatccaaaaggccttcgatgatatggccaaatacttctctaaggaagagtgggacaagatgaaagcctcggagaaaatctctctatgtgtatatgaagcaagaaagtatgaggctatgattaaactaggtttcaaggccaccctcccacctttcatgtgtaataaagggccgaagattccaggggcacatgatttgataatgaccctaaccgtgggcactcaggtgtgaacgtcctcagatgacttgcggcaggctcagggaatctccccgaaagatcatgcccaagaagccagcagaggaaggacatgatcggaggaagtgccagaagcttctgcccacaaaatgattgcgaaagagctgtgccccccgtgaaaaccaatacctctgagaagattcaagagagatctggacccaaaaggggggaacatgctggaccacagactgctgagagaaaaacaggtggtggcttattggagaagttcaggactctgaggaagatgcgggtacttctcctcaggtttcgacttgcccttggtgggacgcgacgtggtgcctttcggacctgtgcttgtgcggcctcttatcacgtgcttccgttgagcctttccccggcagttcggcttttgtgccagcgggggccggtttacaatgctcgggcacatcttgggcctctgtgtgggtccccaaacttggctgggacccccgtaggggggtcgc

SEQ ID NO: 678783 - DNA, 626 bp, Homo sapiens
  misc_feature (588)..(588): n is a, c, g, or t
cttggtccctttttggtttgagaagtatttttttcccgcctttaaatgtcttcgatttcctacgcaaacatttcgtgtgtggaaactcccttgtttttttaaattaagcgttttgcctcgtttttccaaatcttggcctttggttcggttgattattcgaccgttataatactgggtgggcgttttcttcctctttagtgagaagggtcattagtgtttttagagtggggccaaaatgttgtatttcccttgtagtgattaaatttcatgggtgtctttttaggtgtttgggaggtacaagaggttctcttcaaccattagtttttctggtgagccacagtgtctctagcttgtgggtcgccccctagtgttgattcaacgctcaaggagtggttgcctcgccatgtttgttgtaccccgcttctttgttatagaattgctgcaaaagtgaagagagggttctttgtaggcttttgaatagtgtaatgctggggtgggcgctcagagggggaacaacgtaaaaatattgtccgttggtgggggatcacaatttgtatccacaattccccgcctctgtgtgtgccgtcnggtgaggaaaaaaccactaattgttggcttggagaagg

SEQ ID NO: 678784 - DNA, 975 bp, Homo sapiens
cttgtgccttctctttgtggacctatttatcccataggtaccatcccgcccaccttggtgggttgcccctggcatttgaggtgtggtgtccccacctgggccgctttggtggatggcgcccgcatgcccccgcgtggtgtgttccctccggggggcaccctggttccctgcctgcgctggttggaaacccccgtgggacgggaatcctttctctgttcaggggagcccatggggtcaactaggctctcaaacgccccaagggtttctccacatctctatctccgcccccccaggagaagtgtgtgagggcaccccaagggttgttacccatctcttctctggcactaagtgaaagtgaatatagttgtgtcaccccccccacactaagcccccacttttggttgtccccaccctgtcacatgcccttttcacatgtgttctcccctgaaccttgggaccacatgggcctcggtccggagtttttctctggcccccacagaggataaggaggccttgcacacatgtcccgcgcggagggacccctgagaaggttctcaacctaatgtctttgccggcacaccccactgagtttctatgaggagaaaggccaccgccgtttccacccctgcggaagagtgcgccaccccggagctattttggccccccggtttatgtcacgcccaacacaccctggcccatgagctgaaggacggacgaaagaaatattcacaaatggggttgacagtgtccacgagtcttctgctcacgcttcccctgcgtttataaggcctgccctatgcccgggctccctcctgcttccacgtagccctctcactggcactataggctcgcacaccccacccgaaggcgccagactaggatggcacctttcccctgctcggaagggttggcctgcctggctggggaggtccagttaactttgaattagtttaaaacaaaagaataaaaaataaa

SEQ ID NO: 678785 - DNA, 439 bp, Homo sapiens
  misc_feature (41)..(41): n is a, c, g, or t
  misc_feature (165)..(165): n is a, c, g, or t
  misc_feature (168)..(168): n is a, c, g, or t
  misc_feature (188)..(188): n is a, c, g, or t
  misc_feature (216)..(216): n is a, c, g, or t
  misc_feature (436)..(436): n is a, c, g, or t
tggttgggggtctctggacaatcaggggcagcatcagcagngaccctgggtgtgggggggctgtgggagtagcagcactggatccccgcgttgacaggtgccctccttaaacctcttgcagggaatgtcttgagccgggcagcccgctgggccacatcttccggnggntccttccgcctgttctgaancagcctgcgtctctcctccatagcttcntcggccgccttgccccctggccgggcacgaggccggggaccccagttgagcctccgggttaagcctaggaagcgcttgagtcatcgctgtcgggagctggggttggcatcttcccggatggtagaagttggcgctgcagcctgggctccacactgagaatgcggaacgtgggctagtctctgatagtcgctcccgtttcaccggaaattccttctcccancaa

SEQ ID NO: 678786 - DNA, 275 bp, Homo sapiens
  misc_feature (143)..(143): n is a, c, g, or t
  misc_feature (269)..(269): n is a, c, g, or t
gaattcggcaccttaaatggtacaaggttctcctcatacataatgtttggctcccttcaaaacacaagaaacaagccactcacatataacaatggccgtactgtcctatatctaatcctactagactcagttccttgaatttntttcaaatacatattggcccccaaagagctgggggcgtggaagagcagataattggggctcaggcaagggtggttataggctccagacctgcaggcagagatggctctcagaggaaggttggtttnacttcc

SEQ ID NO: 678787 - DNA, 292 bp, Homo sapiens
tccatggctccccactgtctttttttgtctcctatttaggacttttaacctaatttaaatttaggagtaggcttttatgtcccccacgcccccctgtgtagggcagaagggtcacacgcaaggttgccgcttcacacttgtagggttgcacatcggtcaggcagaggcgctcctctcttcccagacagtgtgggggccagggagaggcgctcctcacttcccagacagcgtgggggacagcaataggtgctcctcacttcccacacggtgggacggccgaacagaggagcat

SEQ ID NO: 678788 - DNA, 320 bp, Homo sapiens
aggtcaggagttcgagactagcctggccggcatggcgaaaccccatttttactaaaaacacaaaaggttgccaggggtggtggtgggcacctgtagtcctaactacttggaaggcttaggcaggaaaatcgctttaaaccgggaggtggaggttgcagtgagccgagattgcatccctaccctccagcctaggcaacagagcgagactccctttcaaagaccaaaaaaattttttgagatatttccacctagtttagaaatgacctttatcctccttatgaactaatccagagatttaacaagattgtggtttttcttga

SEQ ID NO: 678789 - DNA, 357 bp, Homo sapiens
tcacactagtcaagacactggagagtcctcatgggacaagatgtagtgtgtagtagagaactgcatgatgatggctagcttccatatggagtcggcgggtgtctgatgcatagacactgaattagaaagagcagaaatgtaaccagcgtgttccctatcttgggctggtagcttaaggggtctactgtcattggtcaaaaatttcatgaggagacccatcactaatgcaacaactctaatgagtctaagttggagagagctcagttctaaagcttgggggtagacaggtcactgagagaggaggaatgaaggagtgggatctgaacattgtcctaagtcatctagtagctctgatca

SEQ ID NO: 678790 - DNA, 269 bp, Homo sapiens
tacagtgaagtaagctagagaaaagcaaatgctgttaagatgctaggcatggtgactcacgcctgtaatcctggcagtttgggaggccgaggcgggcggatcatgaggccaggagttcgagaccagcctgaccaacatggtgaaacccgtctctactaaaaatacagaaattagctggatgcggtggtgcgcacctgtaatcccagctactcgggaggctgaggtaggagaatcgcttgaacctgggaggtggaggttgcagtgacctg

SEQ ID NO: 678791 - DNA, 266 bp, Homo sapiens
aacataaaagaatagatgaatgaagcacatgtacagcatctggaaaatagcctcaaaggggcaaatctaagagttcctggccttcaagagcaggtagagagaaatcgggatagaaagtttactcaaagggctaatatcaaagaattattcccaacctagaaaacgataccagcactgaagtacaagaaggctactgaacaccaaccagatttatacccaataaaactacctcaagacatttaaccaatcagactccgcaaagatca

SEQ ID NO: 678792 - DNA, 921 bp, Homo sapiens
ttaggtcaatgcgcccgcccagatgttcatgtgcatgtcctgcctgatgcccatgcctgcctgcatgatctgcctgccatgtatgcatgccttctgccatgcatgctgcctgctgggctgtgaacctgtgtgctgcatgtggtgatgctgatgccctgtgcccctgccatgcccatgcccatgcccatgcccatgccctactccctccccacttgccatgtggcatgcatgcctgttgctcagatgatgaatgtgttggatgtgaatgaaagtccaagaccctatgcactgctgctgcacctatcattgtgaccattattgattctcatgcaaagccgaactgattacattgcatgccatgaagatgtgacttgtggacctgtgtgaccttgctcctgtgaccctgttgctcttggtgagaacgcgaggcatgtatgaacatgaccattcactgtgctattgttgtaactacccaccttcctgtgaatgtgctgtgtgtgactacatgattctgatgaactattcttgaacgcatgtgagcttcctgtgtgatttggccttgaatgctcatttgctttgcttgcttggaagtgtcaattcctcacgtgttgaagccgcatttgtgcccaaatgctcatgcaggctgatgtggccaatgaatttggacgatggttgccatccaaaattgattctcccaaacttgtactaaacataatgtggcacccttgtgcactttactccactattgccatttgccaaacgtgtctggtccaacgaccttgggtatgtacccattactgatatagccaagacacagaaaaatctggtttgtgatttgggtgatactttgttgaaactgcattaaaccccttgggaggcaatttatattctttggtacccaactcattactttgctgctta

SEQ ID NO: 678793 - DNA, 757 bp, Homo sapiens
ggcagaaaatacgcaagaggaactccgagaattccaggagggaagccgagatcgcgctactgtactccggcctgggcaacagagtgagactccgtctccaaaaaaaaaaaaagggtgtcttaaacctctgaaattgtgccggcttcttaagcttctcatggagatccctaagaggtgcgtccgagtttccagagtaattttccagaccaaccagcgtcagggggaaatctgacctctttgggcaaactggcgatcattcatttccctgagtccccgggtgggggtgggggggaatctggcctcaggaccctgaggggtcttgggggcaagagggcctgggtaatgcagccactaagaacgggacttcattcaagggcttaatggaagtacccgggggaccatcaggtaaatttaaaggcacaagatcttggtaggaggcttcctggtcaaagacgtgaccgtggggatttccaacgcaccaggtgtgtccactcatcactgcttgtaggaactgtgtctctggggacacgagttaaaagaacacactaatttctggagtgtgcctgagttcacggcttcattgtgttactaggtatttctggagaccagcaaaaatttcgggtggaaaacagaccttccagtggtactgaattcgagaagaatagcggaggggtgtttacctagaaaatctaactgttccaagagatgtctttattcttaagataataacagagacgatgtggcttgtggtttggtg

SEQ ID NO: 678794 - DNA, 349 bp, Homo sapiens
cccatacgagaaccttttgggctggctctgtgctcacacctgtaatctcagcactttgagaggctgatatgggaggatcccttgagaccaggagtttggaccagcttgggcaacatagagagaccttgtctctaataataataataataatgataataataataataataataataaaattattcaggtgtggtggtgcatgcctgtagtcctagatacttgggaggctgaggcaggaagattgcttgatccctgagttcaaggctgcagtgagctatgattgcaccactgcaactgcattgcagcctgggacacagagcaagatcctatttctagaagaaaaaaaaaa

SEQ ID NO: 678795 - DNA, 649 bp, Homo sapiens
  misc_feature (498)..(498): n is a, c, g, or t
gctgcgatggagaacgcagcaaggccaggcggcggtggaaaggctgtaggacacactctagacatgtgtgagatcccaatgccgggcatccgatggccaaatccgtatccccccaatattgggtgccctggagggttccatatgcctgcccatccacacaactacttaatccgaccctgttctctcgaggtgtcatgatcctacttctctgctgatgagtggcggattctgacacatatatatcctcatatagaggatatgagcatctcttgtcgctggagccacgaggaatagcatcgcatagcacggaaatggagtcctgcactgatactttgtgcagtcatgtcactcgcagttcttaatgaggttcgattgatcatagatatcacctttggaatgctgaccattgcatcgaggtcgggagaacgaatagctagcacgcgggagaagtcgcgagttcaacaataggtccaattgctaatgtttttgagaccacangtgggacactggtcatggatgcatatgacgctctgaaatatccaggctccatgacagtcttgtccatagaaagaaacataactgtagtccaagttctatagaagtagccctctttctcctggatcttgctgaattagtggcttggggggag

SEQ ID NO: 678796 - DNA, 81 bp, Homo sapiens
ctagaagattcagcaaagtacttttgtgctcttggggcctaccgcttcctaatcggggggccgtacaccgataaactcact

SEQ ID NO: 678797 - DNA, 162 bp, Homo sapiens
agggcgaactttataggatcccttgttaaagcacacttttgcaaacgctaaagagctatcaatcgggcaatcctgaccgtgtacgggccggccgaggtttcctcattagtgtttctgcgaccatacacacacatttctgggtttattagccaaacagaaacc

SEQ ID NO: 678798 - DNA, 127 bp, Homo sapiens
ctctagcgactctattatcaccttgagagataaacaaaatttgaaaactttggcggctgcggtggctcctgcctgtaatcccagcactttgggaggcatggtgacgagtggtactagggtggtatag

SEQ ID NO: 678799 - DNA, 116 bp, Homo sapiens
ggacttgcggtgacgaacgacgctggacgggactacggatggctggtactggcgtcccgacgtttccttacttggtcctacacggaacccactttctcgacggactggttggccac

SEQ ID NO: 678800 - DNA, 288 bp, Homo sapiens
tttggctccagccacgaattttatttcccctgggacatgctgctatgctgggactcaagtatgtttactggactcagctcaacatggtccagaccttgaagtacctggccatcttgggcagtgtgacgtttctggctggcaatcggatgctggcccagcaggcagtcaagagaacagcccattagttccagaagaaagatggaaattttgaaaactgaatgtcaagaaaaggagtcaagaccaattcccagtatgagaagaaaaatggaaaaaaaaaaacttttttta

SEQ ID NO: 678801 - DNA, 211 bp, Homo sapiens
acggatagtgaggtttggactcggggtatgcaacattgcacgtgaatgatcttcccatggtaccactggctcgtgacagcacggcagtacactggacacgctgtagtaaccacagaggtcacgctcaggtgttccttgaacagcgctcttgccacttgagggcgtcccggtgaaggtgacaccatgaggcatgtctcaggaccggtcagtg

SEQ ID NO: 678802 - DNA, 353 bp, Homo sapiens
gttagccccggtgttgcgctctagctgtcctggtgaacctgagagtagctgctgtgagaacagtctacatgctctaagtggggcttcttacacggggtcgctgtgatcatcctgggggctgcctgaacgtctctgatcccagatactgatcatgggcggcagcctccaggtaccacaactaccttagtatgtctccctatcattctaatgcccccaggatgagcgacgttattatccccaagttgagaattccttccagcgctgtacttcccaacttttccatgtcactacggtgaaaggaggctcatcgggagagctgttgtactggaccagcccccgcacttgtcccccag

SEQ ID NO: 678803 - DNA, 334 bp, Homo sapiens
taactgcatacaacacgtagtactacgagacaaggaacacagctaccatcagactacctttaagcactatctctgtatagattagtctagttatacattcttactaaattttaatcaaagttaacaacttctttgcctatgataagaatgtcctcccatagctcagagtaatttgatcatctgaagccttcttctctcagctcatcaaagtcattctccatccagctttgttccgttgctggtgaggaactgcgttcctttggaggcggagcggcactctgcgttttagagtttccagtttttctgttctgttttttccccatctttgtggttt

SEQ ID NO: 678804 - DNA, 463 bp, Homo sapiens
tctagagtggcagaggccagtcaggagcttatagataaactcccatctccctgcaacagagcacctgggggaaggggtggctgtgggcgcagcttgcacacacttaaacgttcctgcctgccggctctgaagagagcagcggatcacccagcaccatgctctagctctgctaagagacagactgcctcctcaagtggttctctgaccaccgtgcctcctgacaggcagacacctcccagcaggggttgacagacagctcatacaggagagctctggctggcactttgcaggtgcccctctgggacaaagcttccagaggaaggagcaggcagcaatctttgctgttctgcagcctccgctggtgatacccaggcaaacaggatctggagtagacccccagaaaactccagcagaactgcagaagaggggcttgttagaaagacaactaacagaaagcaatagc

SEQ ID NO: 678805 - DNA, 123 bp, Homo sapiens
  misc_feature (116)..(116): n is a, c, g, or t
aacccgggactcctttgtcactgccttctcagcagcagcctgctcttctttttcaatctcttcaggatctctgtagaagtacagatcaggcatgacctcccaaaggtggtcccggngttgggt

SEQ ID NO: 678806 - DNA, 258 bp, Homo sapiens
agatcatctgaaaggaaggagaatggtgaaggcagagagaagcatgaggaatcaggacattggacaaagccttcacatgattttagaggattaaactgcttcggcatctagtaaactcctcccagaaggaaaactagagacatgcttttccctaaatactacttcagagcccataataaaggtgcatattgaacaagtggatcttcatcaagaatgaaagctgtctgcttcaaagtaaaatctgtcacagtgtcatct

SEQ ID NO: 678807 - DNA, 435 bp, Homo sapiens
catatccggcgggtgaacgtggagaacctgctgcacaacaggaacttctggatcctgcggctgaccccaggcagcaagggagaaatcccctacaggtgcctataacattagatgttatggctgtgtagttctctaagcaagtttggggcaagttggagaaactggcagaaggagctctgcaagccacgtcatgaggggcaactgaaagatgctggtcctctttggactacgccatctccaagatccggaaggatccttctcccagattgaacaaggaaaaggagccctgaaaattagcgccagccatggccccaaagattccaggaatgtatcctgatagacccccaacgaccagggtaaagggcttgggaaaaaggccaagggaggacatcaggtatatatgtgggaaaccacgacgataggcacagggcccag

SEQ ID NO: 678808 - DNA, 300 bp, Homo sapiens
  misc_feature (44)..(44): n is a, c, g, or t
  misc_feature (107)..(107): n is a, c, g, or t
  misc_feature (137)..(137): n is a, c, g, or t
  misc_feature (154)..(154): n is a, c, g, or t
  misc_feature (180)..(180): n is a, c, g, or t
  misc_feature (228)..(228): n is a, c, g, or t
  misc_feature (253)..(253): n is a, c, g, or t
  misc_feature (274)..(274): n is a, c, g, or t
  misc_feature (278)..(278): n is a, c, g, or t
aaagaggacgccatgattggttggcgctggggcggcggacggtngaagggcctggcgagtctatgttttacgcctgtgctggactttctcctctccatgtttccacnccgtggggggctacagagggcgagaagtcngctcagcggaaacctgnatttggttctaatccgtggggttganaacgggtgaccggaaatgatcgtgggactgaccggaagcaaagcctgnaggggaaagagagagcgagacctgngagggagggggcctccatcanaaangggcgggggaaaaggtgcaaaa

SEQ ID NO: 678809 - DNA, 491 bp, Homo sapiens
  misc_feature (277)..(277): n is a, c, g, or t
  misc_feature (423)..(423): n is a, c, g, or t
  misc_feature (470)..(470): n is a, c, g, or t
cctgtcagtggccgtgtggatgagactggagcggagcctgcccatatgccagtaagactttgaaaggtcgcctggtctgccctgcctcctggaagggctgcacataaagggaactggcaacctttctgtcttgtgaaattacttgctggaagctttaggtcacccctggccctgtggagtggggagagctggtggcaagaaggggacagtacactgatgggctatgatgagagaagcctacagactctgggagggttttgaggtattggacagactngtgggggtgaggagaggaacattcgaaagagtgtgacctgaagaactgacaagcaatgctgtctgttctgagaaataaccgagagcctaagaaagggaacctgatactgtctttgcatctgtgagccagtagccctaatgcctttntagttatagatgtgaaaatattcatttagggtttatcagatgcaccngaaagaaagacagtcctccac

SEQ ID NO: 678810 - DNA, 215 bp, Homo sapiens
cgatgtgatctagcaggatccccttatttccttctttattgcgatgtcaacaggaaagcagtgagcaaaaaataaatcaacagacaaggtgaaaagaagccagacagcactgagaaacggcgaaagacagacagcacacgaaggcaaagactgaaaagaaatttgatccactcaaaaaagagtgcagatacatagacactataaagtaaggaaac

SEQ ID NO: 678811 - DNA, 154 bp, Homo sapiens
tggccttagctgtgtcccaaagattctggtgatatcaagactatcaaacaaatctatggtctcacagtcagagcccaagggaaatggcaacatcaacaagcgactcccatccattgtggaagatgaggaagaggaggaggagggggaggaagag

SEQ ID NO: 678812 - DNA, 171 bp, Homo sapiens
  misc_feature (31)..(31): n is a, c, g, or t
  misc_feature (87)..(87): n is a, c, g, or t
  misc_feature (167)..(167): n is a, c, g, or t
ctgaaactggaatgagatagcacattcagtnctaacaaagcatctggcacgtagtaggcactctgtcaatagatggcactgaatgtnctatctcattcagttctgttatactcaatgaaaaaccaactacatttatattgcatttgaggcttaaagggggtttaccngcct

SEQ ID NO: 678813 - DNA, 345 bp, Homo sapiens
gcaccgtccgctagctctgtataaaggatctagtggtccctgaatgacagccacatatggaacctgtggtatgcctccatggcgaagaggggatacctgaagtacatgaaagcgtaccatgtgagagcggatgctcatatagatcctgtcacaccctccaaagatgtactaatgatgctaactgactacatccaaggagcccgagacacacctcctctgagggctgcagagaaacccactcaagctgtcactgcacggctggtcttcccaagagcacaggaggaagcctgcactctacgtccagtcacacatacttcactcttagacttctaccttcacgtgggg

SEQ ID NO: 678814 - DNA, 378 bp, Homo sapiens
gctgggccgactctagaggacccaagctccaacagaaagctcagcattcactagcccagctcttctccccaggtgtgtgtggcttgcgctccctgctgaaggtggggattgccatccatcttgttacaattcccctgctgtcgtcttagcaagaagtaaaatgagaaattttgttgatattctctccttataaagtgtcactcatcttttctagaattttatactgaaatcacatgcctgacaaaatacctgtacagttggaccttcccttccaagtttttcaggtccagcccctcctctttcttgcagtcttgggtattgatgcccaagggtctggaatttaagggcaggcccaagcaccggttttcctaaggggat

SEQ ID NO: 678815 - DNA, 1779 bp, Homo sapiens
  misc_feature (1)..(1): n is a, c, g, or t
  misc_feature (682)..(682): n is a, c, g, or t
  misc_feature (1141)..(1141): n is a, c, g, or t
  misc_feature (1148)..(1148): n is a, c, g, or t
  misc_feature (1157)..(1157): n is a, c, g, or t
nacctctctgtagactctagcgggctataatacatctgtgttgttgtagaggaccacctatgcgtgtgtgatcacagtaaggcgctttttataataaaagcgcggcaattaatcatcttagaaagaagggcgcccttttaccccgaagtgctgcacagaagacttgtcgccacgatttagcgggttttgcccaaagacgccgcccttggggaaaggggctctttctccctcccctccttttggaagtagatgttgtcctgctccccagagttgtaaataacagcggtgggtctccaatggggccgccacatccacagcgcacccaagaaagtgtgcgtccccttgctttgtgtctcccatttttgggccgcctccccacgaataggattagggcggccccacaccccctgtgagatggggaaaaaaatctcccaacgggggtggaaagaccggggaagagcccaaccactgtgtggcgccccgcaaagaagaagacctctgtggaaacagttgggggggccgccctcgccggcgaagagaagcgcctcttgtggacgcccgcaacacccaggggtgtcacacccgtggtgtggtagaaacaacgacgaaaatagtgtttgttgcggcgccacaacgagggaagtatggtcacagaaatatagtgaagtcttcgtaaaccgtnttcaataatcggcggcggggtgtgtgtatcacacaccaaggaggggccccctaaataagagggcttaacacccacaaaacgaggggtgttttccccacccaccacacgacggtgcccttgtgggggtcgaacccacaccccaccagaagagagagcctggtgcctccccccctctcacaagagtagcaccccctcatccggcgagagatctcctcggggcggccccacaacgagttgtggcgcccctcgtgtgtattttgggggcgcccacttgggccaaactctcctctcggtcttctcgctgtgttgaaagaccacctgctatctgctctactggtggggcgaccacaccgcgccgctctcgtggggctcaacagcaaagagaggggtgctcataacaccacttctcacgcctcgcgcacctctgcggatggttattttctcacccatcacgagaangcagttnttgagtaanaagagagatttgtggcacacaggggcgttatcgcccttatatacacacaggagccgcgcacacagctcttgtgatgcacacagagacccacacatgccgtctctctcactggagacttattgtgagcccgtatattctctgacacacacagagagcgacctctacaaccccatacttgttgggtgggcgctgttggtgcccacactcatgggggtgtaagagtgtgaccaccactaggactctttgtgttcacagtactgtaatagaggctgtgtttgtgttgggggaaaacccacagagaagaccgcgggtgtgctctcacacctctctctcgcgcacagatatcctctgtgtctgggtgctcacagaccgcaaacgcgcgcggtctttgtgagaaagaattggcactctaagatttcattgacacccaccctcccacagatttggcccactggccgcgctttccacgcaccctgggaagagagaaagaaaagccactttcatggggaacccctgtaagaaaagaacccgattgccaaggagaaaaagagagcttaatagcccgggcaccagattttcccaattggtggggtttccaataaaagattattttccccctgtg

SEQ ID NO: 678816 - DNA, 900 bp, Homo sapiens
  misc_feature (237)..(237): n is a, c, g, or t
  misc_feature (388)..(388): n is a, c, g, or t
  misc_feature (623)..(623): n is a, c, g, or t
  misc_feature (900)..(900): n is a, c, g, or t
taaaatttttcggctggtaaattctttttccccccccaccccggggcgacagagaagcgaaaacttaaaaaaaaaaaaaagtgtgtgtaccgtgcacactgttgaaacgacaccaaggtttaattctctcttttttacacgagaaattttaactttctccctctttcacaagtgtgcacccaacctcttatagaagtggtgagctctcgcaccttgggcgtgttatctcagccaccncagagctgggcctcctctcaagagaaatatatatttatatttctatgagtgtgtgcaaatgtgtctctccagaacaagagcgagatatctcacacagaggcggtgtatatacaatatatctctccacaagagcggtgttgaaaatataacnctctctcgcagagaaaatctctctcagtgagacctatatatctctgcgtgagaagacacacactcttttatattctccttcccatgtgtgatgaacccctccctgtgttgtggtgttgcaccacaagaaacggcgcagcgtaggtgtgtgtgtagcagcagacaacacccgctgtcgctgtagagaaccgccgcgcagcaaaaaacgacgtagtggaggaccctcacagcggganaagcgtggtgcggccccacatagaagcactcctctaataaacaactagaggagggggacacccactagtgtgtgcccagaggggaggactcctcatcttttatatctcccccacacacgccacacaaaactgctctgtggtgtgcggtcgtcgtgaacacacaaacttttacagaaggcacgcgccccacatgtatctcaaaactcctgttgagcaaaccacacttgtcgtcttctctgaagaaaaaagtgcaaagagaggatattaaaaaggagcn

SEQ ID NO: 678817 - DNA, 164 bp, Homo sapiens
ccggcatgtgtgtaggccagcgatgatggtggttcacaggatgcagtgagtgccctcactctctttcttctttgaatccttgcaggtggacaggtagacagcagcccagcccagtgccttgaagagcccaagcagaagaaaggcagacaggaaaaggcctacag

SEQ ID NO: 678818 - DNA, 138 bp, Homo sapiens
gtatccactcagccacctgtgtctttgataggggcatacagtccatcgacatttaaggtgataattgatagataattattaattggccattcgaacctcgtgttccacttgattctatggttctcttttcttccattc

SEQ ID NO: 678819 - DNA, 355 bp, Homo sapiens
gcgagaccgcgcttggcgcataggccggttctaatttacaagaacaccgcggctgaggccggagagtcccttcaacccgggaggcggcggctgcagggagccgagacggcgccatgccctccagcctgggcaaaaagagcgaaactccgtctcaaaaaaaaagaaaaacagttggccgaaaccaggaagctgcgcgaagtggcgccagggccccttcttctcccggccgtgttgttccggaaggtttccctccgaggcgccccggctcccgcaaagcggaggagagggcgggacgtgccggggccggagctcaagaggccctggggccgctcatgctctccacgccatcgcaagg

SEQ ID NO: 678820 - DNA, 360 bp, Homo sapiens
ggtcgacctctgccccaatcttttctacagagtcctgtccaaaggcatagccctatagtttttaaaatataaatacaagccaggcacatgggctcaacttctgtaatcccagcacctagggagaccgaggtactaaaaacacaaaaattagctgggtgtggtggcacatgcctgtagtcccaggtactcgggaggctgaggcaggagaatcactttaactcaggaggcggaggttacagtgaaccgagattgcaccactgcactccagcctgggtgacagagcaagacttcatctcaaaaaaaaaagagaaagaaagatcgacgcgggcgggattttgatgttgtagtcgacccgggaat

SEQ ID NO: 678821 - DNA, 353 bp, Homo sapiens
acagtagatgcttcatataggtctcagatttagcagatctaaaactgcattccgtgagcctcaatttatgggaggctcattgcctcacgcgtgaggtgatctcaccggccacaactgcctgccgatcccatctcagtagaggatgacatcatcctttgagtcactccgaccaaaaatcctgacatcatcttggactcctcacttactttgtacactccatatccaatcgcagttaggaaatctaattcatcctaccttcaaaaggtgattataaaattatatatgaagtacctgtaattgcctaaagtgaaatattattaacacacgcattagagtaggatacagtagggaga

SEQ ID NO: 678822 - DNA, 1140 bp, Homo sapiens
  misc_feature (1140)..(1140): n is a, c, g, or t
gtccgaggatcgctgaaacggaaagagaaaaaagtctgcgccgagctgcctggcaagcagggcccgcccgactcccttcccggctggtccagtcaccgacctgcggctcctggtggccgacgagggacggatgtgctgctggtgggtgcgcgaggcggcgtggcgatgcgcttgtggactcggcccggcgtcccggctccgggggttctcgtggcctgcggctgcgcctttctctgctggagggccggcgtgtggtccgctgtgccagcccggacctcttccttttccagaagcgtgcccgaagtggacgccacctgattcacgtctgagtgcatggctgtgtgaccgtggcagaggccgtgaaccgcagtggtccattaaccatcgcacagttcgaactttacgcgatgtccctgaccacctgcgaaagtgtgtgaagggcaggccttttaattaacaagcccccgtgcgtgacccaacgtggaccgtggccccggaagtcaccaatctatccggaccagaacctgtatcgttgagtcatagtgagtcccccacgtgaaaatatgacacacctcatggaaaaccgacacgagtggggccaaattaaccacccaagtacactatccatattattggtaaaggcttgaacaggtggtgtcacctataaccccaccgtggtgaaacgagaaaccccacatggggccccaacatgaggtatacaagggaaaccacccgtgtgtcgaaaacaagacacaccactaggtgtgacacctgggtaagtgaacgaccgtgacagttcacttttgccatgtgccatccgtgaagcatgatgagcatgagtcacagagcggagactattgacgcacagggactccccccctattaatggcagacgagtaacggagccaattatcatcagtattgccctgaaacgaatatgttcgcgcacacctaccagcagacgaagaagatagagaataaaggcaaatgcgacggacaacctgagtgaattccgcgcacagaaccagcgttatgaaggacacacaatctttgattcacactagcttacggacatgagcacagtggagacttttggtcaatatagagtcgaatacgagaaagcccatgggcgaaatatan

SEQ ID NO: 678823 - DNA, 370 bp, Homo sapiens
taggggagaatattaggagtaaaatatactcaagacaaatgtatatttcaagttatagagataaaaaattgggttataaaaaatacagagatggagtctcactgtgatgcccaggcaggtctcaaccccctgagctcaagcaatcctcttttcccagcctcacaaagcaatgggattacaggcatgagccaacatgcccagactattttttatatattagagatgacatcttgctatgttgcccaggctgacctcaagctcttgggttcaagccatcctccacctcagcctcctgagtagctgggactatagccatgtcccattgccctgctttgaaagattttatgtagtttcaagaagcaggaactgg

SEQ ID NO: 678824 - DNA, 307 bp, Homo sapiens
cgaaaccagtagtgaaacagtattcacagacagtatagcaatagaactactttttgctgtatcatgtgcaaatgttacttcagattgaggtttccctctactttagtctaaaaatcacaaaacattaaacaatggatatagccctcccctcagttcttgctaattgaggtgtccgtgatttacaaaataaagagttccttaaacactgcaggattcttatttttttaatatcatttatcttgctgagatagcaagtcaagtttataaagaagatgcatttaggaataatcctactggttttcgaggg

SEQ ID NO: 678825 - DNA, 312 bp, Homo sapiens
  misc_feature (208)..(208): n is a, c, g, or t
gggaaaggtatattaaccttctgcatcaaagatgtaacagtcatggggtcttggtggccatctggtctgagttaggtacaggacaagaaagagtcaattaatctataataaagatcaatgattgaaagaagggagatctggtctctgtctctcctagtcatttacagaacaagagcaatgaggaagaccgttatgctataatctaagnaacagaattggaaatatgctactgactcagtctccaggggcttaacttcccccttggcataataaatttaaggagtcctaaaattttattttcccttacattgg

SEQ ID NO: 678826 - DNA, 780 bp, Homo sapiens
actcaagaaaaatggggtaatcccagagccatccaagctaccttatataaaagcagtaaattgagaacccccaccatgatataaggaagggccgtgcctcatggaacaagctataggtggtctcaaggagaataaagaaacacaaaaatgagaatgataggaatcatgaatagaaactgggagaagcacaggaatggctgactagatcatcgtgaaacgtcggatgaggattatcccaggggcccctaaaaactactcttctcctggcagttttaaaagcccagaagccttctaaagccctttcagtcgttcatctactattgagccagacgtcaagagaagacaagtctcgccgaaggaaggtccatgaggtggcaagcatgaagagaacaaggagaggtgctgggagagatgatgacaatgataacttatttcttattaagcagagaagcaaaagaagtcttaagcgcgtcaggcgagcgctcgtgatgtggtttttcatctgttccattgttaggcctttgtggtctatgaaccttctgggcagatgtgttcattatctatgattaattaagagtgagtaaagggtcttgtagagatagttacagtccattctcatagagttactgaatatccagtggagatctgcaattctctgtgtccaacaggatagtgagggaagaaagtacgagagatgaacctggattctcctattcgaatattgtcatctttactcagaatcctagggataggtagaagaattcgtcttgtcaagaaagg

SEQ ID NO: 678827 - DNA, 750 bp, Homo sapiens
cctctgcccctgcccctgcccctcccagcacctgtgcccacaccctgcagccctgccccatggtctggccctgggtggctgatggctgtccagtgtgggtgtcccctcattggcctggctccagtgctgcctctggctcctgtgtgtgtgcatgtccttctgatgtgactgcgtctgcactggcctgccaaccactctgtccacatcgagagagagtagccaacagggaggagaatgagatcctgcccccagaccacctgaactggggtgaatgctggagatggacgggcacctcaatcgcggcttccacacaggagtgtcttcctaggcaagtgacctgggtggctttgattgagtgacgcagagccagcggcggagaccggagtgaagctgatgtgtcgatcattatatccaaggatggatgtgaacactgacctggaagatcagtgccaaggagatgcagcagctggatcatggaggaagacggacgagcacttccagtgaggccatggaaggagagccaagacacacttccgcgccgtggacctgacggggacgttacacgttgtcttgggacgagtataagtgtgcacagtataaggcgagtaaaggccatagcgagaaggaggttgacgatgccatcagtgtcaagagtaatcaattgtacgaggaacacagaagtccggtaaactgaagaccgtctaccagggacagccctgaactgaggaagaagaagatcttatcccacca

SEQ ID NO: 678828 - DNA, 740 bp, Homo sapiens
catgagttaacgctaaagaacttggctcaaatcctagaatccttagccaccaacggagatcaggcattaaagagaattcaagagttccccagactctggaaaatgtagttgttgataacagactagcattggattatttactagctgaacaaggtggggtcttgtgcagttattaataaaacctgctgcacatatattaactctggacaggttgaggttaacattcaaaagatctatgagcaagctacctagttacatagatataaccagggcactgcccccaactatatctggtcaaccatcaaaagtgccttcccaagtctcacctgtttttcacctcttctaggacctttgacaactgtcttgttacaaatgtttggtccttgcttctttaacctcttagtaaagtttgtgtattctagattaccacagttccagagacaatgctggcacaaggcttccagcccatcctgtccactgacacggagaatgaaatcgtcctgcctctgggctcccttagatcaggtatccagagatttttactcctccagtgccaggcagggcctacgtccataaactcagcaggaagtagttacggaaaacagatctccgccttctgcagccccttaagattaaggaggagtatctaatctctgaaggggggaattgaggtaggaggtgggactcaatctggaaggtggggctcaggcatcagaacaaaatgagcacttaagtaaata

SEQ ID NO: 678829 - DNA, 985 bp, Homo sapiens
cactgctaaaagatgggcaaaacacaagacttactgctcgcttgggcttctacatgcacctagcgaaactacagcactgacttcaccacacgcaaactattagcaactggaggcatcggaatcattcctgacacttcattaattacagaggcaaactttacactggacgccaccagatttcagacaccaacaagaaatccggacacaaccactctcaacaaacgctggacacacgacacacacatactccgacggaaacgaacatactgacttcagacctctgactgcactgactcaagcacagcctacccaatacagttactcactgtcacaactcagtactataaaacacataaacataggcgtaacaaggactatacacacactggtgctaacccacacacacagtacacataacttcacactggtacctaagtaacccactagggataccaccctcaaccatcaccatccatattatcccctacgaacggctcatctcacaatacaccacagcttctgtcataaccaacgattacacaacaaacaggctagtccctatacaccctcggtcacataccactcagtctgctcggacaccaatacacatcgctaccaacacagcttctagcaagcagacaacaccacacaaccagaaaacctctaacaaatcacatcaccagggacgcaacgaggaggaacccaaggagcaacatacacaatcaaaaaaacaagaccaacgggcacaggcaaattaccggcgaccacagatcacacatccaacacgcaaacatacattcgcaagagttacaggataaccccactcccatagacgaaagtacccccgaacgaacaaacaaaaacatctgcgatggatttcacaaaagagacaccctaaccgacgcacggacgcagaaggaaaacgaactaaccagcaacaaaaaacacagcaaatcacccaagcggacgctaaaacataccacag

SEQ ID NO: 678830 - DNA, 448 bp, Homo sapiens
cccccagtactctctttcaatccactgattccttcagttgttcacctggggggtggggttgggctaggggttggttagcaaaaaatgagccaaagaagaaaatgaattaaaaacatgaaagaataaaaagcaaactgccatttatgatgaccattatctcacacacagtggacattttaactcaaaaatactataggctcacaggcatagattaaacagaaacctgttcttcatgttcttatttttttgcttgcttcccacagatgagagaaaaatccagccagaattggcatctgtcaagataggcttttagagccacggctccctagagtggtctccacacattctgattatatgcaatctcattttgccatcaagagacttaacccactcccctatccatgtagactttgtaataataaattatacatatatatgactgaaaaaa

SEQ ID NO: 678831 - DNA, 320 bp, Homo sapiens
cggccgggcagggaggagaccggcacccagacaggtgcgacggcagaggagcgcagtggctcacgcctgtaatcccagcactttggcaggtcgaggctggcggatcgcctggggtcgggagttcgagaccagcctggccaacatggcggaactgtctctactagaaatgcggaagttggccaggtgtgatggcacgcacctgtagtcccagctgcttgggaggctgaggcgggagaatcatttgaacctgggagacagaggttgcagtcagccgagatcacaccgctgcacttcagccacctgggtgacagagcgagact

SEQ ID NO: 678832 - DNA, 856 bp, Homo sapiens
ttctgtacataatgttttcttgtaaaaaaatttattgaaattttttcctgattataaaaaactaacacatgttaatgtagagaatttgaaagctaacataaaggaataaagaaaatacataaaataggattgatatacagtcatcccttgatatccgtgaagaattggtttcaggacaccttatagataccaaaatccacagatgctcaagtccgtgatagaaaatggcaatggcatcatatttgcatataacctatgcacatattccagtatacttaaatcttctctagattacacaacatcaaatatgatataaatgctatgtaaatagttattatattgtattagttttaaattttgtatttttttttattgttgcattattttttattgtgtgtggggtttttagttgttgttttagttgttgttgtttctctttgcaaatgttttctatccacagttggttgaatccaggatatgggactcatgcatgcggaggactgtctgtattattttaagctatttaaagtgtttttaaaaaaacttacaaaactcttttatacttaatggcatcaggataaagttccctggacctttggccccttgcgtgcctcccaccttgcatttgaattctgactctctgtattgctcttgtgataaggcattggcttgaggttcctaggaaccacaactctccaggtccctgcccttgtccctgtgggcatcttggtctcagtcctcttcctctggactgtttctcctcatcctttgaattactgcctcggcctctccagaagcttcctgagtttagttttccttcctttcctgttttcctgtttttggactatactgtttc

SEQ ID NO: 678833 - DNA, 189 bp, Homo sapiens
gggcttcatgttggcctcattttaatcgtaaatgcacttctgtaggtgcaaggattgagctcatagctgctctgtgtgtggcaaaagccaaagtgctgtgttgtgtggctgtgtcaagcctggagcgtggtcctgtgagcgccgcctctgtctcctgctaccccactgtagagcgcctgctgaatatgc

SEQ ID NO: 678834 - DNA, 314 bp, Homo sapiens
acgagagcgtgcgtggtcacggacagatggcagacatgtggtaagcagacataactaatatactgcaaacgcctgtttgggagcttaaggcagctaagattattaacagaagccatttcttgaaatacctgcaacgaggtaaccctgatctatgctcttccagccttccaagggtctcgtaagcatctaaaatatcctctttgaaataacaaaaatggttttccttttttttgaagaaagggtctcgctctttcacccaggatggagtgcagtggtgcgatcatggctcactgcatgcaagccttgaactacca

SEQ ID NO: 678835 - DNA, 146 bp, Homo sapiens
cagacacagcacgtatcggccacattaagggtttggcccgagctaactctccagtacttcttgtccattccagctgcttcatgagattgttgcctaatattctagccagctgtacaggtcatgcttgtctcctcctgtagtgtatc

SEQ ID NO: 678836 - DNA, 394 bp, Homo sapiens
atatgacccaaataacagagatcatctcagattgagcctggcaatcaagagtaatacttcaaacatagtagaggttgtacagagatatcaccagtagagcggcctactacttccacagcagtattaggcacagttacggctaaccccagttattctttgccaaagcgtacacgtgaagaggaagaggatagcaccatagaagcatcagaccaagtctctgatgatacagtggaaatgcctcttccaaagaagttgaaaagtgtcacacctgataggaactgaggaagaagttatggcagaagaaagtactgatggagaggtagagactcaggtatacaaccaggattctcaagattccattggagaaggagttacccaggcagattatacaact

SEQ ID NO: 678837 - DNA, 236 bp, Homo sapiens
gagatatccctactttattataaagtaggcttgtgttagatgatttgcccatcagatggctcggggcaggtggtactgagtctaagcacggatgaagaagatagtagaaaacagtctggatgctggtgccactaatgttggtaagtgagggagagttgtaggccacaagaaatgatcagtgaatgtggttgtagtcaagaaacatttgttattgaaataagactatcaagtgtcga

SEQ ID NO: 678838 - DNA, 94 bp, Homo sapiens
cccacgcgtccgataaagagaaaaggaatttttgtttttttctttctcattttatgttgaactaaaaaggattaaaaaaaaaatctccagactc

SEQ ID NO: 678839 - DNA, 108 bp, Homo sapiens
ggtcctttggacatctggatagaatcatggattgttgaaagagaccaagcagtacgttctccatgtcatagattctgtcccgttgtaagaacttgtgaatggcatgta

SEQ ID NO: 678840 - DNA, 113 bp, Homo sapiens
agaggctagggcgggtgggtaaatatttgccacggtggttcctggtattaagccttttgagtcttaagatgacacatccctaggggtcaggtggttttcccgcacgaactctt

SEQ ID NO: 678841 - DNA, 334 bp, Homo sapiens
tgaaattgcaagtctgaaacagctacatatatacatacacacataatggggtatcctaatttaggataccccatttatgtgattcagcaacgcagttaagtacatgggggtttatgggtgggtgtttcgtttttggttttttaagaaagagggtcttgctctttcacccaggtggaatgcaggggcacaatactagctctccacagccttgaactccggggcttaagtgatccttccatctcagccttccaaagtgctaggattccaggtgtgagccaccaggcttgacctagttaagacttggatgggacaccccccggccacacacacacac

SEQ ID NO: 678842 - DNA, 503 bp, Homo sapiens
gcacgaggctttcctgactctgccggcgcggtgccccggttcgttgcaggagacattttgatggtacatcatttttcttgaagctaacatgtgtaatttggtcattaaattgcaagcaaaggggcagtagaggcaaatatcagccggattaagatatatttgtgtgtggtaacaaatagaaatgactatatctactcttagtaacgagaccacgaagagcggatcttgcagcggccaaggcaagaatggtgggaaaggctttacgtatggaaagaagtgcttcacgaaggaagaatggaaggagcaggtggccaagtattctgccatgggcgagctatatgcaaataagacaatacattatccgctgaaaatccagcccaacagcagtggcggctcgcaggacgagggatttgctaccatacagaccacacccatagagcccacactgccacggcttctgttaactacttgtttctaggcatataagactcgagggggggccc

SEQ ID NO: 678843 - DNA, 326 bp, Homo sapiens
gtgtcttgtggtcgtctctgaggatccccatgcgttcttcatgagtttgatgttaggtctacgtgcggctccaagagcctgggagtagttccctgctaagggagggtcagactgtccaacctgttcctgctccggcctccactattgcacatgctagccggagtaggctagagggcggttagactccgaagctctatgttgtttatgcggtgaaacgccatatcgggggcaccgataatgaggggaactaagtcagcttgccatagcctccgactctatgactgggtcttactatccaagacgactcatgacgtacgccatccatt

SEQ ID NO: 678844 - DNA, 1242 bp, Homo sapiens
gtgtgctcttgtcggtctcttgttcttgttttgttttttttttgttgtgttgcattttgtgtcgttggttgtttttgttttgttgggtcgtcttcgggttttctctgttgtgtgctgtgcttttgttgtgtcttttgtttcccttctttgttgttggtttttgtttatttcgtgtcctctttgttgtcttctctttcttttttttttgtttttttcgttggtttcttcttgttctcttgtccagctgtggctccttctgcctctctccgccgctttttttctttctcctctgttcttgttgtttcgtgttcttcctactgtggtcggctgttgtttcctctcccctgttgtcgtctcctccttttctttcctctcctttgcctttgcttgttctcgcctgttttttttttagttgtggttgtggtgtgtgtgttttttgttgtttgttttttctcttgttggttttgtttgttggtgcattggttttttgttgtatttatatttctgtttttattgtttgtttcttgttgttgttgttgttattttggttggcgtctgtgtttgtttgaggttaccccccccccgtgggtggggggtttttaaatatagtcgccgggggtctctttttttttttggtcgctccccgcctctcagtgttgctcgctcggggaggcgcccctctctcctcccccgtttgttttttcgcccccccctctaagaagaacaccctcgcggcggctctgctctccacgccctccccgagggttttttctcccctattgtctccccggcggcgcgcaggataaccaccttgttttctcccccgaggacaccaccctattgtcgccccctcttggcgcgcctctctgtttgtgggcgccccactatataagacacaccacctttttgcgcccacaaaaacccggcggtggggcccgcggcccgcgagagattccccgcggagagagagatctcgcgcgcgcgcccccgcgcgcgcgccgcggtgttttataggtcgcgcgcgcgcgcgcgcgcgcccccctctctttttttttttgtgtttttttttttttttttttttttttttttttaatgtgttgttttatttcccatggttcctccagtttcccttttaaacactttgcactttgctggaccattgccaattttttttaaaaattcccctacccccgtttaaagctgaaaaaaacatttggttcatgtgccttgtttaccaagcca

SEQ ID NO: 678845 - DNA, 356 bp, Homo sapiens
  misc_feature (309)..(309): n is a, c, g, or t
atacagcaactatatttatgtttatctgggcttcatattaaagaacaaaaatgattttaccttaagtgggatataaaataaaggaccttaggaagatggataatatataaacaccaactaggacataatgggaaagtcttgttttttccaggtctagctatttttgatgccagcgggttttaattatgaaaggaatgctttttccatatatttcccctttactctttcaacactaattaatttgtgagcatgtcaattccatatttagttaattgaaaaggaatatccaagaggattgaggtacttctnaaattaaatttttaatgaaagtcatttaaattaaagtaggttgtagg

SEQ ID NO: 678846 - DNA, 298 bp, Homo sapiens
ctgactgaggagcaggtgcagttgacttctaatcctacttccgctcagcgtgcgccttctgcttctcgatcggagtctctactgctttccgcggcgtgtcctttttaggttgggtctctgcaaacttgttagcagcaaactggtcctgcttctcgcacagttgcacttcggccaagacagccctaaactggggctggttaatgcaggtgaggaaccagcgggtggtattgggaaaggcctggcggaaagaagtctctagaacctgcttatagagccacaacagggtgcaagacaactg

SEQ ID NO: 678847 - DNA, 191 bp, Homo sapiens
cggactccaggtatgctcttgagtacacgaaggtgtgcccggtgttctccatcaaggctttcgactacgagaaggtgtacagcctgtagtggaccaatgagcatgagtttatgcagcagacgtggacggtcttataccgtgcagatcagctttgtgaagggctgcggccagtgctacaccgcgccagttca

SEQ ID NO: 678848 - DNA, 1391 bp, Homo sapiens
  misc_feature (1391)..(1391): n is a, c, g, or t
tgacttggatgtcaatattgacccaatcccgttctatgagagcgcaggggccatgttctgcggcgtcgcacgatgctgttttcgcacgcggacaggcatctccagaggaacgattccctcaataattgtgcacaaccacggatgttgctgatgccaaacctgtatcgtatttcaacaaggaaccaatctacaatgtgtctgcgatgcgaatggccaatgcattcgcaatctacaaattcggtaggaggtttcattgatcatggggcatatcacattaatgattcctgggcgcggtgcacatgtcgtcggtgtgagtctgtctggttgattacatacggtgtgcctcttgatgctgggaggcctatgtccataaaacttatacgtatcgttgcctaacgtgctggtaactggagaggaacgtgacgtactaccctacgtatcgtatttcgtttacctggtagggttcatgctttgggaaagaaggcttattttcccgtttagtctactcaatggttatttgggaagaggagtacaatgggtcccttctatagtagtagtagcgatcatttaatatctatcgcgctatataggactcgttagacatctgttatgtagtcgcatgggctattgcgggtaagaatgaacctttggggagaaccatggccttcgataagaaaagccaaaggggtgagcaaattcaccactacagataatgggcataatgcggcacgcattaggggccctattgccaaacgggagaggggaatacacgcggtatatgggtgcccagttttgtatctccgtggggtggaaatgggcctctatagagggacacccgtaacaagtggaaagttgggaaaatggtcatttgaaagccacgtgatgcttccaatgtggcaacgttaaggttattccccttccagaaaatgtttgggcaaccgtggacacttatgggggctaggttaaaagaggattttatacctgtgggaagccataaaagggggttggggtccaagagcagggaggataacaattttgtacgtgtatatgaccaagtgtttatgacccccctttttgggtttcgttattggaagcagcttaagttggtttagcgtggcattggccggttttggtacacgaaatgactgaagatgaaagggtgttgacaataggttaagtggagcaccacaaaattggagttctaaatgttggggaggtggaagtgcaagttggatatatttgggggagacggtgaaatgtttagttagatattcaagtggcgtcgtggaaattgtattgatcacagtgagacattaaaagtgaagtccttaggggaaaaatgtgcgggattactgggacgaagctcaaacgataaccgcatgtggcatatn

SEQ ID NO: 678849 - DNA, 916 bp, Homo sapiens
gagagtgtggtcaggcggtctcgtgattgagcatgacttaccttatcccacttgattgtgcagaatactctggctgtcagctatgtctatctattcaccagtggacttcttctgatatccagtggtgagacgaactgtgataatgcgatgcctcaggaccatggcttcagagcttgattctcagtccctcggtcgtaagattctgctgccagtaagttcgctccctttacctctccaagagaatgaaggatctttgccctggaggaatacttgagacacgatattataacgctgcagcataccagacgcatgtaccatgaaggctgaggtctcgaagcacttgggctgtggagagtgatgagctactgacgaaaggaacgttgcttctcaagggcaatcgagagagaacttatcgatcttgtctgtgacatggcttgatgacgactgtgacccagcagtacctggaagactggcgttcatagagaagcgaggatagtgtaaagtggttgccttacactttggaacgttgtagcgagagaaagtgatactgcatcattgtatctgtgcggaataccattcgatctcctaagagcctgctgacggagagctgaagcgtgactagttatgttctgggaacttgatttttacttcactcatttcctctttccgtaatattatcccagtagaactggctctgggccggtgtcacttttcattttttgaccactcctagactaaaatatttcttagaaagctaaaattgtagcgactagttttagggtaagaatccaagactccacgacttgttaaggatgtcgtataagaggggctaggaaggcggagaaacgtgaacgtgggtcactcgtttcctaaacgggtggaccaccaattggtagcagtttccgtgttgcctcaa

SEQ ID NO: 678850 - DNA, 160 bp, Homo sapiens
catctctcccagaaaaggacaatatcctcttactgatttcgtattcagtttactgaatgattaccacctgtaattcctctttggattgtagagaccggggcatccgcgggtccccaagagacccgacgctatgcttcatggccttttctgggcgcgagag

SEQ ID NO: 678851 - DNA, 1802 bp, Homo sapiens
  misc_feature (869)..(869): n is a, c, g, or t
ctagttctagatcgcgagcgccgcctttttttatatttccggggtgacaaatgtttttattataaccttgtggtcaccactggggcacagccgggcgggggctctgagggtgctgggaacgtatccagcccctaaagtcccccgcacaccccgatcgccgacaaaccatggagcggagccaaagcggccgccatactaatacaaagtcgatcaggaaatgcgaacaagcatgtgtcgcgagcgtctccaccaaggtaaggcggactgacagcctggcacaagcggaaagagtgaggccggctaatcacacgaccgcattagtggaggtacacacaacatatatcatagcgccgcaggagcatattgacgacttaagcgtctagctgacccaatcaccacagcgattaaccccatggatacacctgatgcgaacacagcgcgggctaacaagcactatggtgcagtcactcaagagtatctactctagctcgcagctatcgaatggcaccagcagatgctgaatacgtcggcaccattataccatttgtacatgataccctaatggcagacggacagtcataacgaaccacccagcagtagcaccacagcagctgagcgcacacattgtataacataaaaacgcctcgggcaaacaaggccaccccgacgatcgccccacctcaacgacactgcgtagactggaaacacaacaagaagaggcgacacgcagaatgtcaaccaacagcaataaagtggccacaccccggacaacgaagcgagaagactgagctgaaacgcccacaaaggtgaagggaaaacaacgaggagccaacacgctagccgatctgaggcacgctgagcacactcgnacgtcgaagtaaggagaccggcgcgcgcgcaagcctcagcggagagaaacggagcaggaggtggacgccgacccgcaccgtgagaacacacgaagatgctacgatgaaaacactattcaggccagacggcacgggtgacaaaccggtacacgagcgcgatgctcagacactgagctgcaccaccactacacaacatccacccaagccgtactttgatcaatcagcatcaacaaatcgtgcatctcgcagacgatgccctagggagcgggcgcacagcacaccaacggtgcactccaacacaatgccgaacgaatccgaacatgtcacgacctagtgtggaccggcacgcatgacgtgcagacggcaacagcaagctactcggacagacagccgctacctgtcgcgaggcagcatcgcacgagcggcagcaatgacaagctgtgagtaggagccagacacacaagttgacgcgagacgatagagtgcgagccaagacactccagcgaacaacaccgacggtggaccccaccagcagatgacgcgtacggatcgacacgacgcgaacactaaatctcgtctgtcacctcaccctacaatactacacactgtatgaaccttagaccaaccgcttatcctcatacgtcgaccaccacctctaacactatctctaactatatcacaactatatctagctacatattaggttaaccatcaacaataacacacaactactacaccctccacaaggctacacacactcataccttccttcactaccacttaaacacactatctaagccacactatctagctaccattccactaactacaactacctactatcgttatcttacgacaactatcaatatcacttagctacccacaccacttcaacatgcactagaccaaacgcctaatagtctcctatacctc

SEQ ID NO: 678852 - DNA, 118 bp, Homo sapiens
gcgtctctggaggagcagttccagcatttcaagcttcttgcgtgcatcgcttcaaggccggacagtgtgacgagcagatgctatgtgctagaggcaagagtgagtctatctagaatac

SEQ ID NO: 678853 - DNA, 167 bp, Homo sapiens
  misc_feature (59)..(59): n is a, c, g, or t
  misc_feature (135)..(135): n is a, c, g, or t
  misc_feature (142)..(142): n is a, c, g, or t
accggggaaaaaaaaaaaaaaagcaacgaatgcaggaaggaagcctgcatgctgatggnaggtatgtgagcctaggagttgtgtcaataccagctggccgtcccgtccctgtccctctctccccagcccacactnccaagtnccagtccctgggccaatcattacca

SEQ ID NO: 678854 - DNA, 189 bp, Homo sapiens
tttttttttttcttctctgttgttttttttaaatagagacgaggtctcactatgttgcccaggctggtctcaaactcctgagctcaagtgatcctcccacctgggtctcccaaagtggtgggattacaggtgtgagccaccttgcccatccaaaaacctgtcctcgttagcacccttttaactattcat

SEQ ID NO: 678855 - DNA, 1579 bp, Homo sapiens
  misc_feature (1)..(1): n is a, c, g, or t
  misc_feature (541)..(541): n is a, c, g, or t
  misc_feature (559)..(559): n is a, c, g, or t
  misc_feature (782)..(782): n is a, c, g, or t
  misc_feature (1108)..(1108): n is a, c, g, or t
ntatgcaagtgtggtggttgtttgccacgaggggactcccccgcggccctcgttagatgtgttggtcgacgcagtcgcccggaggtttgtctctcctagggggccaccactgtgtgcgttgtttcccgaggggtggggaaacccacacattggtagagggggggcccactaacatatggggggcccaccaaagaagacctcgttgtgtccgaccccggcgtggtgcgcgtctgtcgaggcccccctgttcttattatagaggccgcaccgaacaccaacacgtggtcgcccgacgtgtccgcgcctttaatcctttaagaggggcccctccacgggagccccttcccgctgggggttaatttactctggttccccccccgggggcgtagttcctcccccagtgtcgaagttgctcccccccgcccctcgccccacaatattccccgggagggggtgtgtccgccccaccacagagaggcggccacagtgtggtcgccaacacggcactataattgcgcacaacgtggagatgttttgtccnttcccggcgtgggtgttngagagaaagaggggttttataagggttcctccggcgctctcctaagaagcccgtgtagagataagagataagaggatttataaaagattgttggcccgccgtataaaaactctctaccccctcggacccaccgctgggcgcttctttgtgctcgccaccccgcgcttcctcgtagaaacacccacccgctcggtgtttcgcacacacccgctctctctgagcncccgcacaaatgtgtgccccctcttgtgggagcacaccagcaggagagagaaagggcggcacacaagtggtttctcggagagccccacaggagagtttttgagccgcggagagagagagagttattatctctcacaggggtgtttcacactctctcacgcgggggcgtctcccaacacaagcggcaccacacagagtctcggctttataggagagagagagagagcgccccccccccgcggtgttgggggagccctcgtcgggagaatttttataacgagagagagagctctgtgggagcacacgagagtctccccctttataggntctctcaaagagagaaagcgctttctctgttcgccaaaaacgcttcgccgaaggagatgtgccgttgtggcaccgagaagaggggttgctctcttgctcgccgcccgcgcgctctatagcctgtgtgagagcctgagcgccaaagccccctgtggcgctccaccacgccacccccctcataacagccctcggtggcgcttccacatcctcgcgttctgcacccacacacccactccaaaaaggagtcgttgtttttttgttttttataaagaaaaggtgaaaattggctctggtttcttcacatgaagcaccacatttgaataataagctcttttttctgtttttcccttgctccatttccttttggggaagaaaatcttgtacctgtatatgggaattgtaaagacaccatctctcgccacctccagcaccctttcaccagaaataaatagttttttttgtttttccaga

SEQ ID NO: 678856 - DNA, 533 bp, Homo sapiens
  misc_feature (396)..(396): n is a, c, g, or t
atgcctccctaagaccttggcatccttccctctaagccgttggcacctctgtgccacctctcacactggctccagacacacagcctgtgcttttggagctgagatcactcgcttcaccctcctcatctttgttctccaagtaaagccacgaggtcggggcgagggcagaggtgatcacctgcgtgtcccatctacagacctgcggcttcataaaacttctgatttctcttcagctttgaaaagggttaccctgggcactggcctagagcctcacctcctaatagacttagccccatgagtttgccatgttgagcagagactatttctaggcactctgcaagttcccagtgatttccttcggctaattctagaggcgtgcggcggagggtacatgtncctcatctctagctgtagctcttctgtctcgtccaattgtcatatataggtgtacttgtgtggttcttaccccaatgactttacacctgacagttgctgtacaagtgaatttgcaaataaagttattactctgatta

SEQ ID NO: 678857 - DNA, 137 bp, Homo sapiens
tagaggatccccaggcaaagctctacggagcgctaacgatttggtggtgaagctaggaaaaaggatccaggaaagagcgagtgcaatttggtgatgaaggtagcaggcgggttggctttgcaaccacacggaggagg

SEQ ID NO: 678858 - DNA, 138 bp, Homo sapiens
aatatatattgttagttctcataaagcataacatctaattaaggaaagggaaataaaccaccgggattaattaaaggaagatgagccaggcaatattcacatattaccaaggccttgatacagaacagaaggtacagg

SEQ ID NO: 678859 - DNA, 107 bp, Homo sapiens
gggggcgcaggtgatctcagaaagatatagtagtggttcagtctctagtaccttacaatatgaatttatatggaacaacaaattcgttaagtaattagttaagatga

SEQ ID NO: 678860 - DNA, 343 bp, Homo sapiens
  misc_feature (28)..(28): n is a, c, g, or t
  misc_feature (244)..(244): n is a, c, g, or t
  misc_feature (248)..(248): n is a, c, g, or t
  misc_feature (250)..(250): n is a, c, g, or t
  misc_feature (298)..(298): n is a, c, g, or t
tctgattccaggtatccagttcatacgntccggttcccaccggataaaaaccaatctccttgccatatttttccagcgctgccggtgaaatcatcgcggtcgccggatgggcagaatattaataaacgctgagaacggctgtttgagggtaatctttaccgttgtcggatcgatcgcttccgttttagcaatattcttatacaggttatagcgtttaagatgattcgccggatcgctggcccgntccngnttcgctttcaccgccgcggcgttgaaatcggtgccatcctggaatttnatgccttcccgcaatttcacgggtgtaagtcaatgccgtcatcgg

SEQ ID NO: 678861 - DNA, 453 bp, Homo sapiens
tggtgtaccgtgtacatgagtagttcttttaccactatcactgtttgcttgactaacctgcccagatgtgagagtagcaaccttgtttggagagctccccatgtggttttagttctcctgcggtaatatttgagtttctgaccctaaaaactcaattacttaggcacaatagcattgggttgattcctttcattccagagagaagtcgtggtcccatagaaaagacaaaccgtaacaatcagttcccgtactgactagctgcaggaacacttgatcctaaccagaccatgatcaccctctggtacgtgactccctttctcagaatagttctgtcataggtacccgaatacatgctacatatagactactgtcaggctgggctcaacgcaggccttataactatggctgcctgcagcgcataaatactggtaccaccacagtacggggcacgac

SEQ ID NO: 678862 - DNA, 953 bp, Homo sapiens
ggacacggaagtagctccgaacaggaagcaggacgaagaaaaataacctgtcctgcgacgcctgagactaaacctggaccctgcaaccaccatgaacagcaaaggtcaatatccaagcaacagccaagctaccctgtgcagcctcctgggaatccagtataccctcagaccttgcatcttcctcaggctccaacctataccgatgctccagctgcctactcagaggtgcttccagtgttgccagatttgaactagactgggaatactcttaggagttggtcactttaggtccttagcgtaaatctgacttcacatatttactcttcacaaagtgctaacatgaataatctaaaacactatataattaggcaaataaaagatcggagatagaaagtgcatatatatgagtgagttaagatgtaataatggcacaggctaaggtgcagaagatgcaatctgcgtactgtgagcccaacaattagctatcagcagacagtgatccatgagactattgacggcagtgtcaatggccacttgttactcaattcttacaagcaaggtataaacctgcactaatggagcacgtgacgcagttagctcagatgcacgagatctccaactagggacatgtcgagaagggatacacatgaggcctactctatcgtgacctcataataaggacaaatcagacacgacgagaagatgcaacccagtgggaggcaaaaggaccgacaacaagatcacagcacagaatgcatgaacgccagcacaggaaacgacacaatgggccacagcgggagcaggaggagcagcgaggacccacgaagcaccaagggtacgggaacaagatgggacacagagaacaacatgagcacagtagagaggaagaacgaggagatacaacgagacaacaacagaccacgagaacgagagggagaagcgagcgacaaagg

SEQ ID NO: 678863 - DNA, 478 bp, Homo sapiens
gaaacgaatgtagttctgcaacaaatgactaatgaagacaaatcatttggtggtccatctggtgagagagcaaaacaggagtatgtctgcaggtacagtgtactgtacccttaggcccatgatttgtacaaataaagaaagagaacttagagacagatagtaaacataaatacaaacctaggcagtggcagatagccgattccattaaataagtaagagagtattaacatagacgagggtggtcgaacctagtgtacagaacaggacggagttgcacaaatgctcgtaactgaacacagtgacttgctaagtttgactagagatccgctttcctctgtaagtactcactccaggaggacactaggcgacttcacactccgttgtcatagttggcgcaactgcgaagtctactgctgaatctactcgcactcgcctatatgctcctcagtgtatgactccgatggtttgcattacacgt

SEQ ID NO: 678864 - DNA, 723 bp, Homo sapiens
gtcctcgagcccttgaatctgacttcggagccctcggactacgctctggacctcagcaggtttcctccagcaacacccggccggcttctaactgtgactccctcgcactccccgaaaaagaatcctgaaaatagccacaaagaaacgccacgcgcgtacctggtgcgcgagagcgtatccccaactgggacttccgaggcaagttgaactcagaacactacagcggaagacgccacccggtgcttgaggcgggaccgatgcgcacagagaccgaggcgcatagagaccgaggcacagcccagactggtggctatgtgccctgtgctgggcacatggacgagtcgtcgttaagtttattctcttacttgtctcactaagttcacatactttatactgtatttatgtacgtcctcctaggtgactggatgactgtgtacgtacattatttattttaaccttatgcaaggttgtgagatgttccccctgctgtatacatgctaggtctctctggtatttattgacgcttctgtgcggactggtggaagcaggacacctggaactgcggccaacgtaggagaagaaatggggaggactcgggtgggggaggacgtcccggctgggatgaacgtctggtggtgggtcgtaagtttaggaggtgactgcatcctccagcatctcaactccgtctgtctactgtgtgagacttcggcggaccattaggaa

SEQ ID NO: 678865 - DNA, 248 bp, Homo sapiens
  misc_feature (196)..(196): n is a, c, g, or t
ccagtcctcctggggcggcagaggggcatctggaaaaacccgtgccagaagccccagcgcaagggcggccctcccctgcccagaacggacacctcagggaccgcagggaatagaaggcacctgaagggtggcacaggcaatcgtggaagatcagatacacaagcaattcgcagacagttcctggtgagaaattacncacggcttcccatggaaaagacaggcaacgccgaaagcttgagggcgaggga

SEQ ID NO: 678866 - DNA, 407 bp, Homo sapiens
ggctgcatcattagaagtgtattcctatggtcagataaaggatgcatttgatcgaaacgcggaacttcaagaatctcctactggactgacttctttaagtcagcggttgaaaactgccaggactcctggcggtgggcagtcatgacgtggggtccaggctggcaattcccatgccctgttttaccacttgccctctccattctatgaccgggtacagacactgagatgcctccatgccaacctcatccaggctcaacgggattacttcaggggctcacacctatgaactcttggtcaaaccaagggcaagtttatccacaccaactgagacaggccatggtggcaccgtgtcatcctcgtcatacaatgcctgatcatgctgctcctgtcaaccccctcttccccag

SEQ ID NO: 678867 - DNA, 935 bp, Homo sapiens
  misc_feature (285)..(285): n is a, c, g, or t
  misc_feature (473)..(473): n is a, c, g, or t
ggactaggtataagaaaggtgaatccgtgacttacgcctgtctgttgaccacatcctgtaggcatcctacgatgtggtgcataatcccctgtaagatcatacggcctattatagtttggtcacttggatcagggatcactcccattcacttaatcgaagactcttatccccgatatagatagatattcgggtcgtcggctatatcaaggatagctatatgagtcatcgaagcctgatcctctgtatcacgcgagcctcgaaaaagatagcctcaccgtgtcgtcnctctataaacgacgttttacaacctaaggagcctcatgtgtcctccgactaaaaataatcgcatatcctcatggctatgcattaaggtctcgcttcaccactagagttccaatcgactcaagaaaatacatcaagctagtggataaatataagacactacgacgagcccagagaccttgtgaatcgangaacgtatacgagcttggatcgtcactcgtgtgtgaccgtacactataaccaataatgaactcctctaggttcatccggcatgcacgagacgcttatatcccaagttgtctccactttggcgtggaaaaagaggacggtaagagacctcacgtctgcgcttgtgctgagtctttcaatcacgtatcgattgaatttccgcactcgaaggcatgaggtgtgctacattactattggcactgcaccttcgataggtcagattccatattgagcgagagtccgctatttccgtggcgatttatctcgggatgtgcaattccggtcgaccattaaggcagatcgagatcttatgcctaacaagttcacagaacctttagtagacgacttgacagaccatataataagcaccctgtttcctaccttccggcataaaatccaaagggccgtcaattcgggatataagt

SEQ ID NO: 678868 - DNA, 325 bp, Homo sapiens
ggatcctgacgttctgggaggagaacgaccgtgtacagtgtgcgggaggcctcggaaaggtacatgggtcacctgacaaggagtggccggtgccctggtgcagaacacggagaagggggccaatgcagacgcagttggggtagttgctgaaggagcttgccagtgagcagcaggagcagtgggaagccttcgtatcgggggccccctgggggaagcacaacaagccgaaccatggtggccctggttgaaaacccaaccacctaaaattcctccagttgaggacttgacggacggaccggggctccaagggagttcaaacttcccc

SEQ ID NO: 678869 - DNA, 438 bp, Homo sapiens
caccacccagtcactctagcgtcgctggcctgaccgcccctgcctacagagtcacactccaatcctcccgggcaccttccttgaaggactggctaaggttgcaccaataccaccttccactgccagctgctgtcggggccgtgtttggctcacccaccctgcatcagcgcccatgtcgccgagaagcccgacgacccccctgaactaccttccctccgcgtgtgcgcggaggccctgactctgggagcacgcacgcacaactacgggacttgcgccgccgcctgcgtgtactttgccatagcggcctctcctggtccaagatgggccggctggagggctgggaggtgtttgcaaacacccaaggtgtgagccctgtgctgccgggacctccagccctgcagaatgcgtccagaaataaattctgtgtctgtgtgaaaa

SEQ ID NO: 678870 - DNA, 233 bp, Homo sapiens
tctcatacacggattccccgtaggtcttccatctcgtcgcgatgtgctaattggatgtcttataacaaaaactacacatttctatctgctatttttgctgtgcgcttctggtacctgttttctcactgggacgattgcttctttttcctgggtgacgcttccagaggtctgaaattttcttcccacctttagtctgagatactttatcatgatcgaacctactcgtccaacca

SEQ ID NO: 678871 - DNA, 273 bp, Homo sapiens
agagccacttgatcgattcattctttgcacttgatcatgtcttgacaagtacctatatagatttataaagaagtaagcatcacaactaatggtcagacacgctcatgtccttgatacgacgtgtctatcatcctgagggcattggcgaaacaacacagactatggttcgacgaccggatcctgaccccagcacatcggaagggaatggatccgccacagctctgtttcaagcaaacgaccagaagcacacgcgtgtggctaaagaggtcgagg

SEQ ID NO: 678872 - DNA, 246 bp, Homo sapiens
cgcacaggtggctgctcatggaggctctgggctgctctggctctgtgggcactgctgcttggctggtggtctccgcaccttgaaaccaactccaagcgtgttctcctttggggagaaggctaattgggcatgaaaaggccttttgggcacatgccccatccactcacccttagccaggtattgatgggaaaccgaaggtctatctcagcaacggcacaaaactcgcttctaggagctgcattctgc

SEQ ID NO: 678873 - DNA, 138 bp, Homo sapiens
aggtgttatgccctaggggcatctatcagctcccccaagatgagtgagccccagagagagctctgaacgtcaccaagtaaccaggcccagctccaggccccaactccgccagcctctccccgctctggatacctgcac

SEQ ID NO: 678874 - DNA, 819 bp, Homo sapiens
  misc_feature (40)..(40): n is a, c, g, or t
  misc_feature (84)..(84): n is a, c, g, or t
  misc_feature (87)..(87): n is a, c, g, or t
  misc_feature (113)..(113): n is a, c, g, or t
  misc_feature (180)..(180): n is a, c, g, or t
  misc_feature (185)..(185): n is a, c, g, or t
  misc_feature (215)..(215): n is a, c, g, or t
  misc_feature (217)..(217): n is a, c, g, or t
  misc_feature (223)..(223): n is a, c, g, or t
  misc_feature (247)..(247): n is a, c, g, or t
  misc_feature (252)..(252): n is a, c, g, or t
  misc_feature (260)..(260): n is a, c, g, or t
  misc_feature (264)..(264): n is a, c, g, or t
  misc_feature (304)..(304): n is a, c, g, or t
  misc_feature (311)..(311): n is a, c, g, or t
  misc_feature (313)..(313): n is a, c, g, or t
  misc_feature (328)..(329): n is a, c, g, or t
  misc_feature (333)..(333): n is a, c, g, or t
  misc_feature (340)..(340): n is a, c, g, or t
  misc_feature (342)..(342): n is a, c, g, or t
  misc_feature (349)..(349): n is a, c, g, or t
  misc_feature (359)..(359): n is a, c, g, or t
  misc_feature (378)..(379): n is a, c, g, or t
  misc_feature (382)..(384): n is a, c, g, or t
  misc_feature (419)..(421): n is a, c, g, or t
  misc_feature (424)..(424): n is a, c, g, or t
  misc_feature (450)..(450): n is a, c, g, or t
  misc_feature (479)..(479): n is a, c, g, or t
  misc_feature (484)..(484): n is a, c, g, or t
  misc_feature (497)..(497): n is a, c, g, or t
  misc_feature (733)..(733): n is a, c, g, or t
  misc_feature (750)..(750): n is a, c, g, or t
  misc_feature (815)..(815): n is a, c, g, or t
tgttactattgtttttcttttttgtgttgtgttaagtctnggatggggtaaaggtaaggtatagtatttttcatgttccttganctnttgttgcatgtgtctaggatattganagtttagtaatagcttcatgtccttatcaccagagctcttaaaggagacatggaacagagtcggggnaattnttctgctctggccgcagtgcctgctggtcngngatctnttcctgcatcagccttggctctcntgaangactgggnattncagatgctttacatgttgggtagatgatgtgctgactgtncagattntncttctagcaagcgannaggngcatgcncnccccttntctggtttgngtgtttttttttttttggnnggnnnccaccatttgtgcagccatggggttggtgttaggnnngtntttttggagtgggttaggtgtttttntttttttttcgctggtggtgttggttggncagtngtggtttcttttnctttggggcggtgggttgtgttctggtgtcaaaatatccttcacttagcattcgttaaaggcataggagagtgaaagcaacgcctctttatgacctaggctagtgggaaggggaatacgtggattctaagggtaaggggatgaaaaagctaattctatatcaccacaaatgaactgacacataaatgacaccttggctttttccactcatagaaacactcacttcttctagcttanactactaaatctaaggncggcttcatcacagtttgggatatttactgtgctttttaagtaaaggtgaaaagctacatccttnatag

SEQ ID NO: 678875 - DNA, 123 bp, Homo sapiens
gattacagatatagttcatctgtttcctctgagtcccacatagctctcttagagggaacgaatgactcatcatccttgtatcgcctgtgtgtgacagattagtaggcattcacaaaatatttg

SEQ ID NO: 678876 - DNA, 422 bp, Homo sapiens
  misc_feature (6)..(6): n is a, c, g, or t
  misc_feature (33)..(34): n is a, c, g, or t
  misc_feature (63)..(63): n is a, c, g, or t
  misc_feature (73)..(73): n is a, c, g, or t
  misc_feature (212)..(212): n is a, c, g, or t
  misc_feature (285)..(285): n is a, c, g, or t
  misc_feature (313)..(313): n is a, c, g, or t
  misc_feature (332)..(332): n is a, c, g, or t
  misc_feature (389)..(389): n is a, c, g, or t
gaagtncgaagtacggtgtggcgctctaccatnncgctgaacgcgacctcaagcgcctctttntccaagtcgnccctcagaatgtggtggctgctcaaattggctatcgctgacgacgaggccagctgagacgtgatccacaatcgcagctggttgctagagagcctctccggttttgcggtcatcagccggtgtccactgttgaccgcagncgtccgcagttctcggtcacaccactttgggaagtcttgtaggccgccctgcatcattgcggcgatccgctcnacggcgcgttcctcgatctcgttggggntgaaaattgaacataattncgcaattgggccatccgtgacctgactactggaccttaagcggcaaggcttggcatngaagttggccgtttctttgaagcttgacggaaa

SEQ ID NO: 678877 - DNA, 152 bp, Homo sapiens
tgacatcgcgcccatgacatcctgtccagcccctgtgcaatcatcaagctgggttaccttctgagcctcccccacgacacgctcaggagcagaccacctatctccgccactgacctgccatgtgcccaccctcagacagtgcgcctgggtag

SEQ ID NO: 678878 - DNA, 162 bp, Homo sapiens
gacagaggaggctggggcaaagccctagacatgaagacatctcagaaatgaggatctgtactccgagagccgggctcatgcctccctgatgtctgtccaccatctctctgatgcttgtccatccatcctcgtgtgctgtccaagtctccctgggactgtcca

SEQ ID NO: 678879 - DNA, 180 bp, Homo sapiens
tcactatgttgcccaggctggtcttgaactctaggcctcaagcgccttggcctcccaaaatgtcgggattacagatgcgagccactgcatccggcctgaacttcttttcttctttttttttttggagacggagtttggctttggtggcccaggctggagtgcaggggcttgatctcggtg

SEQ ID NO: 678880 - DNA, 100 bp, Homo sapiens
gcgccgcacctacgaccgtgccctccgggcactggccatcacgcagcactctcgaattaggcccctgtatctgcgcttccgtgcgctcacacccactgcc

SEQ ID NO: 678881 - DNA, 247 bp, Homo sapiens
gggaggcgatctagaggatcccgatatgcgtctcacttctcccaaatatactgtgaaaaacctaaggggacaggcacagtggcttacacctgtaatcccagcacgtcgggaggcaaggcaggcagatcacctgaggtcaggagttcaagatcaggctggccaacgtagtgaaaccacatctctactaaatatacaaaaattagccggtgtggtggcacgagcctataatccaatctactcaggaggc

SEQ ID NO: 678882 - DNA, 428 bp, Homo sapiens
cgacctgtggaggctggtcctgaggaaataactgaactggggagactgggctaaagtgaggcttgcagctcacatgggtctctccaaatgaagtatgggagcattctgtccccgcagacacacacaggcagggttgtgtgaaagctaatcaagtgattgtacgaagtggccttgaggtgggggtgagcactgtcgccgttcttaagtttcctcaggcagaaagcagcgatgtagatatctcattcttttatatgtggggctgaggaaggctgggatgcttgtcaaaagctgagacagggcagggtataataggcttgctgcccggggttcttttgtaccccccggggttagggaagtgcaggtatctttggaacagtctggaatgctgcggcgacgcggccgcgaatttagtagtagtaggcggccga

SEQ ID NO: 678883 - DNA, 232 bp, Homo sapiens
tttttttccccccttttttttaaaaaaaagggggggggaggttttccccaagctcccttttccaaaattttttcccgggtttttggggaaaccccccaaaaaaaagcccttttttaaaagggggtttttttttttttaaaagggaggccccccaaaaccggggccaatttttttttttttttttttttgccctgggccccgttaaaggcccctaaaatttttttttggggga

SEQ ID NO: 678884 - DNA, 435 bp, Homo sapiens
ggtgcgcaggcgacgtcctacgacgcgagccagaagaggagccgcaagcccacgaaccaggtagatgacggagagccacagacctcgacccgaggtttacctgggtctacgaattacttgccgctcaccccgatggtgaagcttctgtggcgccctcgaatgaacggagttggcgtgagataccctagccacgctccgcgggggagcgcaccaggggaccttacactgcgagaagagcgacgaccaccgggaggacggacctctatcatgacacaccctaggtcgaccaccacttgcgctggtaaccacagaagacgccgctaacgtccttttttgtcctgtgtggagtgactccgaggtgactggcggcccaatgtggacgaggaaggacctgcgagtgagggaacgagcgatcttatttgacgaaacgcagag

SEQ ID NO: 678885 - DNA, 186 bp, Homo sapiens
  misc_feature (64)..(64): n is a, c, g, or t
  misc_feature (68)..(68): n is a, c, g, or t
  misc_feature (106)..(106): n is a, c, g, or t
  misc_feature (132)..(132): n is a, c, g, or t
  misc_feature (165)..(165): n is a, c, g, or t
cttcaagcctgcggtgatagccgactcaggctcctatttttgcactgccaagggccaggttggntctnagcagcacagcgacattttgaagtttgtggtcaaagantcctcaaagctactcaagaccaagantgaggcacctacaaccatgacataccccttganagcaacatctacagtgaagca

SEQ ID NO: 678886 - DNA, 304 bp, Homo sapiens
ttactgtgagatatgaatagtgtcagagatgttaaggtcatacagaataagaaggtagtggtatatggcttgactaatatttgttgaataattttataaaagaacaggctacctactatttgtgttgaagatattagtgaattaagttccacacccttatgtggagtcctgctaaagtagcgacaataaggaagggtcccgaggttggggagagcccctagttgaggagaatcatgaacaattattgtatgaactattgttagagacagctaatcacaaacgacctgcgggcacaatgacctca

SEQ ID NO: 678887 - DNA, 378 bp, Homo sapiens
agagaagattctcatagaccagtgtgcccacttcactgtgaagaaagatatttgttggtggcattaaacgaagacactgaagaacatcacctagagatattattttgaacagtatggaacaattgaagtgattgatatcatgactgaccgaggcagtggcaagaaaaggggctttgcctttgtaatcctttgacgaccatcactccatgcattatattgtccttcataaataccatactgtgtatcgccactactgttatttttgacaagccctgttatagcgagagatggctagtgcttcatccagccgaagaggttgaagtgtgttctggagactttggtggtggtcgtgtcggtagtttcgtgggagtgtccact

SEQ ID NO: 678888 - DNA, 624 bp, Homo sapiens
atgcttctggcatgataaaatcatggacattaactcaggggttaccattcttgtagagtgtctcttgaaacactctctgcccattttaaaacttgagaatagttcagtatctctgatatttttggccagaatcatcatgtcatgtttgaatgtgttatccctatctaaggaacacccggtgactactgttctcgtatgaactgttcacctgggaaatgtccatggcactggctaactcatattacttctcatgtacattagatttctactattttcattccctgtctcatttaaaccttccttcattcgagtaactcacctacatatttctacttcggcctttcaactgccgactttatatgacttcaacttctttgcactccctctgttccacagagctcctccgtgcttaggaagtgcttcggtcctgccgccctggattctaactcccacctttggtcctactctctaggtagtatctttgctgccgcgttgggccttttaatcctttggtcggcccactcgcgtctccgtcactccgcgaaggcgggtcccggcggccccccaatcagctgactcccgcctcccccggcctgcgcgccctcctcccgttcccgccctcgc

SEQ ID NO: 678889 - DNA, 121 bp, Homo sapiens
gggggggggggggagcccccccgcgggggcggggggggggtttttcctttcccccccccctttttcccctttttttttttaaataaaaaagggggtggggggggttccggtttttccttta

SEQ ID NO: 678890 - DNA, 902 bp, Homo sapiens
gagacgcgtcgttgggttttgtgatgtgccgttgacagacagccgtatttgatggtattggacctgctgcgtgtgcgagtaacgtttgtcgaggtagcccggtcattagaaggaggctccgttctgttgactgatggtgtcgcatgagtttcaaggactggaaccgctattgacctggttctactagtacccggtgctgcggctgtggcctatgtgcgtgccgggacgatcatcctggggacctggttacatggtagtaagacctattgatgggcaattttgctgacgtgtggaagtgactcatccatactccatggccagtctgtcaacattcagttatgaagtcatcggtatgttactatgtcgtctgagagaatggctgagtaatgcctgtgttctttgttgcctgtcatctgtatctacatgtcttataatcagttcaatgctggttcatggagcaactttgcttatcaagatgggttggcgtgattccatgcttctgttaccgactttaatgacttgcgtcctcagttgccgtggttgcctattagttctctcacctatttgccaagaatcgaggaatatctggatcaactacctgattttgcctacgaaagatgacctcctggtcttgtgactccagattgcctcctgtgcattgttcttgtgtactgtgcgttatcatcattcataaggctgtatctaattaactgtgtttggaactggtataagttacatcaacaaccgaaaggtgcgggagaactggtgtgtacccttgcctttgacaccacctcctcagtacgtttggccagctatgcaatgggcgggaaatgcctgaagcacaaccaccactccttaactttacatgccggacgaaatttgccttgaacataacctatacg

SEQ ID NO: 678891 - DNA, 924 bp, Homo sapiens
ctatcatagaagagcttatcacctttcatgatcacgccctcataatcattttccttatctgcttgctagctcctgtatgcccttttcctaacactcacaacaaaactaactgaatactaacatttcagacgctcaggcaaggatagaaaccgtctgaactatcctgcccgccatcatcctaggtcgctcatcgccctcccatccctacgcatcctttatcagtaacatgacgaggtcatactgatcgcctcccgttaccaatcgaaagatcaattggccatcgcaatggtatcttgaacctacgacgtacacccgatgtagcggcggactagatccttcaagttcccgtactatacttccccgccattattcgctagaaccatggcgaccttgctgactccgttgacgttgacgaattcgagtacgtactcccgattgaagcccccattcagtataataattacatcacagaggacgtcttgcactcatagagctgtccccacagttaggcttaaaaacaggatgcagagttgcccggacgtctagaaccaaaccactttcaccgttacacagagccgggggtatactacggtcaatgctctgaaatctgtggagcaaacccacagtttcatgccgcatcggtcctagaaattaaattccccctaatgaaatctttgaaaataggagccccgttagtttacccgttataagcactccccctcctagccccgattacaaacgtcatggccgagccccttaagcctagcctcgcagagcacatcacgtcagcccgtgggaaaaaagtgcgatgtttaaaggggggctcgggctaatagcctggttcttgaaccccacagctttgcgttttcggcacggccagaaacgggcgggcccccacaaagatgggcgggcaatcattcgaag

SEQ ID NO: 678892 - DNA, 405 bp, Homo sapiens
gcaagttgacatcgactaccagaaactgcatgatgccttgttcaagtggcagaccaagccaaagctcgaccatcccatgggggacctcgtgactcatgagggggaaggagttccgagacacgactctaaggagaagaagccaggagatgctgtgctcgatgagctaaggatttcctctgggggatgcccagtaggagcccagatgcccacaagggtcccctccccccatggctgattgccattcagccgatattgaccacccccatcgtatcccaacctgaaaatccctgggctgaactcgcccatccctgagagctgttcctttgggtaccatgctggtggctggggcaaaactccagtggatgagactgggaaaaccctctatggggagggtttggaaccaat

SEQ ID NO: 678893 - DNA, 383 bp, Homo sapiens
  misc_feature (24)..(25): n is a, c, g, or t
  misc_feature (30)..(30): n is a, c, g, or t
  misc_feature (51)..(51): n is a, c, g, or t
  misc_feature (75)..(75): n is a, c, g, or t
  misc_feature (131)..(131): n is a, c, g, or t
  misc_feature (160)..(160): n is a, c, g, or t
  misc_feature (192)..(192): n is a, c, g, or t
  misc_feature (239)..(239): n is a, c, g, or t
  misc_feature (302)..(302): n is a, c, g, or t
  misc_feature (326)..(326): n is a, c, g, or t
  misc_feature (329)..(329): n is a, c, g, or t
  misc_feature (334)..(334): n is a, c, g, or t
  misc_feature (339)..(339): n is a, c, g, or t
  misc_feature (354)..(355): n is a, c, g, or t
  misc_feature (375)..(375): n is a, c, g, or t
gcacgagtttggtcaacaaccttnnttacntgcgcacggccaatcctatgngaactcagcatcccagctcatctnagcagatcctggaagtgatttctgcagctcaggattttttttttaagctacattgnaaatataggtttattttttgcttcaggcnttttcttttatatgtttttttctgcacaatgngtaggaggatttttcacttactcatatcgcggccagatttttaaagnccagctaaggcagcaacagctgtgcgggatttaaagcctatagctcagctgaaaaaaaaggtngggggcagggaaggggagataaanggngaggnagctnggagaagacaagcanncatcttatttgctatgtggnagggacct

SEQ ID NO: 678894 - DNA, 111 bp, Homo sapiens
gatcccccgacactatcgatacgcgagagaagagaagaccccgctatctagtaccaatcacctattactagattaaatcggagtcacctctgagagtaatatatatactat

SEQ ID NO: 678895 - DNA, 919 bp, Homo sapiens
  misc_feature (511)..(511): n is a, c, g, or t
atccaatctttttattggatagatgtatttaatctgtcgtgtatataatggtgtgtcgatccaagttatactgtgaataggaaaaaggatggtgttaaatttgtgtgtatgggtgggagatatattgcgtgacaggatataggagaaaagctgttgttggtaataatttttagcagcgtggccatgatggaaagggacgtctaagcgcttgttaaaagcagttgctgagatgggttaagaggtaacgtaaattgcatggccatgcggggatgtgatggggtcgagaagtttgaacagttgctggtggtggattctccatattatcatgtgattgatggtacataaagggatcgggtagtaaataattgtgtagaattgaagctaaaagattgtgcccacaagatacctggatgggcataatcagggtaccacttaaggggtcagtgctggcactgatctggagctagcaggaagtgggagaattctgctgcagaaagttccctcaatggtncagagatcctgaggagatctattggttttatactggtttttttatcgacataaatgtttggtcggcacaatatgtgttcgataagttaacgattttacagctgatgacaaaagtattaatgggcagtaactttttattaaaattggattggctgtacagtgcttttggttaaaatctgtgacatgtgggacatcctgtgaaagttaacctccacagggagacaacgagtaaagagggggacacagacacatgtgacccatcataagatttcttcgcggaaaatagttactgctgccataaccgttccttctcacacagagcgatgtgcaacaacaaaaacacacacagcagaccacaacacacacacagagaaaacaacacaaaagaaaacacagcagcagacacaga

SEQ ID NO: 678896 - DNA, 480 bp, Homo sapiens
atagatatgagttgtaggaaacatttcagtattcattacgtaggaagagttctctgcactgcatagtattaaagtctccagcgagaggggatttacacaatgccgtgtcgaaggacatagccatcgtggactggtaatagaaggggtatgagtggctccactgtccaaaatcagcccagtagaacgaccattagcaaatgctgtcaaaactgcagtttggcaaaggaagaaggcagggatgttgtagtgttcaaacattaactctgtcagtttctctctcttggctctagtattccacggtgcctctgacatgagaacaggatggagactggcttctgatttgacatgcatttggtaggtatgatccaaaatagctgggaaactatcccagtcttcaaccatcccattttttagaggtgaaatggcctccatattctccctcggaacacgcagagcattagtatctatgtagtaggtggg

SEQ ID NO: 678897 - DNA, 436 bp, Homo sapiens
ctctccctcccacataatttcaaaagatagactttgctgtgatatggcttattgtgatccagatgcagatacgacaccagtcaaataattactgaaagcaacatggcatacagtatgctttctaaacgttgagcattattttgttttgttaatattattaaagtgtatgtatcctgtatcttaacagaagaaagtgatcattgtaggttggaaatttgtaaaattccaaatgtagattggattaaattagtgagaaaatatctaccgaatatacacttcatatatatatagtatgtttactgtttcttttgtataacttccttcgggttacatagttcttttgcacagaacatgtatggcaatctacagactctctctactccctttctatctttattgagccataattgacaaataaaaaatgtgtacaattaaa

SEQ ID NO: 678898 - DNA, 129 bp, Homo sapiens
cactgacacgggggccaatgtccctccttccgccaaggttccgctgggcctctgctgccgaagaccccatggggctgtggagcctggtgccgggggagggggctgtcccttggggttcagctgctgtgt

SEQ ID NO: 678899 - DNA, 367 bp, Homo sapiens
cctggtcatttcagttgcaatgacagtatgctttcagagtggggagaatttaattaaagaaagacatctgggaaatgtactagtggtagaactagagcatgttcatcagattctgatggctctacgtaatgaattctgccaaaagattataatattttagggaaaggttgtgattggataagtcacatttatttattaactgttacccttaaaatatcacttttgtcttattattacgaatggttagaggacagcagggatgcctgacaccaaggccattacccatggattgtgtctatcagaaatcctggaagacgttgatctgccacactctgtgcgtggtgatggaacttgctaagacctgatg

SEQ ID NO: 678900 - DNA, 608 bp, Homo sapiens
cgaacgttcaaggccaggctgggcaatagactctagcaagcccctgtctctacaaagaacatagagattcactgagcatggcggcatgcacctgcagtcccagctgctcgtgggcttacggtcagaggatcactcaagcccatgagctcagggctgcagcgatctatcagagcgtcactgcacttcagtatggacaacatgacaagaccctgactcttagagtacttgtagccagccgatggaacacttgcaattcagtcaccaatgagcatttggccctggctacgtgccaggcagaggtcatggtgcttgtgatacgacagccatcaatccagacaacgactccctgccgaagtgcagctgacattggaatgagagagtgcatacccgcgaagatattgacctgattcagggcggtccagcatagaatcaatgggagccatcgttagagccgatagtctgaatgaagtctgatgaagcctcactgagagactagcacttgggccccgacacgttggagagagaagcaagctaacacctatggtgagcctggcagggaccagctgaggaacatgcttcgccttcaagcttaagtgcacacccatctt

SEQ ID NO: 678901 - DNA, 166 bp, Homo sapiens
ctgtgaggaggaatgaagcggctattacacccagcccagtgacagcttaagccttaacatgcgtgcatcttacaatgaccataaacaatgtagcgaccaagtcagggctggccatcattattttgcgcacagaatgccatgttttcccctggccaacataacgaaa

SEQ ID NO: 678902 - DNA, 743 bp, Homo sapiens
  misc_feature (78)..(78): n is a, c, g, or t
ccgtcccaaagcgaaagccaagtgcacccaagaaggagcaggatcggcagaccaggctgtatgaaacatggcagcacntgatgagaggagcgctttattcggtcagggattatttcaaggatggtggcgacggagacaagattccggaaaccttccaggcaacagtcgattctcgtacccgcggactgaacaattacagcactaagttctggcgccagcaaccttgaaatccttcgtttatccggaggagtgaaggtgggatagcggcactcaggcgccgcccgtgccaaacttccagaccgggatgccaagcttcttcgccttgtcggccagattgtcctggatgccggtgcccgggaagtgcaagaccccgatcggcaaggcctccagcatcgcatcgttacgcttgaacggcgcggctttgttgtgcttcgtccaatcgggcttgaaggcgatttgcggcactttgcggttgtcagcccatttggccgcgatcagctcggcgcctttgggcgatccgccgtgcagcagcaccatgtccgagtgcttggcgtggacctgatcaagcttggcccagatcagccggtggtcgttgaagtcgagcccaccggtcagcgccaccttcgggcccgccggcaggagaacttggttatgcgcgcgcttcttcgcggccaggaaatcgcgactgtcgatcatcgcagaggtcagattgcggtggtgagcttggacccgttgcgcggccg

SEQ ID NO: 678903 - DNA, 170 bp, Homo sapiens
atagagtcgagctgcgtaccctagaatatcatagtggcgagcaacaacttaatatgactagcttaacaatagtttttatagtaaagatacctcttctagagagaccacttatgactccctaaagcccatgtcggagcccatgtgtaggagcctcaggagcctcaggtgta

SEQ ID NO: 678904 - DNA, 112 bp, Homo sapiens
  misc_feature (112)..(112): n is a, c, g, or t
gctgacagcaattcgggccgagaatgtctcgcttccgtggcctaaagctgtgctcggcgcttactctctcttcctggcctcgtaggcatatccacgcgtcactccgaaaggn

SEQ ID NO: 678905 - DNA, 353 bp, Homo sapiens
cctgtctgtcaagaaatgcttcgaatcttctggttcctcagaatagtcacagccctggactactcaagcacacgagtataatggtcaatctgttcaatcttatgtcttgtttcactctcaggctatggaaaaaatacatgcttagtatactcatcacatactgcactgtgacatctgtggtgctggtctataattgtcacttaatttttcatttgtttatgtatgtattagcttatttaaaaagacaccacatgtcatggtactttctttttttttttttggaacctgatttgggctcttttacccaaggcaaaagggcggaaaaaaaacccgggaactctctaaagtcaacc

SEQ ID NO: 678906 - DNA, 312 bp, Homo sapiens
  misc_feature (110)..(110): n is a, c, g, or t
  misc_feature (122)..(122): n is a, c, g, or t
  misc_feature (175)..(175): n is a, c, g, or t
cgactttttttttttgaaaaacagatgcttttatttattgtattggaaacaacttaataatttgcatctctacatattcaaagcagctttctatatgtagagatgcaaantattaagttgtntccaatacatatagaaagctgctttgaataactgggaaaacaactattgcatnggaaaacatatgcaaactagcatcattgtctctagactaggttcttcttattgatctcacgtcatcacaaagcagcaacagcagcttcattgcaggactttactgtttctccattttctagaagctgctggtcgagc

SEQ ID NO: 678907 - DNA, 261 bp, Homo sapiens
  misc_feature (112)..(112): n is a, c, g, or t
cgactttttttttttgaaaaacagatgcttttatttattgtattggaaacaacttaataatttgcatctctacatatctgctttgaataactgggaaaacaactattgcatnggaaaacatatgcaaactagcatcattgtctctagactaggttcttcttattgatctcacgtcatcacaaagcagcaacagcagctctagaatgagaacgtagctgatcgagctatatagtgacatacatcgtatctgcactctactca

SEQ ID NO: 678908 - DNA, 1064 bp, Homo sapiens
atggctggatcgggcctggtttaattggacgagggcaggctggcaggcctcggggcggcttacttcattggcggccgggatgagactatcgagcgcagcggctgcagcctggtgtgggcacagcggaggggcactctccgagcgctgcggccggagtgactggggcgcggtgcaccgcacaccccctgcggcccgctgccggtccgagcgggcgtgctgtctggcccaggattacccttgccccggggcagcgtgatcggaagtgcttgcgagaggccgtgacggcagtgtgaggagcataggaaagcacacgcagggttattggccacgtgacttgtggttgacggcacttcaggaatttctgggcaagaatgaagcattaccggtgtgctcaactttaacagcaatgggggcacaaaggtgggttactgagatgggtttcgcataaaaaagagggccttccgtttaattgttgtgggaattgttagcacgagttgcagttgaggggaaacgtgggtatggggggagttaccacagtgtttgtggggcgcagaaataagtgtttgggggtccacgggaagaaggtgtgcttgcaagaagaatggggctaaaggagaaatgacgggagtaagtggaagaatttctttagcgggagagaaatttaagtttgaattaagtttaatagcgaggaacagagggttggtatttatgaaagcgcagtggagaatattatttagaaatgggaggctaaaatatgaagaggttttataccaacgttggtatcacaggtggtagaaagtggcacagagcctataaagcggcacgatacagtgaacaagcaaaattagatcatagtcgacagaagagttgttgggaacgaaaatatacggaacggggggcagttgagaataatgaatttttcggcacaaaattggcctttgacactgtggtttaacggtggtaacagaattgtgtgcatgcaggaacatgtttaaaaagagggtggcgcacaatagtagcgggagaagttgtataagcccaatggtaagaaagaaagtaggtaa

SEQ ID NO: 678909 - DNA, 992 bp, Homo sapiens
  misc_feature (110)..(110): n is a, c, g, or t
  misc_feature (122)..(122): n is a, c, g, or t
  misc_feature (175)..(175): n is a, c, g, or t
  misc_feature (266)..(266): n is a, c, g, or t
  misc_feature (273)..(273): n is a, c, g, or t
  misc_feature (279)..(279): n is a, c, g, or t
  misc_feature (281)..(281): n is a, c, g, or t
  misc_feature (297)..(297): n is a, c, g, or t
  misc_feature (301)..(301): n is a, c, g, or t
  misc_feature (308)..(308): n is a, c, g, or t
  misc_feature (310)..(310): n is a, c, g, or t
  misc_feature (330)..(330): n is a, c, g, or t
  misc_feature (342)..(342): n is a, c, g, or t
  misc_feature (344)..(344): n is a, c, g, or t
  misc_feature (347)..(347): n is a, c, g, or t
  misc_feature (351)..(351): n is a, c, g, or t
  misc_feature (358)..(359): n is a, c, g, or t
  misc_feature (378)..(378): n is a, c, g, or t
  misc_feature (381)..(382): n is a, c, g, or t
  misc_feature (384)..(384): n is a, c, g, or t
  misc_feature (392)..(392): n is a, c, g, or t
  misc_feature (404)..(404): n is a, c, g, or t
  misc_feature (406)..(407): n is a, c, g, or t
  misc_feature (409)..(409): n is a, c, g, or t
  misc_feature (412)..(412): n is a, c, g, or t
  misc_feature (415)..(415): n is a, c, g, or t
  misc_feature (417)..(418): n is a, c, g, or t
  misc_feature (421)..(421): n is a, c, g, or t
  misc_feature (423)..(423): n is a, c, g, or t
  misc_feature (426)..(426): n is a, c, g, or t
  misc_feature (429)..(430): n is a, c, g, or t
  misc_feature (432)..(433): n is a, c, g, or t
  misc_feature (445)..(445): n is a, c, g, or t
  misc_feature (449)..(449): n is a, c, g, or t
  misc_feature (459)..(459): n is a, c, g, or t
  misc_feature (486)..(486): n is a, c, g, or t
  misc_feature (500)..(500): n is a, c, g, or t
  misc_feature (784)..(784): n is a, c, g, or t
  misc_feature (868)..(868): n is a, c, g, or t
  misc_feature (871)..(871): n is a, c, g, or t
  misc_feature (988)..(988): n is a, c, g, or t
cgactttttttttttgaaaaacagatgcttttatttattgtattggaaacaacttaataatttgcatctctacatattcaaagcagctttctatatgtagagatgcaaantattaagttgtntccaatacatatagaaagctgctttgaataactgggaaaacaactattgcatnggaaaacatatgcaaactagcatcattgtctctagactaggttcttcttattgatctcacgtcatcacaaagcagcaacagcagcatctanaaaaaanagaaanantaaagtcctgcaatgnagcnataattnangctgaaccatacattccgcnaatcctgccacncnccnacantcctttnnctgcctatacaatcctgcntcnnanagggtggncacctagcgaancnntnttnttntnntgntnaanttnntnncaaataaatganagancttaacagancacacagcattaaaagggctagggagngctaggtcttaatncccagtacaataaagccaagagttttctaatgctgaccagtctgaagactgaaattaaatatcagttctttttacttctctaggagtgattctagctcctcttgcaaagagctgagttgctccttttctcggtcttccttttgtttgagcccatccagtacagcctgaaatctgttcttgagagccagattttccactttcatgatgagatcctcttgtcgttttgccctgtcctgggtctcttggagcttgcctttcatgttgtcaatctgcttctgaattcncataaccagctgattggttccttcattttcctggtgctgttcatctgattcatttagcttgtcctgtagctgtctctccagatnttnctccgtgtcaatgatgtttatatcttcttcatcttgatgctgggtctcatcttcatcctcactgctgctgctgaggtcattgaatatctcccgaagctcatcatgttctaatgagtnatgg

SEQ ID NO: 678910 - DNA, 263 bp, Homo sapiens
acatcaagcacatggcaggtgtacctctgcttctgtccagaaggcaccacctctgtcgcccacttatggaaggttccatcccctgcgggcctggtctacacgagctccgtgtcctgcctctggtcctccccatcccgctgccaggtcagtgtgatctccgcagggtagaagctcatggcccagcacctcaaggtggctttatggtcagagacaccgcggtgagtcatatgcgttttgggggcgtccgtgcgctgcagcgtcta

SEQ ID NO: 678911 - DNA, 194 bp, Homo sapiens
atgagcctcttccctatctacccttcctcttctccctcttccaccattccccgttatctaattacaggatgtctagctccacggggtgtactacattatggttactacccacgaggacactgccctctctagataactaacacaaggacattcatcgaaaggagactagatttagctacaagcttttaaggaaa

SEQ ID NO: 678912 - DNA, 928 bp, Homo sapiens
  misc_feature (27)..(27): n is a, c, g, or t
  misc_feature (61)..(62): n is a, c, g, or t
  misc_feature (64)..(64): n is a, c, g, or t
  misc_feature (66)..(67): n is a, c, g, or t
taacacagtatttttctcaaatgaacntgttttttgcagattcttcttttttgaaagaacnncngnnaaacatccacaactctgtaaagctggtgggacctaatgtcaccttaattctgacttgaactggaagcattttaagaaatcttgttgcttttctaacaaattcccgcgtattttgcctttgctgctactttttctagttagatttcaaacttgcctgtggacttaataatgcaagttgcgattaattatttctggagtcatgggaacacacagcacagagggtaggggggccctctaggtgctgaatctacacatctgtggggtctcctgggttcagcggctgttgattcaaggtcaacattgaccattggaggagtggtttaagagtgccaggcgaagggcaaactgtagatcgatctttatgctgttattacgggagaagtgacatactttatatatgtttatattagcaaggtctgtttttaataccatatactttatatttctatacatttatatttctaataatacagttatcactgatatatgtagacacttttagaatttattaaatccttgaccttgtgcattatagcattccattagcaagagttgtaccccctccccagtcttcgccttcctctttttaagctgttttatgaaaaagacctagaagttcttgattcatttttaccattctttccataggtagaagagaaagttgattggttggttgtttttcaattatgccattaaactaaacatttctgttaaattaccctatcctttgttctctactgttttctttgtaatgtatgactacgagagtgatactttgctgaaaagtctttcccctattgtttatctattgtcagtattttatgttgaatatgtaaagaacattaaagtcctaaaacatcta

SEQ ID NO: 678913 - DNA, 964 bp, Homo sapiens
  misc_feature (27)..(27): n is a, c, g, or t
  misc_feature (61)..(62): n is a, c, g, or t
  misc_feature (64)..(64): n is a, c, g, or t
  misc_feature (66)..(67): n is a, c, g, or t
  misc_feature (614)..(614): n is a, c, g, or t
  misc_feature (617)..(617): n is a, c, g, or t
taacacagtatttttctcaaatgaacntgttttttgcagattcttcttttttgaaagaacnncngnnaaacatccacaactctgtaaagctggtgggacctaatgtcaccttaattctgacttgaactggaagcattttaagaaatcttgttgcttttctaacaaattcccgcgtattttgcctttgctgctactttttctagttagatttcaaacttgcctgtggacttaataatgcaagttgcgattaattatttctggagtcatgggaacacacagcacagagggtaggggggccctctaggtgctgaatctacacatctgtggggtctcctgggttcagcggctgttgattcaaggtcaacattgaccattggaggagtggtttaagagtgccaggcgaagggcaaactgtagatcgatctttatgctgttattacgggagaagtgacatactttatatatgtttatattagcaaggtctgtttttaataccatatactttatatttctatacatttatatttctaataatacagttatcactgatatatgtagacacttttagaatttattaaatccttgacccgcccgtcctgtgtggtgggcggcgnaanttatttattgtgcattatagcattccattagcaagagttgtaccccctccccagtcttcgccttcctctttttaagctgttttatgaaaaagacctagaagttcttgattcatttttaccattctttccataggtagaagagaaagttgattggttggttgtttttcaattatgccattaaactaaacatttctgttaaattaccctatcctttgttctctactgttttctttgtaatgtatgactacgagagtgatactttgctgaaaagtctttcccctattgtttatctattgtcagtattttatgttgaatatgtaaagaacattaaagtcctaaaacatcta

SEQ ID NO: 678914 - DNA, 440 bp, Homo sapiens
gcagataaatatttagtattcattgtatctcatccttcctgtctactcaaaacccagctcacacctattgtgaagcacttccgtggtgaactggtaaagagtatctcttcctttacaggcctatagcagtgtttgttggaaacatttgtaatactttttatcaattgatataatgaacaggtatttcaatattagaatgctgcttatcagaagtttataaaagtgtcttacaaggccagaagtggtggctcacgcctgcaatcccagcaccttgggaggccaaggcgggtggatcacttgaggtcaggagttcgagactggcctggccaacatggtgaaaacctgtctctactaaaaacacaaaactagacgggcgtggtgttgcgtgcctgtaatcccagctactcgggaggccgagacaggagaatcgtctgaacccg

SEQ ID NO: 678915 - DNA, 288 bp, Homo sapiens
aaaaaaaaaaagttcccaatgtcctgggtaaaggttggttttccaggggccccctaagttgttttgccttttaattccggggattccttgggcccataggttcccttttcgttccctttttgttttggttcctctgttaacccgggggggcctaatttctgcccctttgttaaaaccccttttccccaagacccctgaattcccgttccaactggttgttgttgggtaataagggctgttttttctgcccccaaagggctttcccattttggggggtggttttcttta

SEQ ID NO: 678916 - DNA, 1058 bp, Homo sapiens
tgggcatcggcgtcttccccctaccccctctcgcccctataagctcgctccctccgtccctctcggactcggactcggtgccggtgcgcgactgagctggcgcctctagccgactttgccaagagggcgcctcctgcccgatccgcgctgaccctgcgcgggacgcagcccaggcggtgccatagccgaggcgggagacccgagctgagtcagagctcgcccggagcaggtctgtgctggatgcactggaggaacaaggaggccatccagatcccatcttctgcctaatcccccacttggaagaccctccagagaccccagcttcagaaggcaacatggcggacaagctgaaggaccccagacaacccagaggcttccatgaaggacggccgtgaagatcagaaaacacgtaccccagatctcccagactgagagtgcagatgatcggtcaaggagcaaaaatcaatgacgatacacacccggaatgaccagcggaacacatacaagagacacagcgtacaatccaccaggcaacaacgtccattcaagacgaccaacctgacaaggaacagaatgcaatgtctccagtgtacgactactggcaaaatgagctaaacaccaagacagaccagacgccagcccaaccaaagcaataaggccagaaagtcaacagccctgaagcgtctaccacagcacgaaagtcgggagacactgagcggaagagacagcaacagataccagagagaccacacaacaagctgcagcgaaaagacatccaaacaaaacaccaaacgcgtaacaaccaaccgaagaccgaaaacacctagaatagaacaggtaatccccgagcacgaagaaaccagcaaccaaccaccaggaacacaaaggcacataaaaagagaaaacaagaaaaacagaaaacacaacacagatccacagaataaaaaaccaacaaaacacgaaacccgcaaacacaaggacacaagcagcaccaacaacacgaaaagaaaaccacaagacaaaccagagacacacccacaacagaaaagaaagagaaa

SEQ ID NO: 678917 - DNA, 299 bp, Homo sapiens
cacctcagtaatgagtattttggcctcacgggagcgacatatgcctatgaaggctgtagctatagttcgaaaagcaggaggataatgccgatgttgcaggttcctgattagagaaatgatccgtacatatagtgcctcgccccgatgtgtacgaagaggcagatacagaatattgagtgcgccagttgtgcgtgaaggttgcggatgagtctcaggccacttactttacgtctcgcagtgatgctgggcggatggagtgacacaaggctgggtgatgggcggtctgggggagtagttgc

SEQ ID NO: 678918 - DNA, 1074 bp, Homo sapiens
  misc_feature (216)..(216): n is a, c, g, or t
  misc_feature (499)..(499): n is a, c, g, or t
  misc_feature (956)..(956): n is a, c, g, or t
gccgcgtgcgccccgggagcacagagcctcgtcctttgccgatccgccgcccgtccacacccgccgtcagctcaccatggatgatgatatcgccgcgactcggatcgtcggacatactggcttccgggcaatgtgctaaggtccgggcgttcgccggggcggacggatgccctcctcgggccagtcgttcgcccgtccatcagttggggcggcccncaggctgcctaggggcgtgatcggtgggcgatgggtcaggaaggtattccgtactgtgggcgactgaaggcccagatgcaaggagaggcattcgcttcagcccttgaagtacgcccatcggacgctacggctatctgtctagcgcaaagcgtggagacgatcgatggacgatacaattcgtggtcactctacacccaattctaacgaactgtacgctgctgctgtgtgctcccggatggaggtcaccaccgatacttgcttgatcgcgagggccgctcgcgcntgaagcccccaaaaggggctaactcggcagagtacagtatgacgcgcgagaatcattggtctgaagagcgtttcgaagcacgccgcagccaatgttacccgtcttggctatcgcaggactgctgctgaagtccccttggtaacgcacttcctgggcctggtgaccacgtgagcaatgcggtgaattgggcactgccggttgaacgggggatctacccgaaaagctggtggcgccaatctgaccgtagggggttagtgtccctcccgctcatgaccagtccttgcggtctggggagcctgcgacgtggctcgggacggctgtaactggactacgctcattgaacgatcctcagcgcgaagcggcggttacgaagcgttctaccatcaacggccagaagcgcggtagaaatccgtgacgttgacatttaaagggacgaaagcttggttggctagcgtcnggcctggggaagttgcgaagcaaggagactggcccaccgggccttgctttgcgaagttccttcccctgggaggaaagagcgtagcgaaggctgccctgtgcgggccaagggttccact

SEQ ID NO: 678919 - DNA, 326 bp, Homo sapiens
tttttggtttttttggttttggttttttttttttcacgccagaatctaacacagtgggaatgtttgacatcttgaatgcagagggctcctaattgagtttttagctactatggagccagacagcagccctgaactgcaggagaaagcagggttactgaagaaaacccttgaaaatttggaataaattagaaggggaagaaacaaacaagtcccatgttcattgggggttgaagtgggggtgttttttgaaaaaccaagtgggaaaaagtaaagattaatttgtagcatgcatcattccttggctgaaataaaaagaaaaaccctta

SEQ ID NO: 678920 - DNA, 132 bp, Homo sapiens
ggcatattattatgaatattttcatttatacttactgaaaacaaacagaaaaacttatatttaaacatcttgattgaaaataatttggattgatagttctgctaaattccaacatcgtacgcgatgggttgt

SEQ ID NO: 678921 - DNA, 230 bp, Homo sapiens
tgtgttgcacggcaggcccagggctgagcggtgatgggcatacaggtcataagtgcactgtgggccctctccggaccagaccctgggacgcagtgcctcgtgggaccggcgcccgcaggccggagccccgtgcaggctccttgcctgcgcaatgtccgcggggccgcccatcccgtggcctgcttcggcctcgctggggacgtccttggctgcaatctctcgccgagcac

SEQ ID NO: 678922 - DNA, 470 bp, Homo sapiens
tggaaacagagttcttgctcctgtcgcccaggctggagttgcaggggccacaattctcggctcactgtaagctctgcctcacgaggttcaccccattctccgtgcctcagcctcctgagttagctggaactacaggcgcccgccaccacagctgtggctataattttttggatatttttaacgataaaaacagaggttttcaccatgtgtttacgccaggagtggctcgtggatctcctcctgtgaccctcgtgtgactccacctgtgcctgttggcccctcccaaaaggtgcgtggaaataacatgtgcgtgtgacgccaccgaaccccgggcctctcccccttaacttataatttttataaacacccaatttcctcttctcctccagctttcacaacgtggactgaacatttgcctcaacgtgcctcaacaacatttaccttaattgtcaaacgtgaaaaaaaaaaag

SEQ ID NO: 678923 - DNA, 207 bp, Homo sapiens
atccccaacatcatagccaccatcaccctcctctcagctctacttctaccatacgcgctattctactccaccatcaatcacactactcaccatatataacaacgtaaaaataagatgacagtttgaacatacaaaccccagcccattccaccccacacacatcgccctaaccacgcacctcgcacgcccccagcgggggatcctctc

SEQ ID NO: 678924 - DNA, 1480 bp, Homo sapiens
  misc_feature (733)..(733): n is a, c, g, or t
cggaacgcgtgtgtgcatgaaatagtcgtcttaatagttagcgacattgggtacctacagcgtaggcactctgatcgggttatggtgcagcaacatacacaggcttattgcagtcacatatataggcatgctggcactcttcttcaatggcaggttgacatgggcacagcttcagatggttcgtcctcagtgtgccatctaaacacgtgagtaatccagaagctgacatgcgcatagtacactggacaatcgcatacatctagacaggcaattttcaactgtcaaacattgattagagtgatagcgtgtgagcatagatatgttagtaaaccttgtgtatactaagtattaaggtagattgcgacatatggttaacaactagatattatagaagagataagtatatcatacatgtgttaagtcaactagacatattcgatatctgtgcatatacaccaccaaacaattacgtgtacatacgcccccaatgtactacgtatggtggaccgcactggcaccgtgggttacatgactgtttcagggttagtgagacttcctataactgtgcaccccgaaacgtggagcggtatagacctccgttgtagtgaggcagatttacaaataccctcatacaacgcttcctgtatactgtaatgcccttatgtcgccacctaaatataccatcgtaggagcatttgggaggagatcggaccctgggcgcattatcggtacncaaattgttttgcgcacaaagttcacacaagtggccattccccctgtacccacagaggtggtcacattccacgaatatagggcatcgccgcaccacactacggtaacgaaacctgcaatggactggatctatctggacctcaggatactccactgaagacaccatgagtttaatcactcccgggcgaatgagcaaaacaatcgacctcccattagtggaaacaggccacgtggagccaccaagacgaatcgtaggaccaagggggggaaacaacacacaccacagtaaatgcaaagggaacgggacccaccacatggcgggacgggaccgtttcatacggcacatcccaccccgtagaaaaagacgatatcgaagaagggaacaccctatgggactgcaaacagacccacgagggataaaacaacaccgcgcagttaataccctgcgcacaaattcatggcgggcgaacagccgtccccccggcagaatgccgggacaccacaacatcagacaacggcaccgggacagacaacggccctaaccgccgaacgcggagcatcaaacagagccactagggagcacacagaaaatcagccgacaacatcccaacaaagcgcaaattaccggcgccacgccattaacaagaacacatgagcaggagcgcacccacacgacaaaggtgagagcagaaacctcgcagcacgaccccaagcactagtgtaccagcaagaccccattgggggacca

SEQ ID NO: 678925 - DNA, 1148 bp, Homo sapiens
agattacgcatacgataggatacgaggacgcggatagagtgtaatgaagataacactgagtcacgatgaccgttgtacaaaatgctatctcctgtgatcatatgtcgtgatgttggtattgcgaattctgcatgcaggatagtgctgagagtctgggtcctgaacacccgatctggttacagtgacacaggagtcgacaagatgcgtcgtactgttgactcgatctgtgacctggtgatctcatgtgtcacgatggcaagtccgccgtcatagagctaatagaactagttctaccgagacacaatcagagacacatgatattcctgcagacacacgagaagacactgatactgaccattggcaggccgtaccacggtgagggacaggacacaggagttactagattaagtcaccaaggatgactacattgttgggcaccttcgaggcactggtgacccttatttaagatacgcctagggagtgatccttgtgagaagccatctccgaattcttcaggaggacgttggaacgcgagaaacaacattctgatcacggccaagtccgacgttattacacccggcattcatgccgtcccaaaacttcatcccacaggcgcttaccccggactcctttcgatcgtccacacaagaaatcaaacccggctaacccaccagcggtatgtccacacacacagatgggaaatggcttaattcacacacacacggaaagatccacagagcaacacatgtacagttctcccatgtgggaccagtaaacagcaataaaaccgactagcacgccgagctgaaaaacacgcacacaagaagattggggcaacaaacgtgtgaagccattagtagcgtccactcaaaaatacaactgatactacacacgagtacaaatgaaccacggcagtgaatgtacaggaagcacaagtcacaactggcccgtagcggacagcacaaattcatagcataagaatacaagcccccttttgtgaaactgcctatatgtgaactaactaactcccattggagacagtgagatacttgacaagcttacccggaaccctaccgcacagaactagcgtccacgagacaaagtagctcccaaaacacttctcactcgcaccaccacacgactaccaa

SEQ ID NO: 678926 - DNA, 430 bp, Homo sapiens
atctagagtatccccctggcatccacgcatggcggagctttgctcttgttagcccaagctggatctgcagtggatgcaatttcggctcactgtcaacctccacctcccaggttcaagcgattctcctgcctcaggctcccgagtggctggaattacaggcacctgccaccatgcccagctaatttttgtatttttggtagagacggggtttcaccatcttggccaccctggtcttgaactcctgatctcgtgatccacccgcctcagcctcccaaaatgctgggattacaggcgtgagccactgtgcctggccaattagaaaagtgccttttttttttttttttggacataattttccgctcttttgccccttccttgtttggccgggggtccggggctcaatttcgttttcttggtcgtggttgtaccc

SEQ ID NO: 678927 - DNA, 227 bp, Homo sapiens
  misc_feature (162)..(162): n is a, c, g, or t
  misc_feature (181)..(181): n is a, c, g, or t
  misc_feature (198)..(198): n is a, c, g, or t
  misc_feature (211)..(211): n is a, c, g, or t
tgtaagcagcatgaagttgggtcgtaaggtaagtgtcattccagcaagtctcacctctccttctctatgccatggtcttccattagggatgtatttgttgtgggttctagtctactttttcgtgtcctccactcagcaacacttacacacataaacggttcntcgtgggggcagaacacantcctggtggtgtcttanataacgttttccnattaaaagtgaccacg

SEQ ID NO: 678928 - DNA, 387 bp, Homo sapiens
acatctcttgggggccaaaatttactccccctgcttgacaggtactcctgcttacacgaagtccaaggaaaacctaccctgtaacagacacagattcccctacaaccacaactcaaatcctcagtcattacccaaatcccaactctttccacaaaccactgctttgtgcacagttattccagtatcatattggcaaattcacatgtgccaccgtgtcagcttcattgtaactcagcacaaaaacaacaagcttggcaattccattccttcaaccattcccaacaatggtgttccataccatcttttcccacattcatttttgtcaccattccagctcaatcactcctccatcctgttcaacttgctaacccattcagcatttgtcac

SEQ ID NO: 678929 - DNA, 165 bp, Homo sapiens
cccagtagatccgaatgtgactagtgtcttagtccgttttcacactggtagataaaaacatatcccgagcatggtcaatttacaacaggaaagtggtttcactggagaactcacagttgccatgttgcttggggaagcctcacaaacatacaggaagggtctgca

SEQ ID NO: 678930 - DNA, 977 bp, Homo sapiens
ggcgacagatggagctaggagaggagaacggggccgcggggtgcggccgactcgggcccgatggaggaggaggaggccgctcggaagacgagaacggtgacgatcagggtttccaggaatggggaagatgagctcgtgggacgaagaggaaggcgcggggcgacgagaactgggcacggtgggatgcaggcagcctcaacctgcccggctgacgcagcgatgcaacagccccaacagcagctgctggtggccgccaaggagggccgctgggtaagagcatgcgtgccccacctcgctgttctgctggtgactgtgtggcgcctgcccaggggctgagttgcagggccagcaagcagtgctgggagtgggacggcaaaaacagaacagaaaaggcggagatagagcaaagagggggttgttaaaaaagaccacgaggaaggatcaatggccgtggcatatttatctgacgtacactttgaaggcacgaaaccagaggttacttagccaatgaatgacccaaaattcgttccctcaggacaagccttgtttgaagcacagcagcgactggaaccaaccttccgggactggatcaccacgcagggcttggtgtcgtactgagtaactttcattaaatttgctggaatcctaaccaatttttttaaaacataattcacaagagaatccggtctaccagatgcctatctttccccccttttaccacatgggcagcaggcatttgcgcactttattcaccttttggagggacctgggaagcgaaaaggaggcccaattccttattgggttggttgttcagacacagcggcacacaagacggatgactttcaggacggacttgtgaagcggtatacacgagcagagaagaatcccgagaggctaaagggacacattgtgacacatacccagaaaaacgtgactacttggacacaatcaccaatggcacaacatacgcaacatag

SEQ ID NO: 678931 - DNA, 778 bp, Homo sapiens
ggcagggtcttctccacatccccagtccaacagacacgccgttagactttgaggacgttccatggtatctcctcagtgtgttcagttgactcacgtcacgccagcacatcgagagtcccgattcatgccgttccgcatcttcagaatgtgcatgatgacggaaccttgcacagagaagatctgagccgggtggtgatctgactcacgggagagggcttaggtacacatcggatttcttgcagtctgcaagatgaagcggctcagtcgagaacatcctggaggtaggtctgacgatgcgacagggtagtggaacgcatcgaagcctcatctcgagcttccaggcgagagtgcgtcgtcccgtttctgcgccagaacgttattgaccatggttcgctttataggattggtgccttggtgacaaggctagggcccagacgatgtggttccgtggacatcccactgtacgcagcaagaatctgtatgctaacttgcctgcagcctggaggagagcggaaggtcaaggcctgttgttgaccagctggcgggtccaagaatgggcccagctgctgggagtctggctgctttgtgctaggcctcaaccctcagggccaggggccgggaccctcgtagcacaaggggccctcttccgtctacgtggggattggtgatgtgctccgtgttggatgtcctgtgacgtaatccagtcaagtagagaggttggagcaaagttggacccgtatgtggtgacagtgagatacactgggtatgagagcaaagg

SEQ ID NO: 678932 - DNA, 168 bp, Homo sapiens
aggggccacgctctgaaggtccggtcaatggacctcctggaaggcaaggagggaccagaatttggacagtcctctaaggccattcggcttttgaatgttgaccggagagtgccagagacatctgtctgtagcttggttcctccacctccaaagagtgacagactggag

SEQ ID NO: 678933 - DNA, 158 bp, Homo sapiens
tggctgctgtgtccacaaacacctgaatgaccaccccaagaagctgaatgctttagcaactgaggcaaagaggcttgggacctcaagacaagatgttctgtacaaagctgggaccagaatactctcatcaaggtttgcttgcaatagcatgagctcat

SEQ ID NO: 678934 - DNA, 973 bp, Homo sapiens
ttttttaaccaaatcaacaacaacctatttagctgttcccccaacctttcgctccgatccccctaacaaccgcccctcgctaatagctaactagctgactcctagcccctcacaatcatggcaagccaacgccacttatccagtgaacccactatcacgaaaaaaacgctaactctctatactaatctccctacaaatctccttacttataacatgcacagccacagaactaatcatatgtatatatcttcttcgaaaccacaacttataacgccacaccttggctagttacagtacacccgatgaggcaagtcagccagaacggctgaacgcaggcacataccttcctatgctacaccctagtaggctcccttccccataatcatcgcactaaatttacgaactcagcaacacccctacggctcactaaagacgattgcgtaatacatcaagtcatacaactgccgccaaggaactatcaaactccctgagaacaaacgacttaagatatgaagtagctgaacaaatagcctgtgactaggtaagaggatacctcttttacggggactccaggttgatggatccctaacaggcccatgtggaaagcccccaatcgtgggatcccattaagtagttgagcggcactaactgtttaatagttaggcggctaatggtatgagaaagcgtaacttcattttccaagcgcccaggaacaaaagtcgatagcatagccctttcgtggtaaatgtgccgaagagcggaaagacgtaaaacacagagcaatcctgcgtagaataagagacctaaagagagacatggcatacagtagcgaccacattacactcgaggaacagaatttccacagagcctgaggccaccggcagactttattaatgccgaatacccacagcagtggcaggcgacaacgagcgccaggcggataccaagggaaatatccacaatgaacaaccgc

SEQ ID NO: 678935 - DNA, 112 bp, Homo sapiens
tacaagaagaagtatattggtatcgaatgatgtcactcacgtccagcaaagccaaagagctgaattgacctggcacctgggacttcccagacgtgatctcagtgagcggtgg

SEQ ID NO: 678936 - DNA, 163 bp, Homo sapiens
ctcgtggtaccgatcgaaatggggtttctggacttcgtgacggagcgccgccaggccgaaggcccggatgctctgcttttttcagagctgcgctttgacgagaaacacctctactcgcgtgctgcgagccgcttcttctgtggccccgaaacaggcgccggat

SEQ ID NO: 678937 - DNA, 462 bp, Homo sapiens
agggagactctcaagaagaagccttcggttcaggtctcagataggaaatgtctgctgataggagtagtacatagggaagttaaaaagcctcacaaattacatttataagtaacaggatacatcactttaaagatgaaaacctccaggatttgtggcgcctttctttgttctcgttaatcctattttactttttgagtgttagatattctgtaaatatcggcatttgaattcaaacaatagatgttgataactagttctctaacttggtacaaaaacattattattgtctgtcagcagattttgtattctgagagttaaccttctgtatttgatgttttctttgtccatcactattattctagcccgaatactgtcttcctcattccgttttaaaacctttagcagttgttagcacagcgtggcctggtttcaaaaggaatggagaagtcgaattcgggaaag

SEQ ID NO: 678938 - DNA, 530 bp, Homo sapiens
agtcgacggagactctcaagaaagctttcggtttcaggttcttcttgagagctcaatcactgggattcttcttttaacgacttggaaaatgtctgcttgattaggaagttagtcatttcacattttgacatctaaaacaatgggaagttaaaaagcctcacaaattacatttataagtaacaggatacatcactttaaagatgaaaacctccaggatttgtggcgcctttctttgttctcgttaatcctattttactttttgagtgttagatattctgtaaatatcggcatttgaattcaaacaatagatgttgataactagttctctaacttggtacaaaaacattattattgtctgtcagcagattttgtattctgagagttaaccttctgtatttgatgttttctttgtccatcactattattctagcccgaatactgtcttcctcattccgttttaaaacctttagcagttgttagcacagcgtggcctggtttcaaaaggaatggagaagtcgaattcgggaaag

SEQ ID NO: 678939 - DNA, 335 bp, Homo sapiens
  misc_feature (118)..(120): n is a, c, g, or t
  misc_feature (124)..(125): n is a, c, g, or t
  misc_feature (288)..(288): n is a, c, g, or t
  misc_feature (290)..(290): n is a, c, g, or t
gcacgagctaggaggcaacagggaagcttccatctgctgtcctctcgtcctcaggcatgggcctaacatggctcctgtctgtaatcccagtgccttgggaggctggagtgggaggatnnngggnntcctaggagttcgagaccagcctaggcgacacagtaagactctgtctctgcaaaagatttaaaaattagctgggcttggtggcacgcacctgtagtctcagctgctcaggaggctgaggcacgaggattgtttgagcccaggagtttaagattgcagtgattntnacactgcactccagcctgagcaagagtgaggccccatctctttaa

SEQ ID NO: 678940 - DNA, 327 bp, Homo sapiens
atccttccctcttcacggatctacccccaccccacgaaatgcttaaaaggtagcttgactttttgttcaaggctcagtcctttggatgttaatctgactgggttgatgcacctaaacaattaaataattcctcctcaacccctccggtctctctgattccttaattatcccgctgcagtgtctctactaaaaatgcaaaaaattagccaggcatggtggcacgtgctgtagtcctagctacttgggaggctgaggcagaagaatcgcttgaaccccggaggtggaggctgtaaaaaaatcatgccactgtactctagcctgggcgca

SEQ ID NO: 678941 - DNA, 510 bp, Homo sapiens
ggggctgctcagctgcaaggacgctgtaagcaggaggagatgcctcagcgcttcagcacatgagtgggacagggtatcacatgccgtatctagagaggctgtaacatgatatccacgagatcatgaaagccgattaaggcaaggtatccaggcacattctacttccgattttgtaacctatgggaagccaacgatcggaacgaaacttggctgtgcttcaccgtggcagggtatacatggcgccgactcagatgttctccttggatatgacggggtcgtcttcgcgaagaccctaggtggattactgtagaccgcattgtctatgcaagataacggtgcgttccttctgctcggttgtctgcgacgtacatacatgtcatcctaacaaaaaaggtaccggggtcactctggttactgcaatcgttggagacccattgactcagcatggtgtgtccagggggagagtggccagagataccatgggtcagggggaggagccaacgatggaag

SEQ ID NO: 678942 - DNA, 2384 bp, Homo sapiens
aaacaagggaagcaagccgtccaaaatccagggttcctagagccgtatctcagaattttatgcacacaggttgcagttaagtcttgctcaaagttttctgggagaactaagaactttcattgttaatggaagtgtggcaattggagcaggtgacaaagaacaagccctttcgagtccccccttcattcactccacacatgggttgcctttggcgtctgggccacttggtctccaatggtagcagaacacagcaagaatccatgtgttctgcctggtggctgtgtgtggttggcctcctgggggcctgcgggctgggcatggacgccgtggaggacactccctgtgctagactggctggagcgagggcagatagagtggacagggcttggacattctggatgaagagccagtggcctcagggcagaaatgacaccagggtaactcatcaaaatgtgcctcccaggctctagaaaatccctggtagggtctgtgtggcctttgcaggagcatctggcccatctggaggtgggtttgaggggacggggccacaaggaaatggaaacagtagtggggttcacatgtgcgaacattcacagatgccaaagtaggcactcggcacaatccgcttaatagctctcatccagaccacgtgcaaccaatgatgaaggctaggatgggggatgcggtcagggcactagccttgaaaagggggacagggagaaccttcaaaaacaagtggaggaaaggcatcagcagggtgctttcaaccacattcttcctgttgttcttgaggaagtcctgtgtgtgtgcccgatgcctgtgttgcggaagttctcactgtgaactttacagcaatgctgaagcaggaattagcatgcctgattagtggtgatgggacccacgtctttctatccttttacctttaccttgtctttgtcattgtatttgcagtgagcctccttaggcagcatattaatgggtggggttatctttatccaatttcacaatttctatgtttgaattggcacatttataccgttacattttatgtaattatgtgtttggacttattctttgtttcctttccctcctctgttttttgttcatttcccctcccttagctaccttcttttggattattggaatattttttagtgttccatttaaatttactggctttgggccattgttttctaattttttattggtcgccctggagattacagtatacttaggatttttgacagtcttcttagagtctccgctctgccacttcatgtgaggtgtggtctcttcctccacatcccccaccccccattctatctttgtcatgttatcagatttacatgcattgaaaatcctaccaggtaatgtggcaattttgttttcaacagtatagattttttttttctttttggagatagagccttgctctgccacccaggctggagtgcagtggtgcaatcttggctcattgcaacctccgcctccctcccaggttcaagcgattttcgtgcctcagcttgccaagcagctgggactacaggtgcgcaccaccatgcccggcttttttgtgttttagtctctactcagtggtgtttcatcatgtttcccaggctggtctcaaactcctgagctcgggcggatcacttgaggtcaggagttcaagaccagtatggccagcatggtgagaccctgtctctgctagaaatgcaaaaattagctgggcgtgatgttgcttataatcacgggaggatgaggtgggagaatcactcgagcccaggaagtggaggttgcagtgagccgagatcacaccattgcactccagcctgagcaacagagtgagtgtccaccttggctcgtgggtgggaactcatgagcgcccactccaagctgtgtcctctcaaaaaaagtaaataaagtctgctggtgaggaattttacacatataaatacataaaatatttgatttgagtttatcccatctggagttggccaaactttttgattttcataagtttatatctttcactaaattagagaacttttctgccattatttcttcaaaataaatgttttatgtactaatatctttccattccccttctggaacttcaaatacaaaagtgatagatgttttgatattgtttcacagctctctgaagctttgttcatttttttaaaaaatcttttctcctgtttttcagattagataatttctattgatctctttgtaagtttactgactccttcctctgtaatcccagctactcaggaggctgaggcgggagaatcgcttgagcccggtaggcggagcttgcagtgagctgagatcccgccactgcactccagactgggcgacagagtctctgtctcaaaaaaaag

SEQ ID NO: 678943 - DNA, 126 bp, Homo sapiens
ggtgggtccttggcagatgccaagagaactggaagagtccttctctgatcattataaaaggaaagagctgggagtcggatgaagagaagagctaacaccagcgttctcctcctctctggtttctac

SEQ ID NO: 678944 - DNA, 121 bp, Homo sapiens
  misc_feature (71)..(71): n is a, c, g, or t
gtcccgtgcgagtatgtgccacaaacagcgagcaggcgtctggacgtctcaggtgtttgaggcatccaccngcctacgacaagaaaaagcggatggtggttcctgctgcccttcaaggtcg

SEQ ID NO: 678945 - DNA, 206 bp, Homo sapiens
gaattcctgcaatttccacctgaatgtcttctgaagcaaaacagaatgtacctattccttctttcacaataactctttgtcacatagtagggattaacggaatattttattaaaaaataaaaacctgtgaagagcattctggttcttacatttatttccaagctagacattatttctcaattattcacatgacatttcattatatg

SEQ ID NO: 678946 - DNA, 757 bp, Homo sapiens
gggaacgggctgatcgtggaggagggacaacgctgacaccgtcttcggctgcaaaacacgtggccccttacgtgcggctacatcacccgcaaggtaacaaatcggaagtagcccagaaactgaaagaagtggatgatgtgcttggtggagctagctgcctgggagaatgttgactctactgcaaagtctgtgtcccaaatgcgaacatcctccttgcttccttcatgcagcttcagacccggctctgcccaatgagcctgatgaccaccttctacaagtgctgcaatgctcaggtgtggacaccgacgttggcagggattaagggcgcatggatggcgccagtctgccctagctgtgtgccttgccttgttccccttcggggtagatgcttagtctggcagtctgagttgtgtgtcctgtagggtctttgctagctgtggtggatagagatacaacctatttgcatgtgtgaaggacgccagagggtgtcacgggaagactagtggcccctatctcgtcgcaggcgagggctggcatgagcgtcatgaatgtctgggagttgtctctgtgctggaggcaggagtacagtagcacccataactagaatatgctctgtgtaagagtcctattctgttcatcattccacattgattggcagtatgacaattccctttactcccaatcaacaactctttcaatatttgtactgttttgtcaccactgtaggtgacatgtaccttaatatgtaagctgttaa

SEQ ID NO: 678947 - DNA, 753 bp, Homo sapiens
ctctttcccgggaacattccccaacccggttaccccggtccacccgcttttccgggccaaccctttggagatctggtcacctctttatttaaagaggttcccaccgcggggaaaaagggggaaaaaaactcccgagggaaatgtcccaagtccaatggagaagaaaaaaatttcacaaaaggggggtccccacaggggcgcgcaaaaaacgccccaggggtgttaaccgaagcctctcccaaaatttccaccacggggtgtttacggaggaatatccggaggaagaacgcggttttcccacccccggagcctctctccccgggaaacccgccaacacaccccacgccccactgtggtttccttcaattggacgccccgagataggagtttcccatgtccacccacccacggagggccccccctcttcctcggtggtgggccacagttggcaagagggcttggttcatggcgattcccccacggtgggggatcttgccccccacccctccttctagcacctttagagggtgccctctctggggcagaacacccctggctaggtgttttcttttccacaatccctcgtgtggttctggcaagtgagcacgagtcatttttcacctaaacttaatcacgtaggtcacacccgaaacactttctaaactgtccccccattccttttagccccaggtgcctccccccctgggattattccaaatgggactagattaaattgaaaacttgcccctttta

SEQ ID NO: 678948 - DNA, 402 bp, Homo sapiens
  misc_feature (151)..(151): n is a, c, g, or t
  misc_feature (194)..(194): n is a, c, g, or t
  misc_feature (320)..(320): n is a, c, g, or t
  misc_feature (333)..(333): n is a, c, g, or t
  misc_feature (357)..(357): n is a, c, g, or t
ggcctcagcactttagccactagcatctgtagtacagagatttctctcgttggcttcccatcttctcgcatatatctaataagctatatacgctatactaaaaataacaaaatggccattaaaataacgcgaagcgtgtgttttgcctggnctgtctactctgtttgaacaattcgaacacaaaggatctacangtgaatgcagtaggactacagatatgagaacgcagcaattattgagggatgatgccagtctatgcatgaaatctgacctgatctatggcctttagtaaataactaggccttagtgtgcctgatccnttttgttaatcgnctcgctagtctaggcaatagcatngcttttaatagaacaaaataatttcgaagcgcaacgacttccaat

SEQ ID NO: 678949 - DNA, 343 bp, Homo sapiens
  misc_feature (28)..(29): n is a, c, g, or t
  misc_feature (47)..(49): n is a, c, g, or t
  misc_feature (53)..(54): n is a, c, g, or t
  misc_feature (63)..(65): n is a, c, g, or t
  misc_feature (69)..(70): n is a, c, g, or t
  misc_feature (75)..(75): n is a, c, g, or t
  misc_feature (81)..(81): n is a, c, g, or t
  misc_feature (84)..(84): n is a, c, g, or t
  misc_feature (103)..(103): n is a, c, g, or t
  misc_feature (114)..(114): n is a, c, g, or t
  misc_feature (116)..(116): n is a, c, g, or t
ggccagggggggcccgcttaggggtgannagtttgagtcttaggaannngccnncgaataaannntctnntcgtncccaanaanctctagaaaaaactctctncctcttcatgngnatatacttttgctgcagaaataaaagttttctctttatctcttcatggcagacctaagtgtgagaaaaagttgctggtgatttaccacaccacaggctgagtacacccaggcgcgcatctttaaaacatgcccaaagatatctctgtgaaatgtattcagtagtggattccagtattcacagccttcatttacacaggtgactttatttaatttgtacttactgggg

SEQ ID NO: 678950 - DNA, 412 bp, Homo sapiens
  misc_feature (123)..(123): n is a, c, g, or t
  misc_feature (146)..(146): n is a, c, g, or t
  misc_feature (149)..(149): n is a, c, g, or t
  misc_feature (154)..(154): n is a, c, g, or t
  misc_feature (235)..(235): n is a, c, g, or t
  misc_feature (241)..(242): n is a, c, g, or t
  misc_feature (309)..(309): n is a, c, g, or t
cgtagtaagagcggcggggcgaggcggcggtggcggcatagcgcgcggggcgccttagcagcagcagcagcagcagcagcatcggaggtacccccgtcgtcgcagcccccgcgctggtgcagncaccctcgctccctttgtttttnctnccttngctcgcaccatgttttgtcatgggaccgaagaacagattggtgaattaaaggaagccttcttcctatttgataaagatggngatggnnccattacaacaaaggaacttggtaactgtatgaggtcactgggttagaacccaacagaagctgaatngcaggatatgatcaatgaagtggatgctggtggtgatggtaccatttattttcgtgaatgtgtgactatgatgggtggaagaatgaaagatacaggttgtgta

SEQ ID NO: 678951 - DNA, 812 bp, Homo sapiens
  misc_feature (12)..(14): n is a, c, g, or t
  misc_feature (238)..(238): n is a, c, g, or t
gcgggaagaaannncaaacgacggctaggtaccgaggctgggtgttagctggccacctgcgcagcggccttgcgttctctccgggggcggagcgggtcggcgggcctgacagggaacctccctgaccgaagcccacgtctccccacggccagagaaatctccggcccggcccgcatcgccagcccccaggcccggaggaacggcccgagcccaggagaaccacatcttcgtcccaagnccccccgggagggctccctgtgggcaaagatccggtgagccaacggggttccctgatgggcccctcctgtgccagtgcagggtttccccgcgcgtttccgaggagccctgcctggcctgggctggcttggacaaacaggtcgtagcaccgattcgcgcccgcccccagcagggggttcccctggcaacagggcttgtgcccccttgaccccacagacccaaaagccttgtccttccggctttgcgccccaaaatctaagttgcactttgcccgggcggtccccaaagccacaagccaagggcagcaacaggttgcgaacccatttggaggcgttttggaccagggctcccaggacgaagcgcctcgggtgacttgcaggcgcggagcgtgggcccattgggactgttgcccacatcggttggttgggggcccgtgggccccaccgaggcctggtgggtccccttggaggcggaaggcccaaccctttggtgggccccttttcccccggccgttgggtcccacatgcgcgtgtgtggccctggccaacggtccattggcggcccaagaatctgcc

SEQ ID NO: 678952 - DNA, 919 bp, Homo sapiens
actctcattctctgcttgttactcagtaagctcaaaagtggggttgcctttttagctattagtgctctattttgtgcttctattgtcctctacggcaggtgtctctgagagtagatgtcgattactacattatctgtggcataactttgcaaacaagtttctatattactggatcatcatcgatagtcccgactttggctagtctctgttggctctagctcttcttgtttgtgcagctcttcgaaacaggtgcaaattctactatagcgggatattgcctgacctttatctgtcaagggaatagcataaccatcaaagcgatccctgtaacaaggataatgtcctctttggtttttaaagttgatgtatgctctggcatacatatgaggatacaaactcgtatcattagaaaaaaactcaaaataatcatgctcaggcataggttgaagatgttcctgaagctgctccttggtccaaagtgggaggtaatcttcgaattaccaccttgctcagcgctttctttcttctccttgttgcgatcctgcttatcttcccccttggagctgtcccccgaggtacccaccaacagtgctgtggacccggcagggggttaacaggataactcgcttactccttaggcctgtgctccttctcttccttcattggctacgtaccccgatgaagcggcttggccggaacgggttaccccgagaaggagctgtggggtcttctccatacatgcaaactcgttgactcggagtagagtacacagcaggaagatcacaacgtaggaagcaggtagatgacaacaatccaaaataggcccagaggacagcacgaacacgctgttaccaaaagagaacaccggcacacaaaacacaagaagcaaccccagacggacgaagacacaggaaacacg

SEQ ID NO: 678953 - DNA, 163 bp, Homo sapiens
ctacaggatcttatagcgcggctggtatcacctctgtgccgtggtcgtgaggacaccaggctggtggcacagtgctgctgtccgtggtcgtgctgctccacgcgctcctgagcatggggtggaagttgtatttcttctggcggcatcgtcttgctgagttatg

SEQ ID NO: 678954 - DNA, 246 bp, Homo sapiens
gtgttatgagatcatgtcatagctctgtagtacataggaattgactcttctacaatcagactgtatcacatgacccctgactacatatctttcgtgaataacagactggtatcacagtagcctagggagagattgatccacccttcattacttatacaagctacatctggaagggactcattttaaagagagcacaccattttaaatgaacacccaatctagctcaacatgagctgttgtaactgg

SEQ ID NO: 678955 - DNA, 108 bp, Homo sapiens
ttgaaatgggcacagaaattttcaggatatgacagctaaagggtgtttttgaagaaaagagtttttagaaggaaagagaaagttctaaaatttatcaggtgatagttg

SEQ ID NO: 678956 - DNA, 300 bp, Homo sapiens
cggacctctagacacgtaggataacggacgttgagccggtatcgtgtaatagacacgtgttgatggtgtcactcatgtcacctgccttgtggctgaatagggtatgtgattggcagttgttttaaacacattccaatcgcagtgacgagatataacatattttattcaacaacctgctgagtagaccgaaaagtacgactcctctccagaatcaagtccttgcgaagagctgctataggccgtttacggatcgctatagttttgtctgacccgatttagttcccgaatttacggcatagt

SEQ ID NO: 678957 - DNA, 722 bp, Homo sapiens
  misc_feature (147)..(147): n is a, c, g, or t
  misc_feature (322)..(322): n is a, c, g, or t
  misc_feature (535)..(535): n is a, c, g, or t
  misc_feature (540)..(540): n is a, c, g, or t
  misc_feature (572)..(574): n is a, c, g, or t
agcggagactaggggcgagtttggagcaagtaactgtcagtgaggttgcagttggtctgggctgtttggctgtgagcgaaatagctgccccccacttctcacttgcacaccacgggatactcctcctgaggctccggatgattcagntggactgtgaaaaacaacaagatggatgatcatatggagattgcttctaacataaatctgcataaaaatttttctgaaacatggctggaatatttaaggagttttttttcagtactgaggacctccctgaagtcattctaacattgtctttgatcagctccattggagcattttngaaccggcacttggaagactttccaattcctgtccctgtgatattatttttacttggatgcagttttgaagtattaagctttacatcttcacaggtccaaagatacgcaaacgccatacaatggatgagtccagacttattttttcgtatatttacaccagtagttttctttactactgcatttgacatggatacgtacatgcttcaaaagtnatttnggcagatacttttaatttcaattcccggcttnnnggttaattatatcttagttctttggcatctggcatctgtaaatcaattacttttgaagcctacccaatggttattattttcagctatccttgtgagttcagatcccatgctaaccgcagctgctataagagaccttgggcttctagaa

SEQ ID NO: 678958 - DNA, 1126 bp, Homo sapiens
  misc_feature (1126)..(1126): n is a, c, g, or t
aggaaagctgaagtgctgctgtaagaggtggctcgtatgtaaggtctgtattattgtttttaattccccttctaatgaatgaacactaggggaatttcaggggaccagagagtgggattgggtgtgtatgataaactgtatgtagttgttaagtcttgctggtattgggagaagcaggggttgggggccatttgtgtaacgatggctggctcactcctggttattccctcgatgataaatcaaatttggtccatacactccagtcacaccatgaaactgtgcccctagaagggtagcttgtatacataactttgtgaaacatcattaaaggtctgtgccaagacgttctgcagtaattcaacaccgtgtactacgtggatatatgtaaggcagggacagaacgtgagcttctcgtgtggcaaattacctgtggagcgagaagagtaattgtctaaactatacagagaggtaactgtgactatatatgtggcatccgtggtgcctcccttcatatgaagtatttgataacagattctcaatttatgtcaaaacttcctaacagcagaatcaaagctcctctgggggcacagggccacgtcttcaggataggcaagacccggtatgacatagttaccaacagcttatcgcatggtagagaaacaactcgattaaacactgtaaaatatctgaaacattaaagttgcagttttcagggatggaaaaacaagggttaggctacttggggcactttcttagagggattgcgaagtgtttcaacttatcgacattgtagatgtacatgacatccgggagacgctcatggaaaccggagcaccataaataacgacaggaatactcatcgaagaacccatgtagccaaggggcaacactgggtagaaagggggtatcacagcctaagccaagaacaaaccaccgacagcacctgactaatccgagacgtgacaagcagacaggacgtgtacaccaagcagttgcgcggagactagaagaactgcaaacaccacaacgacagaaacacctgagccgacgaactagtacaacgaatagtacagacagaaacagatacaggtggagctatccccggcccccctcgtcacatcgaggn

SEQ ID NO: 678959 - DNA, 101 bp, Homo sapiens
caggccgtcctagggagaggagggtggatggaatttagatgggtgttagtcatgtcttgcttgctggtgtgagcgagatagtagcaggctcttggtgagga

SEQ ID NO: 678960 - DNA, 1235 bp, Homo sapiens
  misc_feature (820)..(820): n is a, c, g, or t
  misc_feature (1023)..(1023): n is a, c, g, or t
tgtccctcttttttgtggaccaccaggtcccgtccccgcaaattgtttgcccccaaaaggtggaccgctttttagagagtcatttagggggcaacaaacggtcttccaaacggaaagggggccggggtagccacccagcgcgttctttgttttgggcaccccggccccgctcgggggacccactggccacccagggtggagccactgggcgtaccagtgtgcgcccaaacccctctttgggacgttgccaaaccaagctgtgttgcaggaactttgggaagaggttggggttttcttggaggttgccccccccccacacagagggtttgttgggaaagagctgggccccccctggggggatttttctccacgagggcccaaaccactggtgccccacaaacacgcccaccaaagcgcggatatattttcttgctgggcccaagaaatctcccgggggagcccccccccacttttcttgtcaccggccacgctggttctctcactcggtgtggcccctcttcttcgaagggagctttccccccccccccccgcactctcccaccgtgatatgtcttcacattctcgtgcccccgctctctctcctcgggggggctctaaaagtttggggttttgcttttcccacaggcacggagaagcaccgcccacaggagctccagttttcccacggcgacactctttctcgtgaagcccaaattgagactcgtggaagatttaacgagctcttctctcttggccctcttctttctatggcccacgcttctcgtgggcgctcctctctcttctggagaccaccgctgtntggagagggccaccctcgagaagagaaaggcaccaaggggccgctgtctcttctcgtcttggggccgcgggccacgcgagagaaggagagacctcggggccacgttgtggcgcaccactttaataaacccgcttgcacggcgccggagagaaagccacccgcgcacaccccctttccggcctcgagaaacgccctcccctcgnccagagaaggttgtgcacggagagaagaaagagggccccggcactggggattctgggttttatgagggcacatgtgatgagctgtaaaatgttccctgggtgggtatgggagagtggtaatccacgtgttcaagtgcacgaaatctttggctttgctaaccacgttccatatgatgagaaattaacgttcgctgaggttttgtttcaaacca

SEQ ID NO: 678961 - DNA, 113 bp, Homo sapiens
agctgggtctggtgtagggtatcccttctcctgtgcttccatctcgtcatgagctaggtcttggagcttgtgttggaggctgctgtgatgtcaggaacgtgtatctgtctagc

SEQ ID NO: 678962 - DNA, 509 bp, Homo sapiens
ggaaacttacaatcatgtgagaaggcgaaggagaagcaggcacatcttatatggccagagcaggagggagacagaggggaggcaccacacacttggaagcaaccagatgtgatgaggactcaatatcaggagaacagcacggagggggtggtgctaaaccgttcgtgaggactctgccccataatcccatcgcctcccagcgcgagggggcttacatttcaacatgagacgtcggggaggacacagatccaaaccacatcaagtagtgcttgcaggctttggattatctttggtaactatgtgatggaactataatttacataccatacaattcaccaaggtaggggggtgtaatgcaagggtctaaagcatatccagagtggtgtgaccatcgctacagtcaatgtaaggacatttttagtcacggcaaaagaaagacctcaatcttcccattcctcccatcccgaagcaaccactaatctacttcctctatagggagatgtgcttat

SEQ ID NO: 678963 - DNA, 332 bp, Homo sapiens
caggtagagatgaaactacttcatgaagtaaaaaatgtataaaaagaaacattgagagaaaggactacagcgccccgacattcataccactagcagggcactgcttttcgatcaaaatgcaggtgacttaaacagcttaaagtttcgtttataagttgtaggtgattaaaataattagaaggcgatcttttaaaaagagattaaaccgaaggtgattcaaagcacttgaaatccatgacgcagggagaattgcgtcatttacagcctagttaacgcatttactaaacgcagacgaaaatggaaagattacttgggagtggtacggattcacg

SEQ ID NO: 678964 - DNA, 185 bp, Homo sapiens
cggggaaaggaccagagctcacgatgcagaagattggacaggcaaaagggggcacaagggcacaggccaagccttgggggcaggtgcaaatctaccagtcccaggatccccacaggacagaacctgagccctcacagtacttgccttcagccaactggctcccctcctgggaggcctctgctgga

SEQ ID NO: 678965 - DNA, 200 bp, Homo sapiens
accccccccttttattttttcccttaaaaacaattcaggttaaataaggcactgatttgggtttggtttatcggatcccaaaggctttggtggttaaaagaaagggattttgggggttttttttattaaaaccaccagctcttaaaggtggtttttccaaaagaaaagaatattttaaaaaaatattggtttccttggga

SEQ ID NO: 678966 - DNA, 781 bp, Homo sapiens
tgaggctgccggttgatcgctcgagagagagacgagaggttcagggagctgttgctgtatggccgtaagaaggatgctattgtgagtctgccatgaagaatggcctgtggggtcacgctctgctacttgcaagtaagatggacagccggacacacgacccgagtcatgaccaggtttgctaacagcctcccaatcaactgaccctctgcagacagtcataccagctcatgtcctgtgactgttgatgcgctgcctgcagatccacagtgctaatgtgacgactgcagaaatggggagatatggaggcctgcacctcgccatggtcttgtcacaacttgaacaacaacatggacgtcgagtccaggactgatggctaccatgggacgacactctggcttcaaggggcctcttggatgcggaccactactgctacctcatggcccagtgcgggattatggtgtatacacgaagaaaactacaaaagcttgtattaatcggatccaatcacagattatgacattcttaaagttcgcaaccaaacgaaggcataccaagaggactggaagcctatgagtacgcccagtccctggggtgaccgagaactgaccccctgactagttaccaggtgttaaagtacatactaatactgccgcctggcggagatggggctaggaacacgcaagcctaaacaataatgagaggacaacgcgaaaagctctgaagcagacgacctgtattcccgtgtagaaaccaattgtgcaatgtcacaagaaaactaaac

SEQ ID NO: 678967 - DNA, 926 bp, Homo sapiens
  misc_feature (355)..(355): n is a, c, g, or t
  misc_feature (370)..(370): n is a, c, g, or t
  misc_feature (376)..(376): n is a, c, g, or t
  misc_feature (380)..(380): n is a, c, g, or t
  misc_feature (399)..(399): n is a, c, g, or t
  misc_feature (438)..(438): n is a, c, g, or t
  misc_feature (480)..(480): n is a, c, g, or t
  misc_feature (500)..(500): n is a, c, g, or t
  misc_feature (558)..(558): n is a, c, g, or t
  misc_feature (655)..(655): n is a, c, g, or t
ttgagctccggttttgggagccataaagacacaaggcagatacgcagggcaatacctcattaaggaccaaagtgagtcaaccgggcgggcgctctaaataatgagtccccggctgcagaaatcaattgggaagcggcaacataacctgaggccaagagttggagaacaccctggcaaacatggggaaaccccagttctactaaaagatacagaaattagccgggcgtggtggtacatgcctgtaatcccagctacttgggaaactgaggcaggagaattgcttgagcccaggagccggaggttgcggtgaggcgagatcacaatcattgcacttcagcctgggcaataagagcanaactctgtctcaaanaaaaangganatatagtaatccttatttngagagattaggttcacccttttaaataaataaaacctanacacttactacctaagtttattctatttggtcttattctttngtttcatgaatttatatctngcctgttagactagattcattcactcaaatggaactaactttaaagaccatctagttnaactccagttattttgctattcctgaagttccaacagatgaaacaacttgactgaaactacagaatgctttagaggacatttcagctttccatatcnttgccccagctcccagatggagtcttcctctgtcgcccaagctgtaggccgtggaccatcttggctcgctgtagcctccgcttcccaggttcgggcgattctcctgcctcagcctcccaagtagctgtggcgcacgccaccacatccggctaattcttgtatttttagtgaagacggggttttaccatgttggccaggctggtctcaaactccttacctaaggcaggataattgtttgaacctgggaggcggaggttgcagtgagcccaga

SEQ ID NO: 678968 - DNA, 409 bp, Homo sapiens
  misc_feature (6)..(6): n is a, c, g, or t
  misc_feature (16)..(16): n is a, c, g, or t
  misc_feature (39)..(39): n is a, c, g, or t
  misc_feature (56)..(56): n is a, c, g, or t
  misc_feature (331)..(331): n is a, c, g, or t
  misc_feature (333)..(333): n is a, c, g, or t
cattanattgtactgntccccggtatttccaaaatgganatgtggccctactatgncagaatcaaaagatgtgtatcccaaacagaaagatgaaacctttgccttacgacctactgcccagtggtttctttccctattcacgactaagctccccacacgacgtggaaagagttaatctactgataaatccactcccagtaaaaacagccaaccgtatagcattagtagaagttagaataaaaaaagtaaccggaaggttgctgattcgatccccggtgtgtcgaggtgtccctgagcgagactcctcgccccgactgctcccgacgaaggncntgtcgccttggtgcttgactccgccgtcggtgtgtgaatgtgtgcgtgaacggctggatgttgtgaagcgctttga

SEQ ID NO: 678969 - DNA, 164 bp, Homo sapiens
ttagaaattcaggtctttttgtctaatagaaacataagtgacagatacccctaagtataaaattgaattcatggcaggataacacgggtgagcatatagtaccacatagacgtatgcggttgggccatcagcatttgccacgcattcccttctgtcgtcttctc

SEQ ID NO: 678970 - DNA, 197 bp, Homo sapiens
tgctcgacgatgccgacaaccgcaaggggcgctggtcgcggttgcagttctccctcgagggcgaacccgatccctggtatcgagttcgacgaggcgcaggtcgacgcgcgccatttcgaagccgttgtccgtatgagcccgcaaaccgcatcgagacaccggagctgcatcatgagccattggaaaccgatctgccg

SEQ ID NO: 678971 - DNA, 427 bp, Homo sapiens
  misc_feature (427)..(427): n is a, c, g, or t
aaaagcaagtggcacagttatattcagcacagaactgctaagatgtttacaccaggctgaaaaaaaatgtctgaatgcagagatgccttaaatgttcgatggccgatcagttaaaaattcacgcaatttaccctgataaagtgctcaaacaaagcgaatatggtgcgctaacagcgtttaactgccttcggcccgatttgctgccgccacattgtgccactgcccttgggaaactgcgaactgagtaacagggactcataatatacagcttttcatagtcgttgagcgccgccattctccaatgcgcctgtttaggacccctgatatccatatttatgtgctacgactgcccaatagccaccctgttgcataagacgatctgtatgaacgggcgtgcagtcaatggtcaaccagactgtaccatggn

SEQ ID NO: 678972 - DNA, 573 bp, Homo sapiens
  misc_feature (492)..(492): n is a, c, g, or t
accagcatatggttcatatgcaaataatactttccccaaaatcttctggggctaggctattttctggctatgcttccggcacccaaccatgcaaaattcttccagggttggaggaactaatcagctggttctccaacagttctgaagccaacccacaaatcttggaggaaaaggggtcacttggtttactattctctgggagatggaagtgatgctgctctcccattggggtatataatttcaggggtatttcttcttaaaaatctgggaaagcctaggagagttaaaggcatccgggtttggttgcatttggctcggttttaaatccatatgcaattaaaacggcttctctcttacacggctggaactagaaaatcagctttttaaggtaggttaccacttatatgcacaaaagaagcatgtataagaaaccagatttaggtgtcttaaataaaaggtaaacggtttttattgggtagagatgactcaggnaaaaatggtgttggcttggtctgcatgttaaatgatgtgctggtatatcgataagctgtgtcacttttaaataagatgcca

SEQ ID NO: 678973 - DNA, 517 bp, Homo sapiens
  misc_feature (267)..(267): n is a, c, g, or t
aggtgactctagaggacccgcccacggtagatataggtgctcatgtcacaaacagcagagcattctgagcagaatcagtagactattgcacaatgactgtgtctcagggcaagcctgagctctgtgatcagctatagcttttctgatctttgtcatacttccagatttatcatttagtgctgcattgaaagaggaaccaagattggatgggcatgctattgggatgacacaaatctctccatttggaacagatcctctgctatctgncacttcccctgcagtttcccaagaaagcagtaggagaagtagctttagcccagatgatggtgatgaattataagaaataaacagacccaattcatcaactggaaagcaattctatgctggtgctatgcaattatgctctgtgtttcatatgttgctttggcttatttttttttcttaaaggaatgtgttgttcatgaaaaactgatagaagcagcagaagaattcgcaggaagaaaaatctaccgagggc

SEQ ID NO: 678974 - DNA, 133 bp, Homo sapiens
tcatttcgatgaatcctattctacctcttactcgtgatggaaagtgatccccattgctcacatgattggagtaatatctgtggagcctcctggcatacccctttgtgtttgacatcactgggtggtattcggg

SEQ ID NO: 678975 - DNA, 192 bp, Homo sapiens
ggtgtagaaacattccaggtttcactcttagttattgtaactatacaataaattattgttaatttactatagttgccccattgtgctaccaaacactagatcttactccttctatgtaactgtattttttacccactaaccatcccctttctactcccctttccactaccctttccagcctctgctaaccac

SEQ ID NO: 678976 - DNA, 242 bp, Homo sapiens
gggaaaatgttattaagttttaaagaagcccctttttaaaaaattaaaaaaaacataatgggacaaatcatgagcaaacttcttttcaatcattggaaattattcacgggctatggacatttaaatctcaagggaactctttaattaactaaagctaaaaaattaaattaattgtgagccctgttaaaaaaaaaaaacataaaggaaattttgagacttgaggccaaaaaaacctttagtta

SEQ ID NO: 678977 - DNA, 294 bp, Homo sapiens
tcggtcacatgatcgctctcaggaacagctgaattctcccggattagatcactctcctcctctcgacccttgtggcctgtagcatgctggctgggacctgagagcatggaaccgatgagcaggatctcggagctgcagcccatgtcacaggccacgatgagcatcttggacagtggccgtgatccagcgggacatccagcatcagccgcccggtagaggtcaagaccacctgtgttgtccaggggccccgagaatccagaagctgataggtagagttgagcatgttgtcctccg

SEQ ID NO: 678978 - DNA, 614 bp, Homo sapiens
taggaattagtatgagagttgtgtattagcagtgtctgtctgaaacgctgtgatatttgacccgatgcgtcgtacccgactgcgtcgagggatggaagcgtcggagtggggcgggcccgtgattcggacccccggggcgcttcgatccccccaggtggtcaccgaggcacggccgcttcacccatggtagcaccctgatgaaggccatggtcctaatgcgtcagcctggtcgggtgcaggagatcgtgggcgccctcggcaagggcggtggagaccggttacagatttctcaatatggtcatgctgcttcctcatattggacatgaatggctgcccacaccagtacctaggtgccttatcctccccaagcggtccccagtgatttctgattttgacatgaccttgagcaggtttgcatataatggacaagcgatgcccttcttcttacaatattctggataatagcacgatcatcagtgaggagtgtcggaaagagctcacagcgctccttcaccactattacccaattgagatcggaaccgcaaaaaaaccccccgggggggaaaaccccccggggttttccccaaaaaaaggggggggaaaaagggcaaacc

SEQ ID NO: 678979 - DNA, 728 bp, Homo sapiens
tgcccacactgcacggagtgcaccagcgtcttctccagtggagcggcggatagtgagctggcccatggctcgcctgggttgtgcccttcttagtgctccgtgcccctgtgaccctgcgctcattgaggaccctggaggatgggccacggacttcatccagtgagttcccctgggagccccgccttcgctgcatctcacctccatagcccagaatgattcttggacgcgaccgcccgcatgcctcccctgactaaggccaccttgcatgcctgctttccagggccaccaagggctctgctccagcctctcagagaaacagaggcctgtgagctcgtgtaccctggtgccctgcagtggagcagtgcccatggcatgactgtcagcgggagagcttctccccgaccagcccagccccaggatgtgtcgcaccagcagctctgcctggtttggtctgcagtgcctgtggtctgcgtgctctgcagctgtgagacgggggcggctgggctctcttcccatccatgttgcctacctgtgcccctggcagcgcgtgtcaacacagataagcgggagcgcaaggacttctgcagtcctcaggtgacccctgttcctccagaaccctgggtcgctgtcatctgggtaaagctcggtgagtgcccctaagggggcgaacttgacctcaggcatgtttgtaatgtaaggagcctgcataaacgtgtcgtgtgtggaca

SEQ ID NO: 678980 - DNA, 1451 bp, Homo sapiens
agacgcggggtgtgcggtgaccggcgtgagacggacatcgagacttcggcgttggtgggccagacagatgggtgggtgggacggacccgctggggccgcgccgtggggggtgctgtcgctggaagggatgaggatggagtgtggcgtctcgaccaatcgtggtggtcttgcctttgtccatgcgcatgggagcagcgagtagatgatgagagaggtcgcccccctctccggtgtgcgtgggtgtattgagagatagtgggtgttgtgcgccgccgcggccccggaggcagtgcggaggatttggtgttgtggtggagcgcccccggcgctgtggtttgcggcggagcggtgtgggtggcggggctctgtataagggggggacttttctggccgcacgcgcgggtgtggtggtggggagagcgcgccctctgcgctcgacagtggttgggttggagagcgggtgtgttgtgtagacgatgttgtgtgtggacggccgccccccccccgctggttgttttggtgagccccgggtggggcgccccccgacagaggggggtgtgcgccgtgtgtctttcatgcgcggggccagccggtcttttagaagtgtgtggggggggtgtcccgccaccaaaaagggggcgggggttggcagatgttggtgggccccgcggtggtgtgtgatactgtgggtggtgtccacaccgggtgggagcgcacacaccagcaggggtgttcgtccccccccacagagtgtggataatatatgagtggggggggagaaaatttattgtggggtgtttttatagtatagagagacgcgcggggggggggttagttacgctctcagtgccccccctggtgttgggtcgctcccccgcgtaggcgcgccggcgtccgcccgcggggcgcgctctctgtgttgtagtgtctctctgttttcgtcgcccgccgcgcgagagagatctttctctgtcgcacgcacgtggaagtttattacttcgcaggggcccccccttcttgtgtgtggggatacaatagaatattgttgtccgccgcgcgcgggagaaagagttagattatgaggggagaagttgtttaacacacaccccacaagcggggggtgttttctcttctctataataaaaagacacacacactatgtagggcgctcctcttttgttctgttttgtgtgggaaccctggtggtctgtgtgtgtgcggcgcgcttatattgtggtggtgtctgtgatatatgtgaaaacctgtgtggagagaaatatctctctcgcgccttatattgtgtgtgagagcacccacaatatatggaaatttgcgcccggcgtcccccctctctctgtgtgtacacaccgggcccccgccggcggggatttttgtgtgtgtgttaaaaaaaaaacgctcgccctgtttttttttttttaagggtggaaaga

SEQ ID NO: 678981 - DNA, 135 bp, Homo sapiens
aactgaaaaaactaaacagaatagcatggtcaaatcagcactttagaacacctacagttctggagaaagctcttgcagcaatccagcaattgatgatgactttagacaggacagttagtgaagatggactaaaaa

SEQ ID NO: 678982 - DNA, 529 bp, Homo sapiens
gcgtcgacataatgtgcaaagaaaaaggacgagatcagtttgtatcaaggtatccaaaaaaatgttacagggctgtacatccaaggttcataccaacattattctcagtcaccaaaaggtgtaagcaacccgtgtgtctgtcactggatgaatggataaataaaatatggtttataggtacagtggaatatccttcagccttaaaaacgaaggacaggccaggtacggtggctcatgcctgtaatcccagcactttaggaggccgaggtgggaggatcacttgagatcaggcatttgaggccagcctggccaacatggtgaaaccccgtctctacaaaaaatacaaaaattagccaggcatggtggtgggtgcctgtaatcccagctactcaggaggctgaggcaggagaatcacttgaacccaggaggtggaggcagcagtgagccaggatcgcaccattgtactctagcctgggcaacaagagtgaaactcggtctcaaaaagagaataaagaaacagtcgggcggc

SEQ ID NO: 678983 - DNA, 399 bp, Homo sapiens
  misc_feature (9)..(9): n is a, c, g, or t
  misc_feature (14)..(14): n is a, c, g, or t
  misc_feature (320)..(320): n is a, c, g, or t
tatgcaatntctcnaccttcttccttccctttggcgcatgttttcttgtgtatttgacctcatccaaaaccttcttttgcacgagcttgtccaataaaaatatgaggcctgatttgatcgtcagctaccgagtctatgaacttcacaatttcaagtgcgctttctcttaattctgtaaaaataataaccctcgagtcggaaccccttttctgaaaaaagtccattagttcatctctaacacattgtaacttcccatgaccgacaaactttggatcacttaaataattttcgcattgatttttgatgtttttccaaatcgngtggtaataaaactcagctgcaattttattagtagattttttaagattatatttacgtagtgaattcctgcagcccggg

SEQ ID NO: 678984 - DNA, 377 bp, Homo sapiens
caccgaaaaaaaggacttgttgagctcccccagttccgggtctgcttaagctctgtgctcagctctgggggaagccctttcatgagtaagcagtgggtcgtcacgggaagcgaagtggggccagccgaaccaaaggaaatagagcagatccgcaaacccacacccactcccaaagtcagtctactgtcagaaaagctgaagctgctgggcgcggtggctcacacttgtaatcccagcactttgggaggccgaggcgcgcggattacctgaggttgggagtttgcgaccagcttgaccaacagggagaaaccccgtctctactaaaaatacaaaattagctgggtgtggtggcacatgcctgtaattccagctactca

SEQ ID NO: 678985 - DNA, 326 bp, Homo sapiens
gaaaacgccaagaacacttccctccatgttccacacagccaaggtctccaaaccaggcaagacagcagtgacatggcaagatggacaaggaccctgcagtgcactaaagatagtctctgtgtgtggtaacatgtctaacacttgtcttgcttttcataggtttgtgtgtgttctagtgtttccatgagggaccaaggcgcttgtgatctgaatgtgccgtctctgccttgggcaaagctcttgcaaactcctggttcatggccaaatctccaggactttaaactagttatgttatttactgaccttttacaaagagattttccttg

SEQ ID NO: 678986 - DNA, 122 bp, Homo sapiens
atccccgcgtagcccccgcaagacgagaaggaggatttcaggtgaggaggccgaagagaaggccgtaaggcagagcccccatcatctcaggcttctcagttcccttagccgtcttgcgtggg

SEQ ID NO: 678987 - DNA, 331 bp, Homo sapiens
ttttcagtaatgttattttttttaaagtgaaattttaagcctgccctttgatgtcaggtgttccctttgtctttcaaaccccaaggttccattgtggccctctccctacccctgggaagcccttttggagcccttacccctggctgtttggactttgtaaactttaaaaaatttaaccccccttaattacttaaaaaaaaaaaaaaagctttatgatttatataacttattgctgattttaatggattgttaatttcagtccggtagttttattttatgtataaaaagggctgggcaaggaaaaagaaaataaagccacccatatttagca

SEQ ID NO: 678988 - DNA, 194 bp, Homo sapiens
cccccccccgggttttttttttgggggccacaggaaacaaaaaattccctttttttttggggggaaccccagcaaaattttgggggccgggggggggccaaccccccccaattttttaaggggcccccagggggggggggggccccccccccccccctttgggggtttttttttttgggtttttgcccccccca

SEQ ID NO: 678989 - DNA, 297 bp, Homo sapiens
ggtcgcttgcccgcaccattctccatgtctctctctctcttgctgttcctcaagcagcaacgctcttcagccttaaatccttgtatccacaaggcccagtgcaaacgccacccactccgaggcttttctggccctccaggctcaaagcatcagtatcctcaggcgcactcccgactgccttcatttctttttttttggagatggagtctcgctctgtagcccaggctaacgagactttgtctcagaaaaaaagaaaaaggaaaaggaaaaattgtatttgagggaaaaaaccatgac

SEQ ID NO: 678990 - DNA, 421 bp, Homo sapiens
gtcctagaaactgccttgatagtggttttagctcacatgaggtaagtctttattatatgcccaacctctttatgcattacttcatttaattgtatactaatcctttgtcataggttatcagagtgtttgattataagttacaggaagaaaaaaaaaaacaaactccaattgactaaaacaatggggcattttttgactcacataacagagagtctagagagaaggcaccttcaggtttggctgatgaatcctgtatctctgccttgtctccaggcccccaggttctgcctctgtcctgacatccagtgttggattcctcttcacatcaactcctctctgtaggttgggccatcagaccctacctccttatttatgttgagcaaaggagagagaatgcctctacaaactatgaaaaaagtga

SEQ ID NO: 678991 - DNA, 268 bp, Homo sapiens
aggccacccatgcctgacccgaaacaaaggacatcctttctcaccaaaaagacaggaccaggcaacccggaagatcatgagattcctgcagagctggcgacacaggatgagggcactgaagcagaaccaggagctggaagggcttccccatgccgggactggccacatgagctgggcaccgttctttctcaccagcctgggggcgcctcgtgcagtcttaacagggagagggctttctgaggcaggggtagcccctgtcggcagcttt

SEQ ID NO: 678992 - DNA, 364 bp, Homo sapiens
  misc_feature (110)..(110): n is a, c, g, or t
  misc_feature (137)..(137): n is a, c, g, or t
  misc_feature (169)..(169): n is a, c, g, or t
  misc_feature (186)..(186): n is a, c, g, or t
  misc_feature (346)..(346): n is a, c, g, or t
ctagattggaaaaaaagtaactttaaatgaaactagagattcttccccattattagctcctaactgaatttgaatgttttaaatataagtagtaagatcaactctgtaantcaaagatgggctgggtgtgggtgcangcctgtaatcccagcactttgggaggccgaanctggccgatctttgganccctggagttcgagaccagcctggtcaatatggcgaaaccccgtttctacaataaaataaacgggcacggtgacgcacgcctgtagtccaagctacttcggaggctgaatcagtaggatcacttgaacctgggaggcggaggttgcagtgagccgataangctgactccctgagtgac

SEQ ID NO: 678993 - DNA, 439 bp, Homo sapiens
  misc_feature (330)..(330): n is a, c, g, or t
  misc_feature (394)..(394): n is a, c, g, or t
  misc_feature (400)..(400): n is a, c, g, or t
  misc_feature (432)..(432): n is a, c, g, or t
aaaataagcccacatgtaaaacactttcctaattactttttgtttgtttgtttgagtctcgctctgttgcccaggctggagtgtagttgcacgatttcggcttattgcaacatccgccacctgggttcaagcaattctctgcctcagcctgagtagctgggattacaggtgcccgtcaccatgccagggctaatttttgtattttcagtagagacggggtttcaccatcttgggccagggctggtcttaaactcctgacctcacaatccacccgcctcagcctccctattctctgtatcttatggaaggacttcctttttctttctggangagctgccataaagtctttaaacattttaaattcattcaggaaccttttcttgtaggcaggaangtggangtttttcttgaagtacagttacggtttttcanggtacaa

SEQ ID NO: 678994 - DNA, 322 bp, Homo sapiens
gaggatgacaggtactgcagcatcttcgttcgccgtcctccccccatgaatatgtatactgaacaatgtgcattggtcatgaggaattatttagtatgctaccactctaatgaatctcgtaattttgagtaaatgtacctcagtctaatcagactttttatgacctttataactacatttaaaacccttaattcctatatccgggtgtgagcgagcccgattgctactcatgaagtaaaaataataactctatgtatcagtagcgtaagtaaacagtagtacttgttccagcaggcatattgtcgttcacttcagctgtttt

SEQ ID NO: 678995 - DNA, 107 bp, Homo sapiens
tgcaggtgatgtcgtccacatcttcaaggtcacattaggctgaacaagcgtgcacatattccccaaattatcgccatacagtttattttccaaacgtatttttcctt

SEQ ID NO: 678996 - DNA, 492 bp, Homo sapiens
gtctcgattacgttcttgaaaggtcagctctgttagagctaagaacttgtctaagatatctttcagtcaacccataggcgatatgtgctcgaattccgcactagcgaggtcatagcctgtgtgcgggagttaagattttttttaagcctactacatttggttatggctaaaaaatctgaattagtggtcaaggtttcagaggcagtcattaattaactttggaaagctctatcagatactctgacataaaatcatgaatccaggtatcggtgtctggcaacgatgtgtccactaagtagaccactactttccggtcccaagggttagcattttcaatgactgtctgcaccagtgccaccagaggtttcttctccacatgatttcgaaacaccatagaagcctcctcagaccactggttgcacttcactcctgcaagttgagctgtgactgcttggaagggcagctttcggaacatgtccactaggggctgta

SEQ ID NO: 678997 - DNA, 178 bp, Homo sapiens
  misc_feature (145)..(145): n is a, c, g, or t
tctgtcttgttgttcatcactgtatatgctcagcaaagacagcctgaaggtccggaggcctcgaggggtttccacgtagacccacaactgcccacaagccaccagtgggtggatgtctctacaatggtcatagccttttccctcntttaaatgttcaccttggatcctctagagtcga

SEQ ID NO: 678998 - DNA, 530 bp, Homo sapiens
  misc_feature (69)..(69): n is a, c, g, or t
  misc_feature (73)..(73): n is a, c, g, or t
  misc_feature (82)..(82): n is a, c, g, or t
  misc_feature (87)..(87): n is a, c, g, or t
  misc_feature (96)..(96): n is a, c, g, or t
  misc_feature (106)..(106): n is a, c, g, or t
  misc_feature (109)..(109): n is a, c, g, or t
  misc_feature (155)..(155): n is a, c, g, or t
  misc_feature (172)..(172): n is a, c, g, or t
  misc_feature (186)..(186): n is a, c, g, or t
  misc_feature (426)..(426): n is a, c, g, or t
  misc_feature (432)..(433): n is a, c, g, or t
  misc_feature (437)..(437): n is a, c, g, or t
  misc_feature (446)..(446): n is a, c, g, or t
  misc_feature (453)..(453): n is a, c, g, or t
  misc_feature (491)..(491): n is a, c, g, or t
tataagctgaggaagtgcacaggcccggggccagcaaagcagacacagacaaagcgttaggagaagaanagangcagggaanacaanccaggcacnatggccaccntcncaccagcaaccagcgccccccagcagcccccagcccggagacgagnactccagcctggatgantctgacctctatancctggcccattcctacctcggaggtggaggccggaaaggtcgcaccaagagagacgctgctgcccacaccaaccgccccaccttgcgggcacaagaggaaactggtgaccaagctgcagaattcagagagggagaagccaggggcacggcgctcaaacagagctggagatgaggccagaccatggacactacacccagcaatagacacggcactgcggaggaaggaggacccagcacagnatccanncccncttgccacnccccccncccctagcactcattcccgctcactgagtctctcaggngctaccaggaaagcgcctccaaccctacgcaaaacgtgc

SEQ ID NO: 678999 - DNA, 137 bp, Homo sapiens
atttatacttcatacccgggacctgaaatgttaagtgtgaggaagtataagcgttgaggaagtataaagcgttgagtgttgagggagtataaagcgttgaggaagtctaaagcgttgaggaagtataaagcgttgag

SEQ ID NO: 679000 - DNA, 278 bp, Homo sapiens
  misc_feature (172)..(172): n is a, c, g, or t
agacaggttcaccatgtgagccaggatggtctcgatctcctgacttgtgatccgccacctcagtctccaatgtgctgcgattacagatgtgagccattgcttctgaccaagatcttatggttttataagggcctcttcccccttcattcattcactcactccctcctgccancttgtgaagaaggtgcctgctttgacttctgccatgattgtaagtttcctgaggcctcccccagccacatggaactgagtcaattaaacttcttttctttataaat

SEQ ID NO: 679001 - DNA, 192 bp, Homo sapiens
gggggggccccccccccccggggccgccccccccccccttttttaaagggggggcccccccccggggggccgggggggggtggcccggctttttttttcccttggcccgggggggggggggtttttttttgttttttgggcccccccccctttcgggcccccccccaattaacccttttttttgggggggga

SEQ ID NO: 679002 - DNA, 362 bp, Homo sapiens
ctggggctaaatttggaaatttcccaccttccccggattccccttttttccccagttttttggggggggccttaggtcaaccccccccaaggccttgttatttggaggcccttgggttggggtttttttttttttccttgaatttggccgtttggttcccggatcaacctccttaaccctttggtggccctttttttggggggaaggaaaattcttgaaaacccaattccccaccccatgggggtttgtttgtttttttgttttaatttgcccctgtgggttgcttattgaaccagcctttcctgggcccctaatttttgcaaaacccttgtttccctttggattaaaggttgttttttgga

SEQ ID NO: 679003 - DNA, 434 bp, Homo sapiens
tcgatgcaaagtgtccggaaagggggtgctataatgacaatcaaatcgatcagtggaggttgagcacctactgatagtcatgccctctggtcgtgtccttgctgaggacgcaacaatgcctggttccctatgagctcactttgagcctcaatatgttcataatttcactgctggcttctccgcatcgttagcacatctgccagtcatagcctgctgagagaagcctcgagccacatcatacctagagacgctgctggggaaggtcaggacacccaagaagcttcgggagtgtgtgtctgtgttggtttgagagaaagtagctgcccctcattctggccagtgctttccagtagccatggggctggctacaatgaagcaaaactgtccatgcaaaagaggaagacaggtcactttacaggagactttgcatcggg

SEQ ID NO: 679004 - DNA, 104 bp, Homo sapiens
aaccacgaaggtcagaagtcgtgaggcccgtttcacggtctgtattgacgtagcccactgtagtataatatggcaaaggagaattaagattgtataagaaatta

SEQ ID NO: 679005 - DNA, 133 bp, Homo sapiens
aacatcgctttgtctggttagggagtcaggtgaggatagtgggtgtcagggtgagtgagagtgtccaggctggggagtgagggatccaggtgagtgaggcaggcattccaaacctggaccttcatcacctttt

SEQ ID NO: 679006 - DNA, 102 bp, Homo sapiens
ggattcagatcatcatcccacacaattatttttctttctttccctcctccaattaataacatcccatttctcatctgacaaaatgtaaacacactcccatca

SEQ ID NO: 679007 - DNA, 255 bp, Homo sapiens
  misc_feature (122)..(122): n is a, c, g, or t
  misc_feature (194)..(195): n is a, c, g, or t
tcccaaggaatgaggaattgcgggtcatatggtaattctatgtaacatttgaggaacatcagactgttttccacagcagctacatcattttacatccccactagcaatgtgcgtgggttccnagtttctacatctcttgggaaggatagaggaacgtgaaggaattccgagatcgtgtgtgtgtgatacagtgnntagcatacatatgaactcaacggcacatatcgtgtactcaatttctacatccttgggacg

SEQ ID NO: 679008 - DNA, 475 bp, Homo sapiens
ccatcactcttcacagaactagaaaaaacagttctaaaattcatatggaaccaaaaaagagcctgcattgtcaaagaaagactaagtaaaaagaacaaatctggaggcatcacactacctgattcaaactatactatgaggccaaagtcaccaaaacaggcaggtactagtacaaaaataggtacatagaccaatcgaacagaatagagaacccagaaattaacccaaataattacagccaactgatcttcgacaaagcaaacgaaaacataaagtggggaaaggacacccttttcaacaaatggtgctgggacaatcggctagccacatgtaggagaatgaaactgcatcctcatgtctcaccttatacaaaaataaactcaagatggattacaaatttaaactaatacctgaagctattaaaaactctagaagataacttaggaaatacctttctagacattagcttaggcaa

SEQ ID NO: 679009 - DNA, 222 bp, Homo sapiens
aggtgggagggggagggtggggtaggtcccccagcaaaaaaaagggacaggagccccccaggcaggaccaaggagtcgggaggcccctgccttttgtcctccatggtgagggcacagatgtctccccaaagcccagcgctggcagaatggattttgctcctggctttgcttttgcggcttcggtggagacagttatggaataaaatgttccttgcccccaga

SEQ ID NO: 679010 - DNA, 240 bp, Homo sapiens
actcgctggttttatccaatatcacgaaactcgttggaccgaaatacaggcatctctctatctcaatctgttgaagtacagacgcctatctcttcctgcaatggggtcaatcggcttggagactaccgtgtggtcgatgcaggcacaacgcgcccaacaagcgccatggggatccgttgcttgagggtgcggctgcaagagccaggctgcgagagcttagactgccggcccagagcctct

SEQ ID NO: 679011 - DNA, 432 bp, Homo sapiens
gataattcctaacgtcatcattgcccaaaacgctttgtatttcagcatgacgaatacgtaaggcgttgcgaatggccacccaaatattaagccggtggttgagaataaaacaaaaaaaagtatcactcttttagattttttttgatcctttatcgactgctcgagattttccattcgtgtaccccagtattggaaacaggccggtatagatgcctttattttaagtttcctataggtcgttgtacaagaataactagaatagatatttctatcgttactgcgtttccgtataattgcaatgtacggaatttaaatgcgctaagagtgccggaattacagagctttatcagaacttaatttgtattcttattttgtactcatgtcatagtacaaaagcatcgttagcagccaaaggcgtaatgccaagggggg

SEQ ID NO: 679012 - DNA, 461 bp, Homo sapiens
ggaccccaccttttgatagtgacaggaggcagacaaatcctaggcagacagggacaggttcccagtgaaaccccacctccgagccaaagacagtttaaagcctgaaagccaagctacaaattaaatcctcagcctggattgagaacccatcttcccatttggctgctttcctctgattgatccccacccttcacctattttacatgtacctatcttttcctaattcattttctacactggcatgcccacctttgagtggtacctttgtttaagccttttttgcataatcagaagccaatcagcatgcactcccccattttgagcccataaatgccccggacccagccacactaggagagaaaccacctgacttcaggtcgggaaccacccgtgcatcccctctctgctgagagctgttccgtctctcaataaaattcttctctgcccttctcacaaaaaaa

SEQ ID NO: 679013 - DNA, 441 bp, Homo sapiens
  misc_feature (46)..(46): n is a, c, g, or t
  misc_feature (111)..(111): n is a, c, g, or t
  misc_feature (149)..(149): n is a, c, g, or t
  misc_feature (162)..(162): n is a, c, g, or t
  misc_feature (253)..(253): n is a, c, g, or t
  misc_feature (268)..(268): n is a, c, g, or t
  misc_feature (295)..(295): n is a, c, g, or t
  misc_feature (312)..(312): n is a, c, g, or t
  misc_feature (398)..(398): n is a, c, g, or t
  misc_feature (401)..(401): n is a, c, g, or t
tttattcctgtattaggaagcgttttattgaccagcagagcagggnatattcatttagcagctcagcttcagaccctcctctcccacatccctttaaacaggtgtgtaagntcttttaaatgaaaaaggatttccagagtttccagggnaagaaccaggggnttccctgggccaaagtaatcccattccaatctccccactggtcagacaccatcaccccagcccacagtgaccgtgggccttagtcctgggnatcggttttcagagnggtttggtacttccccctcatctcctngggtaatggaaccaggntggggaagggaacctgcccttccacttcacagatgaactcccgcaggcagtactttcgagggccgaagttggctgggtgagaaagntgntttttcttcctcccccctcttccctgagagtagattcagt

SEQ ID NO: 679014 - DNA, 825 bp, Homo sapiens
tcggcacgaggatctccgcagagagatgagttgaccacctgaccattccttcatctgctgtgggaagggatccttgcaccggatttctgaagtgtttgactgttggtttgagagtggcatgtatgccctatgctacaggttcattacccgtttgataacaaggagggagttgtgaggatgcttttcactggcaggattttgcattcgtcgcgtacgggcaattcagtagctcaatagccagcaggatggttttttatacccctggctagggtgactgtgccacgtggcacctcattgtgtggacaactcagcacattctcaatgcatacgctatagtatgtcgagagtgtggactatgttccatggccacagttgtatgcgccaacaaaactgagccaatacgggaatagacatgacattgatgccagagttccaggtatatgccatcgatgccatgaaggtatggatgctgatgacacctgcagaattatgatctgagttaagctcgcgcccgtgttgggtgaagaggcagaatatacctcgcgtcttggaaaggaagagtggtgtgcgggagcgtcctataaggatgctagcgtgctcgccatggtgacaagtgccgtatcgcgttgcgttatatcccacgtaacagttctcgcatggctccggcatatggtagcgacatgaaatcacgacattactcgtagaatgaggagcgacggttgaggaggaagaggccccaactaattaacaggagcgggttggatcctggtcccgttccagtgcaaggtctctccatggggttcctttgggcacgtgacatgggcg

SEQ ID NO: 679015 - DNA, 581 bp, Homo sapiens
  misc_feature (223)..(223): n is a, c, g, or t
  misc_feature (237)..(237): n is a, c, g, or t
  misc_feature (307)..(307): n is a, c, g, or t
  misc_feature (315)..(316): n is a, c, g, or t
  misc_feature (322)..(322): n is a, c, g, or t
  misc_feature (325)..(326): n is a, c, g, or t
  misc_feature (363)..(363): n is a, c, g, or t
  misc_feature (366)..(367): n is a, c, g, or t
  misc_feature (373)..(374): n is a, c, g, or t
  misc_feature (377)..(378): n is a, c, g, or t
  misc_feature (380)..(380): n is a, c, g, or t
  misc_feature (386)..(387): n is a, c, g, or t
  misc_feature (389)..(389): n is a, c, g, or t
  misc_feature (391)..(391): n is a, c, g, or t
tcctgactaaatgccagatgacagaggctatacagctgcttacttgttgtatgccttcactagcatcaggtctatcgcacgtctggccaatattgatgcagacatgctcccttaagctgctcgagaaccccagattcttttggatcatgagacggaatggaactagccggtgcattcacgttccctgagattctgccaagattttagatgacttatttctccncactctctgtgatnatatatatgagctggcaactgctttcacagagttctatgatagctgctactgtgtggagaaagatagacngactggannaatatnganngtgaacatgtggcgtatgctgctatgtgaagcagtancannctgtcnnggnnanaggggnncnanatcctgcgcgaataaaacctgtccaaacggcatcgtaatccttcataggtttgaacactgtgtcgtctctaccaaagctggccattggcactgtatgctttctggacaactcaatgtgagactactaagctatacagttaagagaagaattctgtcaaacgcaataacaagacaagaataacagaacatt

SEQ ID NO: 679016 - DNA, 112 bp, Homo sapiens
aaagctttcacttacactgtagcagcgtctggtaagaggaggtgtgaatatggggtccccatcaaaaatgggaaggttcggcggaaattagaggtttgaaggggcttattga

SEQ ID NO: 679017 - DNA, 490 bp, Homo sapiens
agagcggccgcctactactactaaattcgcggccgcgtcgacataaaaaatgggctgggcatggaggctcatgcctgtaatcccagcactttgggcggctgaggcgggcaaaccacctgaggtcgtaagttcgggaccagccttgccaacatggtgagaccccatttctacttaaaaatacaaaaattaggcgggtatggtggcacatgcctggaatcgcagctactcgggaggctgaggcgggagggtcgcttgaacccaggaggcacagattgcagtgagccgagatctgaccactgtactccatcctggacaacagagcaagactctttcaaaaaaaaaaaaaaaaaaaagtcgacgcgggtcgcgaatttagttgtagaaagtcgaacccggaaattccggacccggtatccggcaggcgtaccacttttatctaatgagagtcatgatagagtcttggcgtttatatgggtattagctgtgtcct

SEQ ID NO: 679018 - DNA, 737 bp, Homo sapiens
cccacgggtgctctgcgatggtctccacaagagtgtgttagaatatattgtgttgcactttcggggggggctattcctcttcgatttttgtggggtctaagatttctcctcacggcgtgtcaccatcgtgagaagttgttgggtctgtgtccccttttatagggcgcccaccgctgtgggccccacggggaggtgacccgtgtttggtgggcctctgttgtgcgaggcgctcgggcgttcttagcatagcgttttgccgcccccacttgtgttgtgaaaccgcttgtgtattgttttaactagtgacgctgcggttgtgctggtgacactcttctagggatacacaggggtgttcacacatgctgagtgctctctgcccaattctttcaggttcctgataacttctttttcccacgaagaaccttggtttctggtggccaccccaagaagtcccctgggttcacagcttctctttctgtttctggagactgagagacagctgatgcagcctgaggagactactttcagaccccattcattctgaaagtgcccacgagagcaccacatggcagagtaaagttcttcatccacgagaataacagcattcctgcatccttccacgagttcctggttccttcaggttcatcccctttttttccttccatggattatgtaatacatgtgtaaagttttaattcaactttaaaattggaaattttgaaaaagaaaaataaaaa

SEQ ID NO: 679019 - DNA, 454 bp, Homo sapiens
  misc_feature (125)..(125): n is a, c, g, or t
gctggtttttgcctctttgacatctgtcatcagtatttagaggcgtgagcaagtgaatgctaacagcgtataacataacatttcttaaaaaacaattaacttgtgcttataatcacagtgtgttnccagagcactggtcagatcacattctaaatgaccaagaactggtttaaaaaacagaaaatacaaccatgggaaggaaatcttaaatgaaaaagcatctcattgtaggcattttgtgcctcaatattttttaaccttggggggccccaattgtttggtttcctggtactcatgtattttttttccagatctctttccccaagtggctatggtaagagtattctgctgcgtgtggatgcagttatacacattaaagcagatctggagtctgaagtagctataaagcagctataaaacagaaatacatgcatagttgcagaaaccatgatag

SEQ ID NO: 679020 - DNA, 161 bp, Homo sapiens
ttgcggtgactctacaggatcccccagcaagaatggcatatcagactaggaagcagataggaaaatgattatgcgggcgtgatcataaaggtgatagctcttctatataggggaagtagcgtcttgtatgacctacttgcgctgatatgccattcttgctg

SEQ ID NO: 679021 - DNA, 292 bp, Homo sapiens
gagtaggggactaccatcatggacggttcggctggcttacagagctccgcactgcatgtcttgtgtcccgaaaagacctttgccatatagggcctaattataatacatttaaatgttaagtctccaccccaaagtgaccatgggtgtatgttgcatgcatgtttgttcaatatgcatgtgtcagaaccactttcatgaatattcatagctcctcatgtaacctgttgaatgtgtatgtttagtcaatccattgagcatgaagctcctaccctccccaccttctcagacactg

SEQ ID NO: 679022 - DNA, 267 bp, Homo sapiens
  misc_feature (14)..(14): n is a, c, g, or t
  misc_feature (27)..(27): n is a, c, g, or t
  misc_feature (35)..(35): n is a, c, g, or t
  misc_feature (37)..(37): n is a, c, g, or t
  misc_feature (45)..(45): n is a, c, g, or t
  misc_feature (87)..(88): n is a, c, g, or t
  misc_feature (104)..(104): n is a, c, g, or t
  misc_feature (116)..(116): n is a, c, g, or t
  misc_feature (142)..(142): n is a, c, g, or t
  misc_feature (145)..(145): n is a, c, g, or t
  misc_feature (163)..(163): n is a, c, g, or t
  misc_feature (166)..(166): n is a, c, g, or t
  misc_feature (188)..(189): n is a, c, g, or t
  misc_feature (200)..(200): n is a, c, g, or t
  misc_feature (209)..(209): n is a, c, g, or t
  misc_feature (216)..(216): n is a, c, g, or t
  misc_feature (220)..(220): n is a, c, g, or t
  misc_feature (222)..(222): n is a, c, g, or t
  misc_feature (235)..(235): n is a, c, g, or t
  misc_feature (263)..(263): n is a, c, g, or t
  misc_feature (267)..(267): n is a, c, g, or t
cttcgggtggaccnggtcaacttcaanctcctaancnactgcctnctggtgaccctggccgcccacctccccgccgagttcaacccnncggtgcacgcctcccnggacaagttccnggcttctgtgagcaccgtgctgaccnccnaataccgttaagctgganccncggtggccatgcttcttgcccnntgggcctcccncgagccccncctcccngtcntncacccgtaccccngtggtctttgaataaagtctgagtgggngggn

SEQ ID NO: 679023 - DNA, 1007 bp, Homo sapiens
ggtttgtcttccattatgatttggcagtttacttttgtcttcccatcgtctactaaataatacaatagaattagcgtggtgggtggtggtgtaccccttgtgatcccagctactcgggaggctgagacaggtagaatcacttgtaacccaggaggcggaggctgcagtgagctgagatcacgccattgcactcaacgtcctggcgagcagagcgagactccgtctcactacaaaggaacagttcaatgacttgagtacccagaagaaatgtcgtgaccgtgcaaagtagcgttgctcatgtgtcctttgagacaatgatgtagctagtgcaggtgtgctcacaatttcagtttcttctactacatgtgtggtaccatttgtatttaagactggtgtcttagcaggaaactttagaggtggtgtttctataaggaaaatacgaaatgtcagtgctgtggggggactcgctgactagacactgcgttagcgaacggtgaattcttcaggattctgctccccgggatagaagggtactggcatggggatgacttgtgagctcgtttaccatctaaaaatcagttattgtccagatgcttggcgccaggtgcttccttggaaaagctcaaaccttcttaatccttggaatagtacttaacagaaagggcaccttggcggtgaatacaatggtcggttgaagcaacgagatttttacacctgatgggcttgaggcatttcgacaacgccctaaggatgagccaggcaccaccaatgggttgaccacctgggaacccaaactgaggcggctgggtaacaaaaagaacatggagtaagaaaaacaggccaagacatggggaaaataccaaagggccacgcaccacagacgtgtaccatgtcacacagcggggccacgtagatcggcgggtccccgaaatacaacgagatgaaataaatataacgacaagagaattgcaccatgattaacagctacagagagaacggacagcggg

SEQ ID NO: 679024 - DNA, 629 bp, Homo sapiens
  misc_feature (183)..(184): n is a, c, g, or t
  misc_feature (189)..(189): n is a, c, g, or t
  misc_feature (221)..(221): n is a, c, g, or t
  misc_feature (226)..(226): n is a, c, g, or t
  misc_feature (323)..(323): n is a, c, g, or t
  misc_feature (360)..(360): n is a, c, g, or t
  misc_feature (468)..(468): n is a, c, g, or t
  misc_feature (472)..(473): n is a, c, g, or t
  misc_feature (482)..(482): n is a, c, g, or t
  misc_feature (492)..(492): n is a, c, g, or t
  misc_feature (498)..(498): n is a, c, g, or t
  misc_feature (502)..(503): n is a, c, g, or t
  misc_feature (516)..(516): n is a, c, g, or t
  misc_feature (519)..(519): n is a, c, g, or t
  misc_feature (534)..(534): n is a, c, g, or t
  misc_feature (582)..(582): n is a, c, g, or t
  misc_feature (609)..(609): n is a, c, g, or t
tgggtggcctttttgaggccacccttgtggtctcttccattgccaacctgtaaccattatgcccaaagacaccaggttagcccgcgccatctgtggagaacgtgttttaagatcccctatgtggggaaactttcttttccaaaaaaaaaaaaaaaatttctcttctccctgttattggtagtnngacgntagaatattttttttcatggggtcaaaaggtncctangtatatgattgcgagtggaaaaataggggccagaaatcaggtattggcagtttttcccttttcatttgtgtgtgaatttttaatataaatgcggagncgtaaagccttaatgcaagttaaaatgtttcagtgancaagtttcagcggttcccctttataataattataaataaccctgttaaatttttttggccaacgccagcctttgggttttttttaaaacaagtaaattttttattganggcnnctaaatggngtttggagcntttttntcanncagtagattcccnccnttccctatacttttntaactgagttgtcctccatgcaaggacatgtttttaatgttgtctgtnttttgggctgttcctgtaagtttgctnttaaaatacattaaactata

SEQ ID NO: 679025 - DNA, 445 bp, Homo sapiens
caatttcaagcaagagatccattagggcggcgatgctgtggtgttttcctgtgcggaccattcattctaaagggagtcggtgcaggatcccgcttctgctttggggccaaactcttctgtcactatcagtgtccatctttactggctccctcagcatcagagcatgcatcaggggtccacacagggtcagctctctccaccacccagctcttccctgaccttcacgaagggatggctctccagtccttgggtcccgtagcacacagttacagtgtcctaagatactgctatcattcttcgctaatttgtatttggattcccttccccctacaagattatgagaccccagagggggaaggtttgggtcaaattttttttttgtatgtccagtttcctgcccagcccctgcagccttgtaactgcttaataaatgacctttccctga

SEQ ID NO: 679026 - DNA, 467 bp, Homo sapiens
aatatagctacatgtctggctctttggaatgattgtctcctctggatcttctgcccctcattcctgccctcaaactcagcctttctcaaccctctttctgcccttctttatcctttgcctgagtgttgacatggactggcctgtacctaaccactttcacgtgaattatttatgaccaatctcctatctacctgatagccttcccatctaccactatcccattagttattccaaagcatctttattatcttcaaattttactttccctttgccaataaaactctaagtttccatatgaatttcccagcaaaatttttcttcccttgaatcttctttactgactaaatcgtttggcttatcatccttgtcattctttccataatgaatctatcttccctgaccactctcagaccccttcgagatccagatattagctggctgaagaaagaatgcccaacaaaacttct

SEQ ID NO: 679027 - DNA, 168 bp, Homo sapiens
tcgtatttctgccaacgactcgtttcttccccacgaccgtatctaagtcccgcagccacgaaacattttttgaacatcagtaccaccctcccatgggtattggcctcatccttttacagggcaagtctagggcgaaaagtagaaaggatgaaaatccctgagagaggt

SEQ ID NO: 679028 - DNA, 160 bp, Homo sapiens
ggtgatggcggcgatgatcggctgcagcatgtcgctgacaggccgcggccgttgcggttgaactggaaccaggccattgccaggccgatcagcgcatagatggcacacgggtgcaggccccagtggaagaacgcatagcgcattgaggcgcgcgcggcat

SEQ ID NO: 679029 - DNA, 367 bp, Homo sapiens
atggccacttgggttcaccgtctgggggggctgcttattagtactcctggactaggggggcaaagagatcacaggtgtcatccaacgtaagcagtgtactctgacttcctacctacttgagagatatccacttcactgcccagctctaaactaaaggaacgatctggagtggaggacaggacccctggggaaaggggaagaggttgtaagaaggtgaagggggcaacctggtcgggttttgttaaactttctgggagatggccaattgggttcaccgtctgggggggctgcttattagtctcctggactaggggggcaaagagatcacaagtgtcatccaacgtggtcagtggccgtgtaccgagct

SEQ ID NO: 679030 - DNA, 105 bp, Homo sapiens
tatccagatgtattcacactcaaagggctggttcttggaatgatcctgtgaggacactaggactataagtatgccacacgataatggccactggccttagactta

SEQ ID NO: 679031 - DNA, 780 bp, Homo sapiens
gatcagaaacatttgtgtggctcagattaaagattaaactgaaaaagtgggcaatattggggaaagatgctactatcacttttaaaagttaaaaagttaatctcttaatacctattcagtttcaactgtctttggcaagaatactttataaagaatgtgctggttaattgatattgtatcccatcaaaaggctcatggtatatggttttgtaccttcagagatgcctagattgatcaacgagtttaggtggtgagattgcaagattctctgttaacctctcactcattaataatctttccataatcagaggttttttttttttttgtttttgtttttgggagaaagaccccctcttgtaaaatataatttaattattataatataatataccccttttggggtttttttctcgcccactgttgtgtttcccccggctccatttgggttcccgtaaatttaagggagaggggtttccatataaaaaccgttaatttttgggaaagtgtacgacgcgctttctccttttttttacattgggcgaccttttgtgtacggggggagattctccacagaatttggggcttaataccttttctcctaaggggacccgtggttttcctttccaacaggacgcatcttcatggggcgcggggtatcccggaatggggcggctggacggcaggggcgggtggtttctggaccactttccttcttgccccggtggtccatgggcgtttgggtcagatcccgcccctgttaggggtctcgcatggaatcta

SEQ ID NO: 679032 - DNA, 342 bp, Homo sapiens
agacccagtaaataatcctggcgcaagccaagaggaagaagtgctcaaagacaaagttcgggacaggttgattattcttgtcctgtccgacaaagcgacatacgacaagctctgtaaggaggttccgaactataagctcattactccagccgtggtctctgagagactgaagattcgcggttccttggccagggcagcccttcaggagctccttagtaaaggacttatcaagctggtttcaaagcacagagcccaagtaatttacaccagaaacacaaagggtggggacgctccagctgctggcgaagatgcatgaacaggttcaatcagctgtacatttgg

SEQ ID NO: 679033 - DNA, 186 bp, Homo sapiens
  misc_feature (96)..(96): n is a, c, g, or t
tgaaaaaaaaacactgatgaatagttttaggaatataaaaatatccaaccttcaataaggtaaaattcacaatgtttggcacctatgaaaaaattnccagggccacacgcagttgttcactcctgtaatcccagcactttggaggccaaggaaagaggattgcttaaggccaaacaccagcctggg

SEQ ID NO: 679034 - DNA, 831 bp, Homo sapiens
cagcagcgacggtagcagcagcattgcctgtagatctatggtggtgtagagtggtgtggaggcacacgatccgaggtccttttagtctcagaggattggaagatcctggcagaagcagacggactgagcacaaaccactggctgatctggtgacatgacaagtgtgtggagatgtgatcaatgagatggtgaacagggccaaactggaaagcaggggtggatcctctggtacctgctgcgaaggcttggagcctatctctgagcggtggtggaccagtgagtgactgctgtgggagtgatcctgatctgaggagctgagggaccgatttccctacctgagtgaaagctacttaatcacacaccgatgcctgcctggctccatcgccacagctacacctggatggtggagtatgtgctcatatcttggaacaggctccaactgcaggctcatacaacgcctgatggctccgagagtggctgcgtgcggctggtggccatatgattgggtgatgagggttcaggttgaggctcactgactggcccaagctcacgagggtacctaggatctagctacctatacgcttacagtaccgactagtactagagctactaagcttaagcctatgggtacagttgaggaccctatgggggtatcacatgggggacaactcctgaacctggccattccatgtggcaggatcatgagctgagaatataagagtgtgcaaaatgctggacgaagctgcatgagccgtgggtctccaggcagagatactgtgaacccaggaactccagatacatcgctcaggaaaagggcctggcatggtgtgg

SEQ ID NO: 679035 - DNA, 495 bp, Homo sapiens
  misc_feature (44)..(44): n is a, c, g, or t
  misc_feature (69)..(69): n is a, c, g, or t
  misc_feature (73)..(73): n is a, c, g, or t
  misc_feature (117)..(117): n is a, c, g, or t
  misc_feature (131)..(131): n is a, c, g, or t
  misc_feature (176)..(176): n is a, c, g, or t
ttttttttcctaatttattttaagttatcctgctgcaaaggagnatgtggttttttcattgcttgaaanctgnatattttcatatctagagttatgtcctgtccaggcaattcaaanaagcagaggccagnctgcctagtgcagtgtgcttggatttttcacttagtgtaaagagnccgtcagatactgaactgcatgaacgtagattttaattcttcatgtagtgctcttctgtctggttaaaggagtgtataggcactgaggcttcattgccttctgaacagtttttaaaagtttggctctggtgaagattgcattatgttatcttcatattccagtgagttattgtcttatggaatatttatcttaattactcatctgctgctaggaatatttcagtcttgttactggatataattactctaaaattctaacccttttggatgttacaaaagtcagatatgtaaaggttatactttgggtactgctgctcta

SEQ ID NO: 679036 - DNA, 934 bp, Homo sapiens
tgggaaaatgacaaagggaattcctcttttggaaagcgtccaaaaaaacccccactttgggcccccgtggggttctagggcctacccctcttcaaaagtcccctggggcaaatggtgggcccacccctggccaaggccgcaaagaagcaacgtaataacggggagctggccacgggctaaacacacgagaaataccaccggagaacagtgccacaatgagaggcgcaccataaaaatggtataccggaagattcagcgcatgggatcccggggaaggagacacaacaccctaaacccaaagaagggcacgctggtgcgacgcatcccagatctcatcctataaaaaagtgatccacccgagtctagcgcagtgccaacacaaagtgctcgcgtgggttgtaacaaaacaataacaacaacccaaacaaaaacaaacaaacaacgcaagacaaacaaaacacaacacaacaaacgcaaccaccaccacagacaaccacacaacaccaccaacgcctactgcaccaactagcagcgacgaagggccgacggcgccactaacaaccaccacctccccaccaacgacgcgaccgacaccaacaaccgcaccacacaccaccccacccttgaccttgcgtagacgctgagccacgcccccacccacacacagacaccgccacccacaatacaacacgacgcaccaccgcgcggagcgctgatgacccaacaacacgccgcccgacgaaccaaacaccccacgcctcggccacccgtgcgcgtcatctcccggacgaccaacacccacgcacgtgtggccggaccaccaaacaccgaagcacacccccaccaccaacaaaccacacgccaccacgccctgacaacaaaacacccccaccgggccacacgcgcagacaccaccacaccacagggcgcacca

SEQ ID NO: 679037 - DNA, 150 bp, Homo sapiens
ccgctcccggtagttcctggacttcctcacgcggccggtactgcgcgaggctttcggctgctgcgggccggccagtacccgcgcgccctggagctgctctgcgcgtctgccgctgcaggagaagctcaccgcccactgccctgcggccgc

SEQ ID NO: 679038 - DNA, 950 bp, Homo sapiens
  misc_feature (849)..(849): n is a, c, g, or t
aatgctgataggagctcggagactctgactccggctgtacaccccaattattgatgcgtctagcctctgcctagtgagtatgaagagggcgactcgcacctgactccagatgatgtatgctctaagcagacatggatgagccgtaatccgagtcagaagagtcacgcgaaacttccaactagtctcccttacatagtgaagggaactctgttatagagaatgaggcttcgctatcgaaaggagttgcacactgaacttccttgagctgtggtgggggccaagtcggagacaatttggaggcgttgcccacggtgtagaggcaagtgtcgcgcgactagtcacactagctatgtctaaacgcaacgtaggcacacgtactcccttattgtgaatggcatctgtgagttacagtacaattgacagaaatgcagttcacccgtcacacagacacatcccatccagagggtcctctaagacaggtgacacttatacactctctgcggagtcttcaacaacttttcagtgcaaaggtccgtctgcaccctttcagagccagacgcgaggcacaagctcttaatatcctcaccgaacaccacagttgacccaatgacggtccaacgaaagggttttggagacccaaaccgcctgaattaacgactgcacatacgatcctaattaaccatactagactcctgtgaatttcccaatagtcaatagcgtttcgcatttgctacaaacgcgcataacccaaacggtaattatcccccatacaaggggagcacttaaagagcaaggactgtcccacaaattcggctttgactctttcctaatggaaggttaccctaggtnaacttaccaccttggagaattcaccggtggtgtctccacgtgaaaattccttcccatagtgcttcggcggcattccagtggaaacaaatcgctggatcagg

SEQ ID NO: 679039 - DNA, 384 bp, Homo sapiens
ccgtaggtatatcagtgaggtccaaatacctcccaagaagatgataatcctgaaaagcgaagcttcgcttccgaagagtttagtacttttaataattataatgacgacaatctctttacttactcggatgtctactatcctacaaagtacaccacatacgtagccccatcaggctcattgcagccccgtaaggcctatccggctctttcacaacacccttctttcaatctaaatgcggctacttatactatcactttacctaaaaccgcatccaaaccagatcccacatcggactcttatcccctttagtcacttacttcggaggatactaccgtttatgtcgaggataactatcctgtatcaccttcacccgatgttgcatca

SEQ ID NO: 679040 - DNA, 153 bp, Homo sapiens
ggccagggtaatgatgtgggcctttggaaattgacaggatggaggtgagctgtctcagctcgtctgctatccagctcttactggattatgtcacctggctggtagaaaggtggcatctgtagcctgaccaggcttcagtgccaggcactgaag

SEQ ID NO: 679041 - DNA, 447 bp, Homo sapiens
cggatgctgactatttgatcagtagatatagacatcttcttgtagtttaacttcttcagtgactaatgagcttaagcaccttatcttatatctattggtctttagcatatcttatttgtaaaacgtctgttaatctttctctcatttttccaccaggctgcctgatgtttgatcaaattcataatatatttgaggcatatgtgtttttaattttcatatagcttatttttatcagtcttacggttgatgctttttgtgtgttgttcagtaaatcctttccatttcaagatcatgaagagatatctcttgtattataggtttgctttttagatctttattttttattttattttattttattttggtcctgtcgcccaggctggagtgtagtgagctgagatcacttcattgcactccaggctgggcagcagagcgagactctgtctc

SEQ ID NO: 679042 - DNA, 472 bp, Homo sapiens
ggagtgcatggccacagccacctccacccccaagaaacctccatcctgccaggagcagcctccaagaaacttttaaaaaatagatttgcaaaaagtgaacagattgctacacacacacacacacacacacacacacacacacacagactacttcagtcgtgggcgtggcagagggggacagatgcttcaggggagggggcgtgatgtcgtggctaggggcgcctgatgctccagggacgccaccagccagcctctttcccaggccgagcgaggacgaggcgtgctctcgtggtgtgatgtggcgtgacagacgcaggtgtcctgcagggccaccgagcgtgtgtggagtgtcaccagagagagggggctctgatgtgccctctgcgggggaggggtccatcctctccgggtgtgagcccactctctgtccgctgttctcctatttcgtgctcttcttgccacacatgtgggc

SEQ ID NO: 679043 - DNA, 437 bp, Homo sapiens
tctcgattccgtgggtggtgtatgcatggccgtacatagttggtggagcaataggtggtgatgtcgatcggcgagtttatcgattacagaacatgttcctctacaggagatatgaaggcaccgccaggtcctttgagttatgaggctgtggcatcgtattgtgctggcgagcaggttggtggatttagctgtaccatgagttgagggccaaacatagtggggtatctaatcccagtgtgggtctataattattgtgtgtccatatatgtaaaagccactttcgtagtctattttgtgtcaactggagttaattacaactcaggtgagttttcgcttcattaggggagggggtgatctagaccactcttgacgccggtttctcttgacttgggttaatcgtgtgaccgcgttggtaggcacgaaattgaccaaccctg

SEQ ID NO: 679044 - DNA, 80 bp, Homo sapiens
ttaaaatgacaaatgcaaaatggaaacacctatgagccaaaaatttgtcacagaattttgagacccattaaaaaagttaa

SEQ ID NO: 679045 - DNA, 2993 bp, Homo sapiens
  misc_feature (1041)..(1043): n is a, c, g, or t
  misc_feature (1894)..(1894): n is a, c, g, or t
  misc_feature (1903)..(1903): n is a, c, g, or t
  misc_feature (1921)..(1921): n is a, c, g, or t
  misc_feature (1930)..(1930): n is a, c, g, or t
  misc_feature (1937)..(1937): n is a, c, g, or t
  misc_feature (1939)..(1939): n is a, c, g, or t
  misc_feature (1966)..(1966): n is a, c, g, or t
  misc_feature (1975)..(1975): n is a, c, g, or t
  misc_feature (2008)..(2008): n is a, c, g, or t
  misc_feature (2026)..(2026): n is a, c, g, or t
  misc_feature (2044)..(2044): n is a, c, g, or t
gtgtcaagttacagaggcgcgggaatcggcccctgcgctcctcgccagccgccacgacccacctctgcccatgggccctgcatgtgcgccccttcgcccggggactgaaactgactggcccgggagacaccccgaggcgcccagaaggactgacagcgcggcaccaactgctctgcagacacttgaagggaaagactgggcggagagaaggagagccggtcagattcccctaactttcctggacttggaacgttcttcgaaataacttttttctccacctaggttgtaccccaattaccgctggttgtgctttttcggcacttcctctcctactgctaattttccgtcctctttgccgggagcagcggaaagggacgttttccagcgatacaagccctttccccccctgccccgcagtttggatagagccttttggcagcggctgtcgcctttatttattctatttatttatttattggttctcaagacgcgagaggatggtagcggagcgcacccacaaagcggcagccaccggtgcccgcggccctggggagttgggcgcgcccgggacggtggctctggtggcggcgcgggcggagcgcggcgcacggctgccgagtccagggtcgtgcgggctgctgacgctggccctctgctcgctggcactcagcctgctcgcccactttcggacggccgagctgcaggcccgggtgctgcgcctggaagcggagcgcggggagcagcaaatggagacagctattttgggacgagtcaatcaactgctggacgagaaatggaagctccactcaaggaggcgccgggaggccccaaagacatctccaggatgtaactgcccaccaggacctcctggtcccactggaagacccggactcccaggggacaaaggtgccattgggatgcctggacgtgtggggtcccccggagacgctgggctgtccatcattggtccccgcggcccccctggtcaaccaggcactagaggtttccctggatttccgggtcccattgggctggacggcnnnccgggccacccaggaccaaagggcgacatgggtctgacgggtcccccaggacagccgggaccccagggacaaaaaggagaaaagggtcagtgtggagagtacccacaccgggagtgcctaagcagcatgccagcagctctgcgctccagccagataattgccctgaagctgctgcctctcctcaattcagtgcgactggctccacccccggtcataaaaaggcggacattccagggcgaacagagccaggccagcatccaaggtccaccagggcccccaggcccccctggaccaagtggacctctggggcacccaggactgccagggcctatggggccacctggcttacctgggcctcctggaccaaagggagacccagggatccagggctaccacggccggaagggagaacggggcatgccagggatgccaggcaagcatggagccaagggggcgcccggaattgccgtggctgggatgaagggtgagccagggatcccaggaaccaagggtgagaagggggctgaaggctcccctgggcttcctggcctcctggggcagaagggagagaaaggcgatgctggcaactccattggaggaggcagaggggaacctggccctccagggctccctgcgcccccagggccaaagggagaagcaggtgtcgatggccaggttggccccccagggcagccaggagacaagggggagcgtggagcagctggagaacagggaccagatggccccaagggctccaagggagaaccagggaaaggagagatggtggattacaatggaaacatcaatgaggctctccaggagatccggacgctggccttgatggggcctcntggtcttcntgggcaaattggcccacntggagctcnagggatncnaggccagaagggggagattggactgcnaggccctcnaggacacgatgggaaaggacctcgcggtaaacnaggagacatgggccctcntggtccccaaggcccccnaggaaaggatggacctccaggagtgaagggagaaaacgggcacccagggagcccaggagagaagggggaaaaaggggagacaggacaagcaggctcaccgggagagaaaggagaagccggggagaagggcaatccaggagcagaggttcctgggctgccagggccagaggggcctcccggacctccggggctccaaggtgttcctggaccaaagggggaagcaggactagatggagcaaaaggagagaaaggcttccagggagaaaaaggagaccgtggtcccctgggactacccggagcttcaggtttggacggcaggcctgggccaccgggtactccaggaccaattggagttccaggcccagcgggaccaaagggcgagaggggcagcaaaggagaccctgggatgacaggaccaacgggagcagctgggcttcctggtttacatggaccacccggggacaagggaaaccggggggagagggggaagaaaggctctagagggcctaaaggggacaagggagaccaaggagcgcctggattagatgccccctgcccattgggcgaagatggcttaccagtccaaggctgctggaacaagtgatgcctctaaccttggattggcctgtgtgtgtgtttgtacatagaatatttatttttatacagttttcactttttgaaaatgccagaagtatgatgcatcttacagattattaaaaaagaaagaaaaaccgttgcatattttgtacagaaaatatcaacctcttcccttttgtttacaagatgttttgtataagcctatgtctctaatacattttttgtttggtcgtaatgtctgcatgatatttgtgcacatttattaagtatcgaaggttaataaattgttgtgtcctggtgccaaggggggccagccagaactgaggtgctggctagctcatgtgtgaattcg

SEQ ID NO: 679046 - DNA, 2927 bp, Homo sapiens
  misc_feature (1041)..(1043): n is a, c, g, or t
  misc_feature (1828)..(1828): n is a, c, g, or t
  misc_feature (1837)..(1837): n is a, c, g, or t
  misc_feature (1855)..(1855): n is a, c, g, or t
  misc_feature (1864)..(1864): n is a, c, g, or t
  misc_feature (1871)..(1871): n is a, c, g, or t
  misc_feature (1873)..(1873): n is a, c, g, or t
  misc_feature (1900)..(1900): n is a, c, g, or t
  misc_feature (1909)..(1909): n is a, c, g, or t
  misc_feature (1942)..(1942): n is a, c, g, or t
  misc_feature (1960)..(1960): n is a, c, g, or t
  misc_feature (1978)..(1978): n is a, c, g, or t
gtgtcaagttacagaggcgcgggaatcggcccctgcgctcctcgccagccgccacgacccacctctgcccatgggccctgcatgtgcgccccttcgcccggggactgaaactgactggcccgggagacaccccgaggcgcccagaaggactgacagcgcggcaccaactgctctgcagacacttgaagggaaagactgggcggagagaaggagagccggtcagattcccctaactttcctggacttggaacgttcttcgaaataacttttttctccacctaggttgtaccccaattaccgctggttgtgctttttcggcacttcctctcctactgctaattttccgtcctctttgccgggagcagcggaaagggacgttttccagcgatacaagccctttccccccctgccccgcagtttggatagagccttttggcagcggctgtcgcctttatttattctatttatttatttattggttctcaagacgcgagaggatggtagcggagcgcacccacaaagcggcagccaccggtgcccgcggccctggggagttgggcgcgcccgggacggtggctctggtggcggcgcgggcggagcgcggcgcacggctgccgagtccagggtcgtgcgggctgctgacgctggccctctgctcgctggcactcagcctgctcgcccactttcggacggccgagctgcaggcccgggtgctgcgcctggaagcggagcgcggggagcagcaaatggagacagctattttgggacgagtcaatcaactgctggacgagaaatggaagctccactcaaggaggcgccgggaggccccaaagacatctccaggatgtaactgcccaccaggacctcctggtcccactggaagacccggactcccaggggacaaaggtgccattgggatgcctggacgtgtggggtcccccggagacgctgggctgtccatcattggtccccgcggcccccctggtcaaccaggcactagaggtttccctggatttccgggtcccattgggctggacggcnnnccgggccacccaggaccaaagggcgacatgggtctgacgggtcccccaggacagccgggaccccagggacaaaaaggagaaaagggtcagtgtggagagtacccacaccgggagtgcctaagcagcatgccagcagctctgcgctccagccagataattgccctgaagggcgaacagagccaggccagcatccaaggtccaccagggcccccaggcccccctggaccaagtggacctctggggcacccaggactgccagggcctatggggccacctggcttacctgggcctcctggaccaaagggagacccagggatccagggctaccacggccggaagggagaacggggcatgccagggatgccaggcaagcatggagccaagggggcgcccggaattgccgtggctgggatgaagggtgagccagggatcccaggaaccaagggtgagaagggggctgaaggctcccctgggcttcctggcctcctggggcagaagggagagaaaggcgatgctggcaactccattggaggaggcagaggggaacctggccctccagggctccctgcgcccccagggccaaagggagaagcaggtgtcgatggccaggttggccccccagggcagccaggagacaagggggagcgtggagcagctggagaacagggaccagatggccccaagggctccaagggagaaccagggaaaggagagatggtggattacaatggaaacatcaatgaggctctccaggagatccggacgctggccttgatggggcctcntggtcttcntgggcaaattggcccacntggagctcnagggatncnaggccagaagggggagattggactgcnaggccctcnaggacacgatgggaaaggacctcgcggtaaacnaggagacatgggccctcntggtccccaaggcccccnaggaaaggatggacctccaggagtgaagggagaaaacgggcacccagggagcccaggagagaagggggaaaaaggggagacaggacaagcaggctcaccgggagagaaaggagaagccggggagaagggcaatccaggagcagaggttcctgggctgccagggccagaggggcctcccggacctccggggctccaaggtgttcctggaccaaagggggaagcaggactagatggagcaaaaggagagaaaggcttccagggagaaaaaggagaccgtggtcccctgggactacccggagcttcaggtttggacggcaggcctgggccaccgggtactccaggaccaattggagttccaggcccagcgggaccaaagggcgagaggggcagcaaaggagaccctgggatgacaggaccaacgggagcagctgggcttcctggtttacatggaccacccggggacaagggaaaccggggggagagggggaagaaaggctctagagggcctaaaggggacaagggagaccaaggagcgcctggattagatgccccctgcccattgggcgaagatggcttaccagtccaaggctgctggaacaagtgatgcctctaaccttggattggcctgtgtgtgtgtttgtacatagaatatttatttttatacagttttcactttttgaaaatgccagaagtatgatgcatcttacagattattaaaaaagaaagaaaaaccgttgcatattttgtacagaaaatatcaacctcttcccttttgtttacaagatgttttgtataagcctatgtctctaatacattttttgtttggtcgtaatgtctgcatgatatttgtgcacatttattaagtatcgaaggttaataaattgttgtgtcctggtgccaaggggggccagccagaactgaggtgctggctagctcatgtgtgaattcg

SEQ ID NO: 679047 - DNA, 276 bp, Homo sapiens
atataatccgtagaggacatccttatcagaaaaaacagtccttctgctgtttactccatttctaacagcaacctgcagccttcatcccttagtcaacaccatgacagcttctcccatactccccgttcctgcgcagtccgctttctcttgctgccacattctaaaggcttgatattttccaaatagatcctcttgggattatgaatcctattcgcttgaccaacacagttcctttttgtagtactattacttttatccggccggttggctccattt

SEQ ID NO: 679048 - DNA, 496 bp, Homo sapiens
gggtatgacatcgtggtcatcaccgacgactcgcaccacgcctacccggaccaccggaggaaagcaagatcaggcaacaaggactctgcaggagcttggcattgaactggatgaggccacccgctggatctaagggctggatcgcatccacagggtgcggcgcatcagtcactgttttgacctgacgggcacgccctttgcccccacgggcaagaccagcaccgaaacggcactgttcccgtgggtgatttcggacttcgggctgaatgatgcgatcgactccggtctggtgaagacgccacgcgtcgtggtccgcgacaacgcgcttcccaatgcccagacatacaagtcgaagctgtaccacctctaccgggaaccggaggtcggtcaggatctgaaccgccctggcgcagaaccccacgaaccgctaccccagctggtacaggaggcgtataccctgttaggtgccgactggcgtgagacactgaaggcgtgg

SEQ ID NO: 679049 - DNA, 206 bp, Homo sapiens
  misc_feature (132)..(132): n is a, c, g, or t
tgcggtatctagaggatccgggatgaggaagtactaggtcgcacacatgcagtaatatttctatagaaaaggtctcagtgtgttgctagtccggtgtcaaagccctggcttcaagtgatcctccagctcganctcctgaagtgactgtgggccactgcatctgtcgttttttttttggttggttttggttttggttttggagacgg

SEQ ID NO: 679050 - DNA, 307 bp, Homo sapiens
ccccgctggccaatgcattgaggttgttggacgctctcctcactctggcctccagtacaggaaggtgatcccagtgacagcgtgggggcactgtgcggcgcccggcctatgacgcgtcgccatggcattctcctcagtgagacatgttctgacgtgcacgcatggtctggggtgaccatgtcggagttacaggatggtgccttccagctagatagtggtgctcactcagaggcttgtagagggcagcgaggaactccttcttggtcacatacggccagcgttaccaagtcagggggatctcctctag

SEQ ID NO: 679051 - DNA, 110 bp, Homo sapiens
gaaagccaccagacggtgcttcctcatcaaattgtgtgagctgatatttgccagccttgtgagaaagaagaggaaagagcacgaagacagtggccgaaagatgatgcaaa

SEQ ID NO: 679052 - DNA, 236 bp, Homo sapiens
cttgatgaaattcaaagagcgctcattcattgaggtgaagtgctatgaagatgtcacttgctgcattgggagtatatggtatctggtacattagaactactggatttaatgcaatcctgcataaaaatataatttatactatgtgaaaaaataagacaggacttaccactaggaaccacccagaccaatcatcattaacttttttaagattgcggtgtttgcgattgcggtgtttg

SEQ ID NO: 679053 - DNA, 151 bp, Homo sapiens
tctagcaggatcctgaaaatgacatagaggcaggctctgtcctgtgctcaggctggagtgcaatagtgcaatcagagttcagtgcagtttcaacctccagggttcaaagcgatcctcccacctcagcctcccgagtagctgggactacagg

SEQ ID NO: 679054 - DNA, 533 bp, Homo sapiens
ggaccagcgacatttgcacacatatataaattgatacttgaatcttgataacagtcagcacgtttaaatctataagagctaataagatctcattttcagaggtctggccgagatacctccagcctggacaacagagcaagaccctttgtctaaaaaaaaaaaagcatacttttttggacttgactattttcggagtggtacaaccattgccacagtctaattttagaagcatttataatacttcgaaaagttaccctgtaccctttagcagtcacttctcatttattctctttctgtactccccatttctgtccccgatctatgttacctattaatctcatgatttgcctattctggtcatttcacgatcaaattgattgggtctttttaaataattaaatattccccctctttcccctagaaatcttaagtaatggggcgagacgtaaagaccatgtttctaagaaagaattatggtagttgaaatttgggaaacaagtgttagaatttgtataccttgttgtcacatacgg

SEQ ID NO: 679055 - DNA, 291 bp, Homo sapiens
tgttcaaatcatttccgggtcaggcaagaccaccctggagtcattgcatcctccttgtccctgtcacccttgaatcctctcaacaaaatgtgaccagccttttgtctctttgatgtggctataagtaaaaatgcataaatgacctggaatcccacctaaggatttcgaattcaatggtgatttaagccaatcaccaatctaatattgggaaataagcaaatggaggaaccttgtttattaaattacaacccaccatctataattgttttgagaaaggaggggggactcttt

SEQ ID NO: 679056 - DNA, 424 bp, Homo sapiens
  misc_feature (147)..(147): n is a, c, g, or t
  misc_feature (151)..(151): n is a, c, g, or t
  misc_feature (205)..(205): n is a, c, g, or t
  misc_feature (243)..(243): n is a, c, g, or t
aagaaaatgtggtatatatatataatggagtactatttagtgtaaaagaatgagatttagttatttgcaaaatatggatggaactggagattattatgctatatgaaataagttaggtatagaaagttaaatatcataggttcctanttanttaaacaatttaaataattgagtttatggagatagagagtagaaggatggttantaaggccggggaaggggtggttggttgggggtggtggntaggggagttggagaaggttaatggtgccaaaaaaacacataaagaatgggccaggcgtggtggctcatgcctgtaatctcaacactttgggaggccgaggcgggtagatcacttaaggtcaggagttcgagaccaacctggccaacgtggtgaaaccctgtctctactaaaaatacaaaa

SEQ ID NO: 679057 - DNA, 1340 bp, Homo sapiens
gctttaacctcgttgcactgttgagagcaagacgggtcaccatgcagctgtactgtggagccaacctgggaaaattctggccagggatatcatcgctcttgtgtcgttgtctggttcaacacctggcacggggctggatccgggacatatggcctcgaatatgtgccggccatgtggatttccggtacagttacgccgaagggatatcgggttttccataaacgtgggcactaaaattggctcttcctttccagacggattatccggagggccatctactacaatggcacaaacacatggataaattcactttgagtagtattaagagaagttaaacaattttggacaaacaaaggctaaaagaacaataagaaacgaagaaacaacgacgaaaaacaaaataaagtgaatagccggtagagtaatgataagacagaaaagcatcacaacaaaaaattaagaggaagagagctcagaagagacggaaactacaagaacagagaaaacacgaaaggaacgcacgccgaaaaggagaccaacgaaaggaagaaggagggcagaagaagacgagaaagagggggagggtgcagacaacaccacgagacgagcagcggaggagaagacaaggcccgagcgcctcgcaacaagacaaaaggtgccgaaagagagagaggaggagagaaagaagagaagagggaggaggagagggagaggggggaggggggggtagatgggtggttggggaggggcggggaaggaggaaggagggagagtgggggtcgaggatgcgtggaggtgtggtgaggagcgggaggaggagggatgggatggtgcgggaaaatcacaaagacgaacaagaccagagagacaacacaagcacgcaaagagaaagaaagaaaagaagcagaacaggcggcgcaagcgaaacacaagacagaaacgaaggcaaggacgaacgaagacagaccacgctagcgaggcgcagaccgacaagaaaaagaaaacagcaaggcaggaagcagagagggaacagagagagcagagcaagagaggagcagagagggaaggcgaagaagagggggagggaagaaaagaaggaagagaggtaagagaagagacgaaaagagagaatgggaggaaaaggaggagtagatacgtccagagaaaaagagcgcgaagcgtaaacacgaggagcatagaaagagagagagaagagagagcaggaacaggaaaaggtatagagagagaagacagaaaggaagaggaaaagggagaaaaggaagtatacaagaaaaggaggaaagagacgacggacgtgagcagaagaaggaggagaggaa

SEQ ID NO: 679058 - DNA, 497 bp, Homo sapiens
  misc_feature (180)..(180): n is a, c, g, or t
  misc_feature (202)..(202): n is a, c, g, or t
  misc_feature (214)..(214): n is a, c, g, or t
  misc_feature (229)..(230): n is a, c, g, or t
  misc_feature (233)..(233): n is a, c, g, or t
  misc_feature (235)..(235): n is a, c, g, or t
  misc_feature (335)..(335): n is a, c, g, or t
  misc_feature (354)..(354): n is a, c, g, or t
  misc_feature (375)..(375): n is a, c, g, or t
  misc_feature (480)..(480): n is a, c, g, or t
ggcagaggaccttccccatcctccatcatgtgagcagccagagccgggcgctcgaacttgcgcaatggtggctgccgcaccaccggctcgggcgtcaggcagttatctgggagtccccgagggccgagtcggggccatgtgggcgggtcggggtcttgcgtttttggagcactgagtttngatcccctgcctacgttttcanttctggcaagtntaaggaaaagcttcnnagnanagtccctctagccttcctcgtcggttggcctggaagcgtttctgtgtggccaaagggcggggcgaacaggacggagaagggtgcgcacacggattccttnacccactcgagttctcccnacctacgtggctggaggaggntgcgcgtgctctgtgggtttggactgagttggtggttaaaccgcatggccgccgtgctgctcacaagtgctgggctcccttgaatgtacccctaaagaagggtanatttcctcggatgaaat

SEQ ID NO: 679059 - DNA, 1257 bp, Homo sapiens
  misc_feature (279)..(279): n is a, c, g, or t
gagacgttcttcgccgagagtcgtcggggtttccatgcttcaactagtgcttggacggatcccggcgctcgttcccgctaacccaggccagggcgccacattgccggcccttccgctctaccatcttctaccgcgactcctcgagatgtgtcccgaaggttccctcgatcgactgcgtcctagcgcctgatgcgagacaacacgagcagaaccggcgcgaccgtcgcgtcctcacgtataaggtccagccggacacagtgggaactgagcctggcagtntactactcgttcgtcgacgtggtggcagaccgaatagaacatcagcacaaccaagcgaatctccagggatgggccggcactattctaatcccgggcagagagtcaattacccttgggagggcttcagtagcccgctcttgcccttgaaatcggttttggaaccgccgtcgcgttgcccacattgggttgcgttacgcacctttgaactgtggttgagagccctgggcgggacatcgaagttgcggtctggcacttccccggaagagtggaaaactctgtataggcgcaaaacattctagcatttttccccttggtgctaacctccgagaacttcgttaccaatttcgcacggtggaatggatggacagaattatgcgaattggccttggggcaggccatagaaaccttcggtcatttggagaaaacggtcctcgggacgcaggtgacaagccccaaagattggggaaggggagtgagcctcccggtaaaatttcctttttgcctccttttccatagcggagtctctcacttccttacacgtgaggagggccccgaggagaactcttagtgctagaacactagcgacggcttagggtggcagttacggtgagccgcacgcagagcttctaggtggaaacgtagtggcgcaacgcgtgggacaccgcgttgggataggtccaggtttccacaacccaatgtgctgtcgagcgcaaacgaacaccaaaggacggctagttatgacaaaaggttcaacacggattatccgacctttgaaccgattgtgggtataagcacatagtgacccacacagcagaagcgcttggaggacacaaagtcgttggtgagccgactacgagagacaaccgtatggaaacctcatccccccgataggtatatatggcggtaagatgagaaaccggtgtagcaagtttgcaggaagtttaaccagaccatctgttaagcccgtcttgtaacatt

SEQ ID NO: 679060 - DNA, 153 bp, Homo sapiens
aagggtgacaacctctgggtagacatgtcgtgagccctgcccggtgccataaggcgttcagtgttaagagacaccaagctggtttgcaacttccaagagctcacgcgaatagggtttcgtcttggctctatgaggcacaattgcccttcagtt

SEQ ID NO: 679061 - DNA, 121 bp, Homo sapiens
ggaccccctcacttcctgctcttcagaagaaagacttgaggggctcaggcagagtgagagaccaaggcaagttttagagcaggagagaaagtttattaaaaagctttaaaccagtgtggag

SEQ ID NO: 679062 - DNA, 303 bp, Homo sapiens
  misc_feature (280)..(280): n is a, c, g, or t
  misc_feature (283)..(283): n is a, c, g, or t
ggaggacagactgagagaagatcacctgcaaactctctgaagcagatggtgtagtctgtgtagcactagaatgcagatgtccacttcacatgatggtgtgagtttgcacagggccatttccttggtgacctgtgtgtcctaaatccaaggggactctcccagaacattctgttgtgataaagattctagggattttctgattcctgagatgggaagaacttagttcatgtaatggcaagttgggggctcaggatatgattcaattttaataaaaacaatnacngcaattaaaaacaaaaaatt

SEQ ID NO: 679063 - DNA, 484 bp, Homo sapiens
gcagtaccatcaaggaacagaacagagccctcagaaataacgccacatatctacaagtatctgatcttgacaaacctgagaaaaacaagcaaggggaaaggattccctatttaataaatggtgctgggaaaactggctaaccatatgtagaaagctgaaactggatcccttccttacaccttatacaaaaatctacttcacgactggacttaacacgaccttaaatgttacgaccctaaaacccatacaaaaccctagacacgaaacacctacggctttaccacttccggaaactaggcgtgggcaaggaccttcactgtccaaaacacccaaacagcaactggcaaacaaaaggccaaaacttgaccaaactgggatctacattaaactacagagcttctgcccagccaacgacacctccccatcagagtgaaccaggcaacctaccaaaaatgggcgcacacattttcgcaccctactcatc

SEQ ID NO: 679064 - DNA, 183 bp, Homo sapiens
tctacaacgacagagtgctgcggaagaggtgtggtacaggaggcattgctgatcaatcttgaggcgtgttgtcatacgttctcagtggttcacacccgataaccgaacatagagggcgtcagcaagaggggcgcagcagatggtgaccctattgggctccccgcttgcaaatagagccacgag

SEQ ID NO: 679065 - DNA, 989 bp, Homo sapiens
  misc_feature (478)..(478): n is a, c, g, or t
  misc_feature (531)..(531): n is a, c, g, or t
ctctagcagaaaaagtggcggtatttctccgatctggctctcctctacctccaggcaggctcacccgaagatccccgcacctataacgcccacctgcacaactcagacacagggtctgttgctccccagagacggtacgctttctcgtcggtctattctagagcacaccattggatgtcagagtctgagggatgccgggaacatcggctcagcgtgcgaacgaggcatggcccgcgggcgggtgatcttcgagtaagccctgctggatgcatctactgaagcttccgatttgacacacggaggatgcatccgcgtttgtagttatcggcatataccaggaacgtgagaagaaagatccgtgaaagaaatcatccgggtacagggtccgcggtcgatttgtcatcatgcaaaggtctcctaacatagccaacggtttgccgtgatttgggcaccatgcaggacatgtcactcgttagtngcccctgcttgcatcttgacttgtttggctcgagttgtgctacttctactttngaatgcctcgggaaggagtaatcacgaccacttgcacgaaacacttgtacgggcacgcgcattcattgtggcttgtacctttcttggttacgaaaaccaaagcattcctattcgccataccctctacaccaaggttgcataacccaattgtggggcccacgaacgtaggttgactaggaggcgaccaagatccattgcacgagagaagcacgtaatttcctttcctgcataattagattggggcacctaaccaagtttcgtacttgcaagaagctggttgcataagtgtgggaacaagggtggaagctggggttctaggggaaaacgcccgccaagcgacacaatggggtagtcatcgcctggctacccttgggcgagcgcatagcgtagcaacgagggactggtggctgcttgccgtcaggaccactgtggggtaccaccaacggtgttggcattcg

SEQ ID NO: 679066 - DNA, 468 bp, Homo sapiens
  misc_feature (319)..(319): n is a, c, g, or t
  misc_feature (360)..(360): n is a, c, g, or t
acagagtcctcttccatacactactgcacagtgttgctatgtagccagtctgtcagagtgcaatggactgtctgaagagtaaggcagcggcctgtctctctggggcttatgcagctgctaccagcttaccctcatgctgggtgggagtggccagcaggtccagtgcaggcattcaagtgcaccagccccacagctagcgtctccctcccgtgacagcagcacagacctcacgcagacctcctccagcgtgacagtgacgctgcccgccaccatcatgacgtcatccgtgcccacaactgtgggtggccacatgatgtancactagccgcatgcggtgatgtatgccccacctcgtgcctngtgatggcagcccaccgtgctagaatgcttctccaggaccatccacatgcaggttccacagcaggtcaggagcaggtgcgtccccaggtgtcctacagcatcatctgg

SEQ ID NO: 679067 - DNA, 169 bp, Homo sapiens
tgccttctgcccttgtcttcccagccttggagataaacgtggtcccactgaaccacaaagactgtcccattgtcaaatgtaaacaactgtggagttgtgtcatattcctggctaaaaacccagattatgtgactctcctctctccctattcataggctgaagcaggaag

SEQ ID NO: 679068 - DNA, 372 bp, Homo sapiens
gccctggacctgtccctctgtccccaccctgtccctctgtccgtgtccatgccctgtccctctgttcccactctgtccgtctatccctgccctgtccctctgtccccgccctgtccctctgtccatctccactctgtccctctgtccctctctcccccatccctctgtccctctgtctctctgtcccccgtccctctgtccctctgtccctgccagtctatgccctgtgctcatggatttccctcacaggaactttcattttcacacaatgaacaagcgaatgcagctctgggtgagggcagggccccacctctcaaaaggacgactcagtccgtcgacgcggccgcgaatttagtagtagtaggcggccgc

SEQ ID NO: 679069 - DNA, 1117 bp, Homo sapiens
  misc_feature (557)..(557): n is a, c, g, or t
  misc_feature (586)..(586): n is a, c, g, or t
  misc_feature (612)..(612): n is a, c, g, or t
cccagaagtcccgcctgcttggggttccacacgcacgctgatctatatcctggagatcaacatggccaagaccagccagaccgtggcccacctgttcctagtatagacgctaggcagcagaaaggcttgacatcctctggggggagcatggagcgtgcggtgattcttggagctgaagcgtgctgtgtgcgagcgccggggtctgcccttcgacggtcgccatccgtgcctggggacatggcgctactacatgaaccaggtgggaggtagacgcgctactgcgtggaaccagtagacctgctcaagggattacttccccgtgcaggtggtcactgcacggtgctgctgtggcatctaccaggagctcctggggctggccttccaccatcgaggagggcgcctagtgcctgtgcactgaggacgtgcggctctacaccgcgagggacgcggcctcgggggaggtggtcggcaagttctacctggacctgtacccgcgggaaggaaagtacgggcacgcggctgctttggcctgcagcccggctgcctgcggcaggatnggagccgccagatcgccatcgcggccatngtggccaacttcaccaagcccacagncgacgcgccctcgctgctgcagcatgacgaggtggagacctacttccatgagtttggccacgtgattgcaccagctctggtcccaggcggagttcgccatgtttccggggggacccacgttgagcggggactttgtgggaggcgccgtcgcagatgctggagaactgggttgtgggagccggaagcgctgctgcgggatttccggactaccgacaggcagcgccgtgccccgggagctcctggaggaagtcattgagtccccgggaggccacaacagggcctttttaacattggccggaattgtcctctcccacgggtggaccacgggcccgttcacagagaaaggaagctgaccccgcgagagtatttgcgcgctgttcggaaaacactcaggtccggcacgccggaaacaattctgtggaccctgccactggagggtattataccccaactggacagtgttgcgagagacagaaactaataacacacacaaggtgctagctaa

SEQ ID NO: 679070 - DNA, 1480 bp, Homo sapiens
  misc_feature (2)..(2): n is a, c, g, or t
  misc_feature (5)..(5): n is a, c, g, or t
  misc_feature (26)..(26): n is a, c, g, or t
  misc_feature (58)..(58): n is a, c, g, or t
anagncactgagctttatttacaaanttccacagaatccctcaccctccaccccaggncctccctctctggaactcaggcagcagacaagtttgggccacccacctgtgcccaactcttaggaaccgtcgtggtgcctgtgagctgtgggcgggcaggggatttccattcttccgtgggtgtgccgcctgtgccagaagggagaagaggcttggaaggcggctggaaattgcgtgattcttcccccagagaagtatcagactccttcagggactttcgtgcacgagtgggaaccgttggcggccgcaggggcacctgtgagggacactgtgaccagagtctcgagggtctcagggggcgcaagaatctctgtgcaattgtggtgtgaacgcgcccgggtgtgaacaagagggcgtgcagtggtgtcgccggtacacaggattctcgtgggtgacagtggagcctctcaagcggtgtagataccaataaggctaccagaagggtctcacaagtgtgttcccgtagggagagccgtgacgcctattctctctctacagaaccttttcgagaagcgcacaacacatgtgtctcccacaaggctccacaagacgagggaacagtgtgacacggaggaccaaggggccacagggatgtgtgtctcccagcaggctgcggttcaacagcacggcccttctatatatccgcccgcggtgttgagaacttgcgtggcgaatcaccccgcgagcatagcacagaggaggagggccatccccacaagggggacctcacgaaacaacgagcagagcagacaatcggcgatcaacacacctgttgaaacaccgcgttgccaagcaagtgtgacatttggcgcccccaacggggggttacccccaggaggggcccctctgtgactggggggatacctcaagaccagaggtacggtcacctcttcagcaaccacggcgcacggacgcaaacgagcgagcagaggttaaacccccaggcgagaattcacccaacacacggcgccgaccccgcgggggcaaacaccactggggcagcgcccacggtgtatattagacaccacacggcgggtaaacacacgaagtttcacacaccgcggaccatcattgtttcaacacggtgggggctcacctagttccctgactccaccaaaagagcgccgcgctgttgtcgccaccccaacgatatggggtacatccacactagcaacggtcaacatagcggtcctctgtgtcgatcacacgaatgaggtgggaggacatcacaacgacgaaggtgcgggcatgtggcaagacgagaataccacgcgccaccttccatacatgataaggggaagatatcacaccgagaaagaaacactaccgtggcagtgcgtgtgtctgatgaagcacaataacaaggcgccactacgtggcgcagctcaatagggaaacgatacgacagaaacgatcgtatcg

SEQ ID NO: 679071 - DNA, 497 bp, Homo sapiens
  misc_feature (40)..(40): n is a, c, g, or t
  misc_feature (58)..(58): n is a, c, g, or t
atatgtaatttcctaggtaacgtataattcaccaaaaccngacccccaagggatatanaaactctaaataatctgatttcaacaaatgaattagagaaatgtgccaattattaatactctgaaacctctggccttggaagttttctaggaaaattctaccacatttttaaagaacagtgaattccagcattttaaaatagccccagaacaaggaaaaatttaaaaaaattattctttcctctacaaaaaagagtaacactaatatcaaaactttataaagactgcaggaaacaaaaacagctgacgaatcttaggtatgaatatcggtgaaacattcccagaagcacttgaacaaataattcgttatatgaaatgtgacttattccagggaaagcaagaatggtcaaatattgtaaaaccattaatataatttatatgaatatatctagagatacagcacaagataatttccatagatgaaaaaggtttttgaccaa

SEQ ID NO: 679072 - DNA, 320 bp, Homo sapiens
  misc_feature (2)..(2): n is a, c, g, or t
  misc_feature (5)..(5): n is a, c, g, or t
  misc_feature (26)..(26): n is a, c, g, or t
  misc_feature (58)..(58): n is a, c, g, or t
  misc_feature (227)..(227): n is a, c, g, or t
  misc_feature (252)..(252): n is a, c, g, or t
  misc_feature (316)..(316): n is a, c, g, or t
anagncactgagctttatttacaaanttccacagaatccctcaccctccaccccaggncctccctctctggaactcaggcagcagacaagtttgggccacccacctgcccaacctaggacagctgggctgagctgggcggcaggggattcatctcctgggtgcgctgcagaggggagaggctggaggggcgggaatgctgttctccccaggagtcagtcctcagggnttctgcgtgggacgtggggcgaggnactggggcactgaccaggtcggggtcgggggagcatctcattggtgaggcgggtgaaaaggctnctgg

SEQ ID NO: 679073 - DNA, 1129 bp, Homo sapiens
gttatggtaattgttcttataattttgtatattagtaatagaggttagacatgttcaatacagagcctgaaaaatcccagaaaagcattacctatctattgattagatgaaccacgtgtatagacattttggatgcatagtccgtttcgatgcttttttataatatatagcatgtaactatatcctattttccctctactaataagtggaattcttaagcatactgctcaagtagtcctacttttagagtctatctaagctattcatttagtttccgtgttttgcttatatatcattgtgtttgcttgattgaggacagggtgacactattggtgaggaaacccacgtgggtagcccaaccgtggagaacaaatcgcagtgctatctaggcccaacgaaggtgcgtgtctgttggagagagccctaatgggtttgaagagtttgtgctagaacataggcttgtgccaaagaaattattgtatacccttgaagaataacattgaaactgctgtacataagacatattacttcaaatggcatggagcgagagcgcgcattaaaacatacaacgctcgatctgatgataggaaggatccaatgaaaagggatacaggaacatggctggaattgtttgcgagctttgacatcacagtacaagttggatgcagagcggcaaattacgacaagttcgtccccgcacatatatgttagttacatttagatacataggacgagtttgaccccacgtaagcaggaaccctttcctttttaacgattgttaattgccccacggagaagaaatacacattctttcgtccatggcattaaccacaaaaaggtcgtgactttccaacatgacttggcattgtgtagcgcgaacacaaattgcttttcgtcccacaacgacgtgagttcggaactaaacaagccctgcccattggacactggatagggagcaaaacaggtattcctgtattcggacaccctttcccggcggcactcgaacaagggggaaacgggcgtgatcacagatcctcgtgacgcacccaccacgcgaggcacctcacaacgatcggatcgcacacagttatttctcagcaactcattctgggacgaacacacacgaatc

SEQ ID NO: 679074 - DNA, 725 bp, Homo sapiens
  misc_feature (7)..(8): n is a, c, g, or t
  misc_feature (41)..(41): n is a, c, g, or t
  misc_feature (53)..(53): n is a, c, g, or t
  misc_feature (82)..(82): n is a, c, g, or t
  misc_feature (226)..(226): n is a, c, g, or t
gactttnnattttttagcaattttatgttcacagcaaattngatttcctgtanctctgttcccccacacgtgcacaggtctncccccattatcaccatcccccatcacagtggtacatttgttaaaattgataaacctacattgacacatcattatcaccccaagtccatagtcgatgttgggttcactctatgtatatgctttgggtttgggcaaatatataatngacatatatcctccataatagtatcttacaggaataattacactgccctaaaaaatctgtgctctgtctgttcatctcttccttccccccagcacctggcaaccactgatctctttactgtctccatagatttgcctttttcagaatgtcatatagttggaaccatatagtatatggccttttcagattggcttctttcacttaataatatgcatttcaatttctagggctgggcgtggtggctcacgcctgtaatcccagcactttgggaggccgaggccggcggatcacgaggtcaggagatcaagacgatcctggctaacatggtgaaaccccgtctctactaaaaatacaaaaattagccgggtgtgttggcgcatgcctgtaataccagctgctcgggaggctgaggcaggagagttgcttgaacccgagaggcagaggttgtggtgagccgagatcactccagcctgggcaacaagagcgaaactccatctca

SEQ ID NO: 679075 - DNA, 108 bp, Homo sapiens
gggatgtacaaacatcccaaaggcagctggaacatggacttaggaggtaggcatcagaggaggagcaagtacgggagggaagtgaaataaccagccacaggtaaagtt

SEQ ID NO: 679076 - DNA, 187 bp, Homo sapiens
ttagtcataagggatgggacaaaagaaggcccatgttggcatagagtgacaacgaagagaaaaagggaagggagggaactcaatatgaacgaggtgagctgagttgaagatgtagaaatgagtttgacaaaaggcacgcttatttattatctcggttatattagtttggactgtttgtcccatccaa

SEQ ID NO: 679077 - DNA, 187 bp, Homo sapiens
ctcggtaccattatttaccctcatatgtagtcaggcaagcctgttgctaatggtcaaaaatcttacaattgcttagtgagaacttttggttcaagtcatgttcttcagtgagagagaaaaaaataataataatcaggacttgagttacattatttaagagaccaggttctggactgggtttaaatcc

SEQ ID NO: 679078 - DNA, 609 bp, Homo sapiens
  misc_feature (4)..(4): n is a, c, g, or t
  misc_feature (10)..(10): n is a, c, g, or t
  misc_feature (61)..(61): n is a, c, g, or t
  misc_feature (85)..(85): n is a, c, g, or t
  misc_feature (125)..(125): n is a, c, g, or t
  misc_feature (136)..(136): n is a, c, g, or t
  misc_feature (155)..(155): n is a, c, g, or t
  misc_feature (299)..(299): n is a, c, g, or t
taanaagcanaggctcaggctgagcccaggtttattatccaaaatcaaaatgaaatgcagngattaaaggacacaaggcctcagngtgcatcattctcattgtggctttcaggcggctgtggaanacagggtgggnatggtggcttcgggaggtnaggtgctcgtgggactggggcaagtcttaggcaagccattccgtgctattctgggccgtggctcccagtgggccattagaaaatgtgaacaagtgcttgtggtggacgtgctgaggacgggtgcaagggttgaggttctcccangttcaccggaatcagtggccagcacccaggggcatcagctatcgtgcttaagtgggggggctctgcaggttgggaagtcctgaggccttcagaaagtgacctcagtgggcctccgtggaaggaggtcctcccccatgtggttgcctccagcgcgcgtgccgaccagtgtggccagtttgggttcggccttcgaaaacttggcagccagcacccacgggatgcactcagcctccggtgagtggcctacgaggctcagcataaggaaatgtgaggcaccagtaaggaaggcctagatctggaggaacttttc

SEQ ID NO: 679079 - DNA, 351 bp, Homo sapiens
  misc_feature (4)..(4): n is a, c, g, or t
  misc_feature (10)..(10): n is a, c, g, or t
  misc_feature (61)..(61): n is a, c, g, or t
  misc_feature (85)..(85): n is a, c, g, or t
  misc_feature (125)..(125): n is a, c, g, or t
  misc_feature (136)..(136): n is a, c, g, or t
  misc_feature (155)..(155): n is a, c, g, or t
taanaagcanaggctcaggctgagcccaggtttattatccaaaatcaaaatgaaatgcagngattaaaggacacaaggcctcagngtgcatcattctcattgtggctttcaggcggctgtggaanacagggtgggnatggtggcttcgggaggtnaggtgctctatgacttgtactaggattactcatgccattccttgttaactggtgcctggatcccatgtgctgttataaccatacatgctttgtggactgctaaggaccctgcaagggttaggtttcctagctaaccgaataatgggcatgacccaaggcatttgcttctgctctatggtgggatctgcctgcggaa

SEQ ID NO: 679080 - DNA, 783 bp, Homo sapiens
  misc_feature (16)..(16): n is a, c, g, or t
  misc_feature (70)..(70): n is a, c, g, or t
  misc_feature (96)..(99): n is a, c, g, or t
  misc_feature (160)..(160): n is a, c, g, or t
  misc_feature (291)..(291): n is a, c, g, or t
  misc_feature (297)..(297): n is a, c, g, or t
  misc_feature (323)..(323): n is a, c, g, or t
  misc_feature (329)..(329): n is a, c, g, or t
  misc_feature (356)..(356): n is a, c, g, or t
  misc_feature (362)..(362): n is a, c, g, or t
  misc_feature (387)..(387): n is a, c, g, or t
  misc_feature (412)..(412): n is a, c, g, or t
  misc_feature (417)..(417): n is a, c, g, or t
  misc_feature (423)..(423): n is a, c, g, or t
  misc_feature (478)..(478): n is a, c, g, or t
  misc_feature (708)..(708): n is a, c, g, or t
  misc_feature (769)..(769): n is a, c, g, or t
ttatgaaaaaatttgngtcatttccctctagaccatttcatttcaaacttatactttgtttagtctagcnagttgtccaaaaagaaagaaaatatnnnntaaaagatactcggccagatgagatagagagagaatgctaacacaaggttcaatgtatgcngttctcggttgctctgttccatatgcccacacagtgtcatgacgtattggtgtacccctaaacagaacgccagatcagtccattcttactaggctgaagaaaattctctatcagagcatcattgagtttcnggggtncttcctccagtaaagcagtgtgactntggggnggggggggggagatctctgcataatantttatntttgggtctgttccgcttgtgcganggttagcaacacagtccattttganaagtnaatgtnatcatttggttgtttttactcacaggcagcactgatttcttattaggctggctantgtcatatccagtggtaatgtcccgtacatgcaatatagcaaatgttccacaaaattttggatattcttttggagaatcataattacgaagcctttcaaatatacttttgatggtaggtggttcataacacaagaaataggaagtttttgaaatatgataaccatatttttcataaaccttaaccagttgctgtttcaatgttatattcatggtttccaggtaagatgcnatctcagcaaccacaacagctgcactcaccccatctttatcaaaactgaagttcacagagnaaccaatagactct

SEQ ID NO: 679081 - DNA, 412 bp, Homo sapiens
  misc_feature (166)..(166): n is a, c, g, or t
  misc_feature (168)..(168): n is a, c, g, or t
  misc_feature (170)..(170): n is a, c, g, or t
  misc_feature (172)..(172): n is a, c, g, or t
ttaaacctaaaggcgatgacaaggatccttccaagaacaattcatgccaaagttcctgggcgtattggtttgtccccatcgtgggcgctattcttataggtttcttgtatcgtcacttctgggctgacagcaaatcctcctgaggagacctcgttgaagtgcggcntngncntcctgcgatgagaggaggagacttgtgtggaggctgcagggtgttccctccttggaacctgccagttgttttctttccccttggagccaagatggttgaccaagatatctatcctccttcaagtgtacgaccagagtctttcatccgccagagcctgacgcccaaagcacctgctcactctgtgtccttgccagggtttctctcattggttcccactccttcctttcatttcaaaagttg

SEQ ID NO: 679082 - DNA, 462 bp, Homo sapiens
gttatgtctcgatgattctcttgtctacttcagtcactatgtaaactattccacaccctctacggccaaaccgtccaccgtcgaccgattctgtggattaatctcccctgattgggttcgtaggtcatacttttttccttttttaaacctgctgcacatcaatgcctctcgccagcgggtcagtgcctaatcaaaactctgctagagcctgaacgatagtccctcataatcacgtctcgttccttttggtcgcaatatctccgtgcagtggcggatacagtgaaatctcgagcatgcatcttctcggtgagccagtccaccttcctccgggtgttgatgaagatgactgcctgggtaatggtcagggtttcatacaagtcacatagtgtgtccagcttccactcctctcgttccacgttgatgtagaactggcggataccctccagggtcaactcttccttc

SEQ ID NO: 679083 - DNA, 121 bp, Homo sapiens
ataaagggcatttgaaaggtgtagtaatgacaatgctattgccatattccacaacatcccccttgttctgtgtatattgctcagtgttcattcatattctgtacaacttattcttgtatat

SEQ ID NO: 679084 - DNA, 798 bp, Homo sapiens
gtgatctggatactccatctatatttaattcatgattgacgatgactaactgtttatctagtgtttaatcagcctctctgtggatatatgctataatttgaaatagcagatttacattataatataatcattggaaagcataacaactatgtgttaataataaatagatattacagagcagtcaacagctcaacaatccaatcggtctatggccctatcaggcaatcatcatgaatcttgccagttccagtgctatttatcacaggagcaaggcaaaggcattccactcaccaagcagcacaggttctcttcattgacaatctccaagcacaaggccatgcagcatttatcatctattatttagcattcaaccaccagcagcgcacttcataacaacaatagggataaaccattagcacggtcaagatagtcacacgtcctcaggtgcagtaagtcggagaaatagtagacagcaacatgcatcaatattagagggcccatgttacatcaaaagtcctagcggattaagcctaagaactgcacaccattgtgcggtttgacacaggggtctggtcactctcatagccaccaggcaccataccaaacggggaatttgtagatccaatagtccaaccaagacctgggacatcactttggccaaaccaaatgggtttagaaagcggggaggcaacttcaattgcaaggccaggagtggatcaccaaggacagttgaaccagttggccaacgatggaagggcacaattcggccaacattaaacatttcgggacatagcaaaa

SEQ ID NO: 679085 - DNA, 446 bp, Homo sapiens
  misc_feature (48)..(49): n is a, c, g, or t
  misc_feature (60)..(60): n is a, c, g, or t
  misc_feature (98)..(98): n is a, c, g, or t
  misc_feature (103)..(103): n is a, c, g, or t
  misc_feature (149)..(149): n is a, c, g, or t
cgcttgggtggtgcacagatggatactcactggtacactcagtcatanngccagtgcccntgcctttcttaggaagtcagctccggtgtctgtgtccnagatncccagcctccacctcagtcaggagacactgctgcctttacctgganaagtctgcggccatcttcgctgctcaccacagagccgcacagaaatgccggctgctttgctaacctgcggtgttgttctcacaaatgctgccagcgaagtgggtccccagagcgcccgcagctaagatgaggtcctgctctgtgcagtggcctccgaccaggccccgctcacaagaggggcttctgtgctccttcgggccttcctgagaaggctgcgtccagagccctcccactgaccccaggcgcacacccagaacctgacccgcacccagaaccaggcgcacacccagaccgtgt

SEQ ID NO: 679086 - DNA, 171 bp, Homo sapiens
gtgaggatccccctagtcagaagtttcaatagcataaagttgcctagctgcagagaccttatttctatatcttctttttttagtagaaaagttttacaaaattggtaggaaaatacaataatttttgtatttttggtagagatggggtttctccggtgtgggctcgggtac

SEQ ID NO: 679087 - DNA, 220 bp, Homo sapiens
  misc_feature (156)..(156): n is a, c, g, or t
tcatatctatcccatcgaacgctcagtaggcagcacttgggccagagcttagaccaagtgcatccatttttgggttctccaatagccacctaccgaatcgtcgaatcaaaaggttagtagcgcccctacttgtaatatgtatgttggtctagaatngccttcaccatatctaggagtcgaacgtctaatgtacccacaacgtgcttgctatagacatagg

SEQ ID NO: 679088 - DNA, 206 bp, Homo sapiens
  misc_feature (18)..(18): n is a, c, g, or t
  misc_feature (21)..(21): n is a, c, g, or t
  misc_feature (72)..(72): n is a, c, g, or t
  misc_feature (104)..(104): n is a, c, g, or t
  misc_feature (140)..(140): n is a, c, g, or t
  misc_feature (188)..(188): n is a, c, g, or t
aaattcagaactggatgncanggagagttcaatattagagataaattcagagagtcgcttccagatgtgttngtgttaacgacatggaatatatgtagttcccngaaactgggcctggagactcaaaaaagacccctcantccttggtttgtgggtagctaagggaagagctataaaatgctggactnggggatgggggttccagc

SEQ ID NO: 679089 - DNA, 493 bp, Homo sapiens
tggagggcactaacgcaaagtaagactcgcgtcgtgtgacgagctgtagcatagccacagtctaacttcacatgttcattaaacaggcaaattgaccgctaaaacttcgaaaaaacaagtcatacataaaaaaaagtcttaccccaaaattgcaaacaaatacattaaaagataagaagaggtgatagaaagcaccagacattaaacaaaatacaaataataaaataaattcaactcacaaggtccccatacagcaaatactatagtaaaagtatggactgtatgtacatagtgctaactcacaggacttataagcagaaaatcgctcggttcttatatctaaggcttgaatttgtaaagtgaaggcataaaagttaccaaacattaagtcactcttaaaatggcacacaggttttcaagctatagggtaaacccttcctacactctctgacattttacccatggccctttgtagatcaactatttcacacgt

SEQ ID NO: 679090 - DNA, 282 bp, Homo sapiens
tccaataactgcagccaacggaagcaagtttaccctatcggataacagcgcaatcctattctagagtccatattcaacacatagggttgacgacctcgatgttggatcaggacatcccgactgtgcagccgctattaaaggttcgtttgttcaacgattaaagtcctacgtgatctgagttcagaccggagttactccaggtcggtttctatctacttcatacttcctccccgtacgaaaggacgtctactgtacaggacacgaatggtacacgaatgttca

SEQ ID NO: 679091 - DNA, 126 bp, Homo sapiens
aggaaccaggagtacaggaggaacatgaaagtggacaaggagcatgaccactgaagcacagcaccacgggggaggggtttaggcctccagatgactgcagtcacaccagactcctcatggtgtggg

SEQ ID NO: 679092 - DNA, 475 bp, Homo sapiens
  misc_feature (49)..(49): n is a, c, g, or t
  misc_feature (66)..(66): n is a, c, g, or t
  misc_feature (96)..(96): n is a, c, g, or t
  misc_feature (116)..(116): n is a, c, g, or t
  misc_feature (121)..(121): n is a, c, g, or t
  misc_feature (125)..(125): n is a, c, g, or t
  misc_feature (158)..(158): n is a, c, g, or t
  misc_feature (182)..(182): n is a, c, g, or t
  misc_feature (212)..(212): n is a, c, g, or t
  misc_feature (220)..(220): n is a, c, g, or t
  misc_feature (231)..(231): n is a, c, g, or t
  misc_feature (234)..(234): n is a, c, g, or t
  misc_feature (239)..(239): n is a, c, g, or t
  misc_feature (244)..(244): n is a, c, g, or t
  misc_feature (256)..(256): n is a, c, g, or t
  misc_feature (292)..(292): n is a, c, g, or t
  misc_feature (328)..(328): n is a, c, g, or t
  misc_feature (330)..(330): n is a, c, g, or t
  misc_feature (339)..(339): n is a, c, g, or t
  misc_feature (341)..(341): n is a, c, g, or t
  misc_feature (375)..(375): n is a, c, g, or t
  misc_feature (380)..(380): n is a, c, g, or t
  misc_feature (400)..(400): n is a, c, g, or t
  misc_feature (407)..(407): n is a, c, g, or t
  misc_feature (412)..(412): n is a, c, g, or t
  misc_feature (426)..(426): n is a, c, g, or t
tcttgagaatagttttaaagttttttccttttgtaacattcaaaagtanaaacatatatataattncatcaaggattttctgtatgattaacattntgtacaagttaaacatgacnacatntatnttggaaagagagcactgagaagcaacagcaggngaatgcatcacctgtgcctgtttnaggttgaacagttttgtttagttcagcagntgattgtnacaatgaccanttnttttnaaatncccagatgtttnttactggctcctcactaatcaataacacaagtgttntgttttttgtttttttttaaacaaaagtctgcgggngnctccttctntntggtccctttaccaaagctccaaatcacttatgncattntttataattttttgcactcnaaaaaantttgntaacacaggtttgnttaatttttgttactcagtgaacctactaaattttaaagttgttaaaag

SEQ ID NO: 679093 - DNA, 149 bp, Homo sapiens
  misc_feature (17)..(17): n is a, c, g, or t
catagaatgacaggcantatagcgaatggttagttctgtagagaacgtcactcggtctggggaggtcaaaagagaggaaaaaaattagaaaggtggcacataggctgaggaataagccataactaaacctaaatgcatggtcccgagga

SEQ ID NO: 679094 - DNA, 302 bp, Homo sapiens
  misc_feature (58)..(58): n is a, c, g, or t
  misc_feature (130)..(130): n is a, c, g, or t
tggcctgggctgagctgggctgggctggactgagctggactggcctgggctgggctgngcgggatgggctgaggtggctgctaatgtgggaaagaggccgtgggttgagtgtgattccacctgcagagcnctgagcccagctgtgttcttaggggttctgaggccacgcagctctgttgcaccatgattctgtcttctctcttgcccactgcctgaaggaaatttggagtgggctgggcccagagctcccctgtatagcaggccctgtcctggagggcctggcagggacatggcttagcctg

SEQ ID NO: 679095 - DNA, 850 bp, Homo sapiens
gggccaacctctgcctttggacggtttctggtaccttaccgggcacttgtgagttggggagatgcttgttgggcctcatcaggcctggtgtgactactctggccttcatgctatgcctctttggatcctaaagcaaggtggacagaactctagccttagtgtgttgcccctaaacccaggagttccagcccgacagcaacctctgtggcagccacatggccttcagctctgccccagcccagggctttgctgaggcccatccttttcctgcctctgggcctggctctgggcctcctctccccatggctcagcgagcactgagctggccctacttccaggatggatgcatcacactcaaggacaggagcctggtccttccctgatggcctttggacccagggcctgacttgagccactccttccttcaggactctgcgggaggcttgggggccccatcttgatctttgagcccattcttctgggtgtgcatttttgggaccatcactgagacgtcaaggagttttactgcctgtagcaatggaccagagcctctggcccctcacccatccatggaccagtcccagttggccgagctcctggggagctacctgggacacgttggctatgaaaatgagcctctggctcccacctgtttctcgaagagagctccagaccagcaggcctagattaatgagcacatatatctgcctctatacgtcgctagttatcggcgctggggacactcttatgagcaagattcgaggacagagaaaggcctccaatacttgcacactggccggtgaggcgcatagagacttactcatgaatagtaggactgagcagatacgcc

SEQ ID NO: 679096 - DNA, 101 bp, Homo sapiens
aatggaatcatggtctatgactttcagtagaagcattataaggtcgaaagagtatagattcaggcatctcttcttactgactatattaagtattttaggca

SEQ ID NO: 679097 - DNA, 120 bp, Homo sapiens
tcggagaccgtactcattaggacggtggacgctcctgggcgagaaatagttatgcaactggatctattttggtatgaaaaaaaaaatttttttaaagaaaactgttccttccccctttcc

SEQ ID NO: 679098 - DNA, 113 bp, Homo sapiens
gcaaggtctgtcctcaggtggcagtggttcttatagccctggagtgacctactccgcccgtcagtggttataataaagttgggcgagctttagcccctctcctccttctccgt

SEQ ID NO: 679099 - DNA, 331 bp, Homo sapiens
gggggctgggggcttggggtcaggaaacttaaaaaatacttaggacagggctgggcccaatggctcccccctgtaatcccagccttttgggaggcttaggtgggcggatcccttgtggtcaggagtttgtggctaacctggcccacatgattaaaccccttcttttctaaaaatccaaaaattaaccgggcatgggggcccgggcctgttattcccactactcgggagggttaaacaggaaaatggctttaacccgggaggtgggggtcccagttagccccaatggcccccttgccctccagcctggggggcaaagccaggctccctccca

SEQ ID NO: 679100 - DNA, 721 bp, Homo sapiens
cgcttcccccccctctcgtctggcaccatgtcgaactttctcgccagtccccgatgagaagactcatttcataaagtttggctcctgagaagtcctcgccactcaccgaaggggaccttctggagaaggtccgcgtgccttgccccgtgtttgactacgttccccccgagctccttaccctctttatctcccaccttggtgggagattgcacccctcctagcactttaccgccctgatgagtgagacctctacccctcctgatgatcactgttttatgaccgagccaccaccgtgtcctaagcacgattgcttaggcacgatatcccgaatgaagaggagaccttgagtgttgctgctgagagcacactccttgcacaatgtgggaggtgcaccacggagttccaccctataaaaaaaaatcctctgatatctgttgcctcgcctcttttagtgcacccccgtgaaaccagggcaccaccactcccacgcacctgtgtcttgcctcttcagattcttaacacgagcacgcacgggcttaaacttgttgattttggaggcctcttagtgacctggttgcgtctgtgtcaggaacttaaactttctggttcagtagtgtgttaaacataaccctggataccttactgggatacagatttttgctcagaaatggctatgaccctttttttaggctctacccataaaagccccttgaaggttcca

SEQ ID NO: 679101 - DNA, 692 bp, Homo sapiens
ttggtaattcaatcatgacttctgaacggattggtgcccagttctttggcatcatctggtcaagcgcattgacagtatctttccgcacgttggtgatctcattctcatgggcacgcagctcatgcagagtgtgggcatttgctctggcaatgcctccagctaattcttggacagataaagtcgttacagcttctctgaaggtgtcaatgctccaggactaactgtgctaatcatactgttgccaagaacatgtgcgtgaaggttcttcaggatcttatagtctccatctctgatgtcggtcaaagtgctgatctgcaggtctagcagagttgtgtcagagggaagtccatgtggcactttgtccagacgcgaatcagatcactgggctcaggatgatggcattgacagcgtaaggggcactctggctctaggtagggctcgaagtcgcggtcatcaggaacttctgggcctattgcagaagccgcatctactagcatacagtcaaataagcctgtctgatgaaacggttcagcccaggaaacttgtgcaagcagaagtagcatgatagtggccttcatgatgtatctcatgtattttctcaaccagggatccatgcaagagagttgtaaagattgaatcagatagtgggcttctcttctgggagccctggctcatccaggcaagatgctgct

SEQ ID NO: 679102 - DNA, 304 bp, Homo sapiens
atgttgtgtgagcctctttaacgatttgccaatgagccttaacctcactatactacactgtacaacacacgcaatggtattaacattttaatcttagaagaccctgacccactgaggattatgtagatgagaattgagaagccacgtagaagcaccttgaaatatgtaaaaccacaagaaagtactttataaaaggtatcctatatttgaaagtggataaatctagtaactcgaaaagtagtgatttagaagacaggattgtttaagaacattaggaattaaaggactttttctggtccttaaa

SEQ ID NO: 679103 - DNA, 1413 bp, Homo sapiens
gtcctgtgggagggtcagaggcagaatctacttacagtggtgtaattaaagttatttaaccaaaaataggtatgtgtccatctcagcattcacctttatcaagtgactgatttttttttcttttctttcctttcttgtatttgttattttttggaacacggattttccctacttgttggcccaggctggaagtgcaatggcatgatgctgcggctcaccgaaacctgccgcttcccgggtcacaagcgattctcctgcctcagatctcccaagtagctgggataacaggcagcgcgccaccacgccttggactagatttggatatctttaacgtaaaccacgggtttccacccagtgtttggtctcaggcttggatctcaaattgtcccgaccttcaagtagatctgccgtgccttcaacctcccaaaagatgcctgggatatacaggcgttgaccccatgtggggccgtggccggggacactgccattttttgtccacagtgttagacaatgtgtcaacacgagagagaatcacaggtggcacccattttgtgaaagaacccgtctcggtttgtgtttgccacgcaacgccacaacactctctgtgacaacacgccgtgaaacaacagacgggatttgccatgtgggaagctccccaggtgtataactcacgaggggcgcgggccacattttcttggagtgtgaaccagtgtttgcccaaacccgtggacggagttatgacatcctgtgaggaggttcaccaacattagaaacaccctgtggttaacgcggaaaaggcaatcttctcgctgggaaagaggttaaaccacaacacgtcgttttatggagggaaaaaacgccttataggaattatagggggtacgcgcccttttgaggagaacaagcctgtggacaacacgccgcaaagatggagtcagaattatcggggacgatggcccaggagcaattcacacggtgggtagagatcacaaacgcccacgacgaggggagggccccctatatagtgacagaggctgaccccgagactagcacccaagagcccgcagctctccgaacacaactgtgcggctccgtatagacacagcaggaaacaacccggggactttcccgatatgaaccggtgggataaaagcgtttggggagtttcttgacggggatattccacacggagaaattgatgtgcgcgagattatatttcaacgacacgagaaggtagagcacacttttggtgaaaaagtatccccccgcggaaggtggtgttgtgcaaaatttgttgggtactggcccacatggtgttagtccccttctggagttggaaaggaggtcaacactggttggccgttcttcgcccaaaaaactggttagtggatgttacaacccgcgggccccttt

SEQ ID NO: 679104 - DNA, 180 bp, Homo sapiens
cacccttgtcgtagcgggtgcgcaggttggcgatgtcctccacgctgtcgcggaactgggcgtcggactgcgccatcaccttccaggtgcggccactagcggttgccgctcgttgatataagacgaaccgaggtaggtctgcagcgtgctgaacagcgcattgagcggcaccccctgcgc

SEQ ID NO: 679105 - DNA, 288 bp, Homo sapiens
  misc_feature (97)..(97): n is a, c, g, or t
  misc_feature (147)..(147): n is a, c, g, or t
  misc_feature (153)..(153): n is a, c, g, or t
  misc_feature (251)..(251): n is a, c, g, or t
tgagcttgttgtaactgcgtggacttgtctgtctccccggtagaccatgagctccctgacagcagggactgcgtttttagctgtttctatccccagngcccagcacagagctgggcacatagcaggtgtgtcatgatgtttgttggnggaccnagcaggtgtctcatgatcatcactgaatgaatgagtaatggggctgaggcaggagaattgcttgaacccgggaggcggaggttatggtgggccgagancatgccattgcactccagcctgggcaacaagagcgaa

SEQ ID NO: 679106 - DNA, 441 bp, Homo sapiens
cgtgccaggcgacctacgacagcacatctcagtatagtttgtatccaattgggcatccagttcaccacggcctcactacggttgccccctggccagctgcctacccagctgtcacctcctacccacccctgagccagcctgacctgctccccatcccaagatccccgcagccccttggaggctcccaccggacgccatcttcccagcggaatactgatttttccaacagtgtggcgagctacgagaacgaggaaccagcctgtgaggatgcggatgaggatgaagacgaatatcacaaaccaagctacctggtggtgcttcctgacagcaccccggccactagcactgatgccccataagctcctgcactcagcacccctggcatccgagacagtcgcttctccatggagtccattgatgatcacgtgaccattctccggg

SEQ ID NO: 679107 - DNA, 148 bp, Homo sapiens
ccaggctgggtctcaaacatctgggctcaagcagtccgcctgcctcaacctctccgtgtgttggagattacaggcgtacaactacgtcttggccgtcttgatcttttagagaactagctttaggtttcattatttttattgtttctct

SEQ ID NO: 679108 - DNA, 368 bp, Homo sapiens
aatatcattctgaagggcacagctaattacaaacgttactatccgccatcccatacattgggacaaacctagttcaatgaatctgaagaggctactcagtaaacagtcccaccctcacacgattctttacctttcacttcatcttggcccttatcgagataaggggccaatctcggctcactgcaacctctgcctcccaggctcaagtgattctcctgcctcagcctcctgagtagctgggactacaggcatgcgccaccatgcccagctaattttttgtatttttagtagagatggggttttaccatgttggccaggctggtcttgaactcctgacctcgtgatcttcccaccttggccttatcgag

SEQ ID NO: 679109 - DNA, 185 bp, Homo sapiens
  misc_feature (113)..(113): n is a, c, g, or t
  misc_feature (131)..(131): n is a, c, g, or t
acacctgggctccgggttccccgactgcagagtagcacctgagcctcggccagtgtggctgaggtcaccagccaagcactgggtcttgagtgcgaggaggcctgaggcttgtngtctgtcccagtcaattngcactatgtgaaacctactgcatcttaaataaacgtcaggacagaagacccgca

SEQ ID NO: 679110 - DNA, 960 bp, Homo sapiens
ctccacgttaatttagctcgacctatcacattagcggacggcccttgtgagttgtgtggaccagggtaacctgcggctccaggtcagagatgcacctgctagtcctgcctctacaggacccaacccatcagttcctagcttgttcttgtggtgagaattgagcacactatactgtggacataaagacaaaccttgctggaactgactgggggaatgtagcatgaattggagggaaggtgttactgatgattgcaggccagggaccaacgtaggaaatggtagtgagatgtggaggttgtctggttactgggctacttgtagaccgtatgcttgatggaggtaaggcatgctcgcgaccttcgatgttaatgctaaaaacgaggctcactggcaacctgtatccccctgatgatgggcgtgcagagggtaaaacaccacgtgcgggcggcgtccggcgcacagatcgcgcggtatgatgttgtgaagaagcgattggcattagataacactatgacaagcgcataggccggctgcgcggacgtgcaacgaggtgcgcttgggggggcgaagaacgggaataggcggcggccgagggcgtcagagcccaggggccggccccccttctcgcggacctctgcgtgcttggctacggttactggatggtagctctggatgtgcatattgatatgttacttacatgaggcgcttctagattgacaataatagaacaaagccacgactatcgagatcgggaatctcagattgaagaaagtctcaagactctgtctcccattctaaatattattcacctatttaattgttatatatggacgagtattgctgaccgctgggccccgtgttagtcacgctcgagaccgacactgacttaatcaatctgtcacgcatctactcacactgtgtatatcttatagattacatcgcaatgcacattcaagatag

SEQ ID NO: 679111 - DNA, 485 bp, Homo sapiens
aaagatcacatgcttctgagggaacaggacaaagggcaaaagcagaactacttataagagtccaacaaagatcacaagggaaagggcaaaagcagagctactgataagggtctatgttcagcagggcacaaattggcttaataaacatcttaaataacagaaaacagggttcaagagcagagaactggggtgaccacaaatttaccagggcggagtttttccccaccctaaaaagcctgaggggactgcaggagaccaaggcgaatctcagtccttatttgaaccgggtaagaaagacattcccagagcgggtggttatagacctcccaaaagaatgcattcctttcccaggggtaataaaaattaaaattccctggtggggaaaagaaataacaatatctgtctaacttggacatacattaaagggctctctggcagaaaaaaaaaatgggtggttttggccaaaccccacaaggagtcagaac

SEQ ID NO: 679112 - DNA, 1303 bp, Homo sapiens
  misc_feature (359)..(359): n is a, c, g, or t
  misc_feature (485)..(486): n is a, c, g, or t
  misc_feature (502)..(502): n is a, c, g, or t
  misc_feature (526)..(526): n is a, c, g, or t
  misc_feature (548)..(549): n is a, c, g, or t
  misc_feature (556)..(556): n is a, c, g, or t
  misc_feature (598)..(598): n is a, c, g, or t
  misc_feature (647)..(647): n is a, c, g, or t
  misc_feature (659)..(659): n is a, c, g, or t
  misc_feature (709)..(709): n is a, c, g, or t
agaagtgagtgacttgttttcactggcggctcccttaggcagccgctgtatttttccactgcgtggatcacactggagattaattttggttcagccagtgcctgccaagcagaaagcgaaggccctagcccacggggaagtcagccatggcatctgtcacagactcgatgtcgctggtacatttccacggagagagatatttacaatagtaaatttctaggctttgataaaaacactgggtacgatttgttttgataggcatgaacatacttgtaatcggaaacccagctgaggaaatgagcttgccagcccagggtaagttcttagaacttagaacacagggatctttcagaccttgngagtcaagtggcagacagtgagccacaggggcaaagtcaaggacactgattctgcgtaaagaccttgaacaacaggacaggaccagaaccatagcacagggtgctcatggataaggcgaatggganntattcttttctgcttnccatagcactttgtccagaaacanagagtggggtgggcgctaaggnngccgtantcaagagcttcgcttgttcttaaacgccacatatagactggnattatggattggtaagcattacatctcttctgttttttgctgcttgcanaggaagtccaantcaggattatatcctagaacaagtcagggttaaattgctaatctcaacanaactattgaatcagagcagcaagtgccatgaaggaggaactatccaaaatggcatgtctatatgcaaaaatggcaacgtagatggccttccaatgttagcattggtcaagttggccgatgggcttttcccggtgatttctttacacggaaattggctataagggcttggaatttttcctttttttcctttttggccacggtttaaaatttcccaaaccacaggccttttaaaaccaaagaaaggccacggattgggaacacctggccaaatggggaaaccccctttttttcaaaaaccaaaatacccggcatggtgccgccacccgattccctcttttggacatcttgcccaaaagtttaaactctcgcgcatgtgttggtccggtcacaccgtatcttacctggggacaggggatatccgcaaaaaaataataatgaaaaaactggtgcgccctccaacgtttatagtggcttctcacggcctctatatccttgtcctacctaatgagggaacatgcgctgttaaacgtcgggtccgttgtcccttggtgtgccactcttcccggtgatatatacgcgcgcactccccttcct

SEQ ID NO: 679113 - DNA, 127 bp, Homo sapiens
ggtttgtgtacaggagaccagcctacacagtccatcaatacatctgcccctaatagccaggaggtattccacctcctaccgattatattaagggaaatacacttattaggtaatggtggatactata

SEQ ID NO: 679114 - DNA, 1284 bp, Homo sapiens
gatccaacatggcggtgcgaccttcgggtacaaggaggcagttagcgagaaaggagtctactagtagtgcgtagcagtctactatgtggtagcgatgtatggtatcataatattgtctggtctctcaatatgcaagaagagaaaggaagagcagggagttgggtggtttgcagaaaatgtagtgaatgagaacagaagtgaaacctagtgcataggtagtgatcacactgtattcattggaaaggctcgcaagacatactaacaaactagtgtggaccatgcaatcgccgcatggagttttgagcaacggtagatcatacttacagtgcttgaatatgaagctctttccgcggtccaatgcatcgtatctcttcgagctcatatcgtggctcatatgacacatcgtctccataggtacaggatttagtgcggaatctgagatgtgtcccacatcgtttcatgcggcatcgatttccaaccattggcatagacgtgttgcgatttcaaatacgtaatggtctcacatggaatttgcgcttaagatatatcacaaaacactatagaatcgttcgcgaaggggatttaaagtaaaatatgtatccattgggcactcctacggtgaatggagaatttgtgcgcgcttagttttcgtaaggaaatttgtgtatctttaaacatattgttgcattagcaataggtgcaaaagtggggccaaggggttaaaatttcccttggggccctacccaccaaaagtgtgtaggatactaagatccaacgttctggggaaatgtttttaccgtcaaattggcacataatttttcatggggcgagaacgcaatgcagaagcaccacaagccactttttggaagagagttgctaccatttgggtaccatctctctcctccaccttcgtacggccaatacggggcgaagtcatcggacctaccaggtctacaagaactgccttggaggtagaatgacaacatgttgtgaagacgcaaggtggttaggaattaaatttgaacgttaacttccaagccaaaagcatggtgtgtacacttccatagagaaaagccgtggcaacttgtggtgtgtggcctggtgtcacagaaaaggagccacacttgtttcacattgcaatattccgtctaatagtgaatgttgtcgcgtagcggataagattacaagctataaacagttgagggagaaaacaaaagtattcaaggggggggcagcttgtgtccctgaatgtaaattaacaagaaattggtgtgcgtaatgaca

SEQ ID NO: 679115 - DNA, 168 bp, Homo sapiens
accaattccacgcttgcccttaagccttgtgagttttgagaccgaacactcttatctgtgcacagtgacttggtcggctggaaagggaatccaggtggagctctactcattccctagagatccagaaatcgagatgagtggtggcctcgtgaattggagctctgtcac

SEQ ID NO: 679116 - DNA, 147 bp, Homo sapiens
ttattaagacaccaccaggagtctctggcccccacagaacctttagtgtgtaagtttgctgatggaggacagaagaagagacagaacccaaactagatacatccctaatggaagaccatggcactagagcaaggagcaggtgcagac

SEQ ID NO: 679117 - DNA, 181 bp, Homo sapiens
ccccttttttttttaaaaatccaaaaaaaattttttgggggggggggggggggcccttttttcccccccttttgggggggttggggggggggttttcctttccccgggggggggggtttcggttggcccagtttgtttttttgccccccccgggggggggggggggggggttcctttttta

SEQ ID NO: 679118 - DNA, 221 bp, Homo sapiens
cctttttttttttgggaaaaaaagggtttttttggaaaaccaaacggggggtttgggccttttttgggggggcctccccattttgtttttatccggggccggggttttttggttttgggtttttgggggggggggtttttttaccaattggtttttttttttgggaaaataaaggggggaatttttttttttccaaagggtctgtgggcccccccccttta

SEQ ID NO: 679119 - DNA, 123 bp, Homo sapiens
gtgaaagcacaccccttcctgccttgcttgtctataaggcctgcagacagcaattgttcaggaaagtgcaggatcgcatctggaagtctgtaggtgtccttgcaaaggacttttaactccctg

SEQ ID NO: 679120 - DNA, 391 bp, Homo sapiens
ataggcaagtcaaagcttctataccttttcttgcccccttcaagcagagtcccctccgtgctcctctccgctagtccggcccctgacccctttccccagtacccacttcctgcctctctcattaacccttccgtagctgctcaccatgaccccatcagaatccagttaaaagactcttccaaatttcccaacgttcctcaataccccatctctctaacccaccaaaagggcctacagcccatcgtaaacaagctctgctcatgcagtcttcttagaccaacacactctccatattacacccctatcctccctgttaaaaagtctgatggctcataccgactcgttcacaacctccgagccatcagtcaagctgtcctccctattcatccca

SEQ ID NO: 679121 - DNA, 222 bp, Homo sapiens
ggtgttgcatgtgtgtgtgtgtttgttgttgttgttttgaaacgggtctcactcttcactgaggctggagtgcagtggtatgatcacggctcactgcagccttaccctcccgggtgcaatcagtcctctcacctcagcctcctgaatagttggaactacaagtgtatgccaccatatccagctaattttttttttttttggtcattgcaacagggtctctca

SEQ ID NO: 679122 - DNA, 521 bp, Homo sapiens
ctggtaccagcaccttgccaccctagagtgctagtggacacactggaactcccacacttacttagcaataaaaaggagcaccccatcgtcaggtgtcaacagaggccaaataggaaccttgatttctacctccacctagctgtaatgaggctgcatccttcccttcctgctggagcagtatcagaaaaaccctcaactcaatatgtaaatatccaggttgcaattgaaaaatcacttgtcatattcaaaacaaggaagacctcaaactgaaagaaaaaaagactagcaatatttgccaacaccaagatgtcagagacattagaattatctgacaaagattttaaagcagccatgataaaaatccttcaatgagcaattatgaacatgcttgaaaaaaattttttggctgggcacggtggctcacacctgtactcccagcactttgggaggccaaggcaggaggaatgcttgagcccaggagttcgaagttagcctgagcaacatggcaagaccccatcctt

SEQ ID NO: 679123 - DNA, 262 bp, Homo sapiens
aactttacaacgtaccttactcacgtaacaccacttctactgttactacgacactcacggaactaacacgaactctgctgttaccactgactccacgcaccaatacttcctaaacttcttactacacacataacgactgtgaaaaacgacacacacttactacacgacgtaccttacctataaaaaataaggttaccaaaggctcagtggtcaggtgtccccccaccaaccaactggggcagaatgctagtgggcatcctca

SEQ ID NO: 679124 - DNA, 495 bp, Homo sapiens
atccactctccctactgtatcctatgtacctttctggccttatctcacatgtctcctttccttactcttctccagcaacttcttcgtatatgtcatgcttcatcccacatggagcctttgcacatgcctttctttttatctggaatgctctactccatctcctttttctgagatggagtttcactcttgctgcccaggctggagagcaatggcatgatcttggctcaccacaacctccaccaccggggtttaagcgattctcctgcctcagcctcccgagtagctgggattacaggtgcctgccaccagacgcagctaattttttttgtatttttactagagacgaggtttcacgatgttggccaggctggttttgaactcctgagctcaagtgatccacctgccttggcctcccaaagtgctaggattaaaggtgtgagccactgcaactggcacccggccaattgtggacttttaagagcactagaaaaatat

SEQ ID NO: 679125 - DNA, 492 bp, Homo sapiens
  misc_feature (419)..(419): n is a, c, g, or t
agcaacaccggaatgtcatgctccagttttcgggtgaggatgggatgcaaacggtacgccgggtcttccagtgcgccgggaatagaaaagacgtggacttcgtggcccaggctacccagggcgcgtgccagttcataacaatacagatttgcgccgccgatttccggcataaaaaagggggcgatcagaccgattttcatgggtgttgtcgtcaatattacgtgcgcagtatagcaagtttcaggccgtggaagcggggggatgccgagcgcggcttcagcgttgacacccaatgaggaaggcggcaggcccatgttcatggcctccagatcggcgcaggttccgcataccagttatggtattcggcctggttggggaattccccgcacaaatgccataaagcctcggcccagaaatcnccgagatagcgctcgtatttcaactctttccaggtccacgcacgccgctggtttgcgcgaattgcgcggccgc

SEQ ID NO: 679126 - DNA, 443 bp, Homo sapiens
cagtggtttgatgtggtgatgctggcacgggaatttctgccatgcgtggcaccatttcccgtgaacacccgtgggaggtcatgcctgatctgtacttctacagagatcctgaagagattaaaaaagaagagcagcctcctgctgagaaggcagtaaccaaggattaatttcggggtgaatggactctcccgctcctgagttcactgctacccagcctgaggttgcagactgttctgaaggtaaacaggtcccctctgtgcttattaagcaattccctactgaagacgggagcgctcaccctcccacggaagattgttctgcacctcccactgctcagcccactgaatgggtgggaccaaccactgactggtcttaagcttttcttgcataggctcttaaccagcatggaaaattggttgatggaaaataaacatctgtttcta

SEQ ID NO: 679127 - DNA, 857 bp, Homo sapiens
  misc_feature (405)..(405): n is a, c, g, or t
gtcgtgaaaactacgcctaataggcgataatgggaaagggagatgactgctgtatcaacgactgtcggcatggggacgcgtagattcgggcatagtcgaccacgacgggccatctggatctataaatgcggggcatcgacagaagaaccattggaaaattcgagaaggaggctgctgagagtggtcaaagggcgtccattctaagtatgccatggtgtctaggataaatctgagagctgagcgatgaaccagtggtatcacctattagatatctcctttggtggaaaattggagaaccagctaaggtactcaatgtgacatatctattgatgccccagtgacacagaacgacttttatcataaagacatagattgacatgggagcatcctcaggtctgaactgtngctgttcctgaatagtcagctgtctggtggtgtgcgtgacatttgtaatgctgggtatctctcaagagatgggtcgagaccgcgtagaggcatgatcctgtagtggacttactacagtggggtgtgaaaaaaaactaactttgtgcggtgttaaccaatagtggattccatgtaggccaaccctagatgtctagaaggagatggtggagggggaaaatgtggttaatggaagtgcagtccctgtggcatttccacgaaaactgtgggttacaaactccgcagaatggatggggggcattgtgtggccaaatgttcgtggtgtgggaatggttgtccaaatgtggttggagcacagatgtgttataaatggccttgtgggtccaagggactgggagatgtccactcggtaggggatggacatgccaagggggaccaagacggtgagggaccgg

SEQ ID NO: 679128 - DNA, 504 bp, Homo sapiens
gtaaagtcaatgcacaagtaaaagatgaatgagcacttgtatgggagtacactggcctgggttgaattcagactccctcactaactagctagagtaccttgggcatttctgtataactaagccccagcttcctcatctgtaaacagaaataacagtgaacttataagttgatgcaaagattaaatcagatgaaatacagactgcaaaaggtataatgcctccatgtactttacgttaggtaactgaaaagattagggtaacctccccaaatgccaccttccaaatctgcaaaatgaggataattataccaatgtaataggactgttgtgaggactatgaagatcatgcacagaaagcataaccatgactggcatacgatggtacatatttgcttcttagaaatgagtattggccgggcgcggtggctcacatctgcgatcccagcactttggaaggccgaggcaggtagatcatccttagggcaggagttcgagtccagccttg

SEQ ID NO: 679129 - DNA, 718 bp, Homo sapiens
  misc_feature (28)..(28): n is a, c, g, or t
  misc_feature (113)..(113): n is a, c, g, or t
  misc_feature (207)..(207): n is a, c, g, or t
  misc_feature (490)..(490): n is a, c, g, or t
  misc_feature (494)..(494): n is a, c, g, or t
  misc_feature (512)..(512): n is a, c, g, or t
  misc_feature (522)..(522): n is a, c, g, or t
  misc_feature (528)..(528): n is a, c, g, or t
  misc_feature (533)..(534): n is a, c, g, or t
  misc_feature (579)..(579): n is a, c, g, or t
  misc_feature (587)..(587): n is a, c, g, or t
  misc_feature (661)..(661): n is a, c, g, or t
  misc_feature (717)..(718): n is a, c, g, or t
gtgagcagcgccaagcggagcctgcggngagagctgaagcagcgtctgcgggcgatgagtgccgaggagcggctacgccagtcccgcgtactgagccagaaggtgattgcccncagtgagtatcaaagtccaaaagatttccatctttctgagcatgcaagatgaattgagacagaagagtcatcaaggacattttccaacgaggcnatatctgcttcatccctcggtaccggttccagagcaatcacatggatatggtgagaatagaatcaccagaggaaatttctttacttcccaaaacatcctggaatatccctcagcctggtgagggtgatgttcgggaggaggccttgtccacagggggacttgatctcatcttcatgccaggccttgggtttgacaaacatggcaaccgactggggaggcgcaagggctactatgatgcctatctgaagcgctgtttgcagcatcaggaagtgaagccctacancctngcggttggctttcaaagnacagattttncttcangtccnnagtgatgaaacgacatgaagtagatgaagccttacgaaactcgtnacagctanatctggatactacagcccaatatcagtgttatatagagtaagcaagatgtgattttccttgcaaaatagtgaantgtcatatgtgatcagctgatttaaaatgatatgaatactatttaacatcttaccnn

SEQ ID NO: 679130 - DNA, 191 bp, Homo sapiens
taggcaggaggggctcaggataccagtgctgaaacagagcgggtccaggtggaggggaggcccgtgcagacatgagcaggaggcatagaggagacagaccatgaggcccagggagacccctcactggagactctcccgtagccttcttttcagaagtcgaaagttggttattaatcccttccaaggcttga

SEQ ID NO: 679131 - DNA, 327 bp, Homo sapiens
  misc_feature (144)..(144): n is a, c, g, or t
ggtagcactaggacaatgtatcgaaacttatgcacatattctactcagttctgttcggaactgttacctgacagactcatacagacactacagcagactcactatgctgttacctcaggcaccaacgttggactacctcctttngtgcatagtggcaggtatgaacctgaagtggttaattcagactcatctccaagtaacacagtgacttacctgcactacaggttaaccacaagccagccaagcccagcacattattcttatcccattcaagcttcaagcacaaatgccagcctgatatctacttcttctacaattgccaatatt

SEQ ID NO: 679132 - DNA, 493 bp, Homo sapiens
  misc_feature (30)..(30): n is a, c, g, or t
  misc_feature (84)..(84): n is a, c, g, or t
  misc_feature (138)..(138): n is a, c, g, or t
  misc_feature (143)..(143): n is a, c, g, or t
  misc_feature (187)..(187): n is a, c, g, or t
gcgccattccacaactcctgttatataggnttgtagtatcgctgtgagcatgacttgatctagtttccgtgatccgagcagcantatttgagtgtatgaatggatggtgatcacgtgctatatgtacgaaccaccatnttacngaatatttactactacctctgtagtttctcagagggctatggantagtttgaacgtcaatcccttgcatacttctgtgacaccctgcccttttctgtctttattaaccaggtgttaggtgtgactgtcacaactgttatgttttccagtaaactagaagtacgatatttgataattatatttgtatttcaccacctaaatgtaatgttgattcctcaagaatgaaatgaaggcactacattgaaatatgttttgtataaatttgtcatgttgaacagcattttagcatggtaagttcccttagctatatgaattttggcatgtttcagagagatcagtaaataaaatatt

SEQ ID NO: 679133 - DNA, 432 bp, Homo sapiens
  misc_feature (193)..(193): n is a, c, g, or t
ttttttttgttatttttctgacactttctatttatggaagtgatacttactattcacgatcatggtctgcttttagaaagcactctaggtgaaaaagtgaactcattcaaagaaaacatttagtgactgtcagaatgctggtgtgtgtacaaacagcattggagacggcgctccaggtggggaagcgtgtgcngttgaaaggccaccgctgctcaagtgcaggtgctaagcagaggtcactccctccctctcctcctcacccctccctgtccccttccctccttccttccttagggttggccccagctggacttcgcaatatctgggtccccatggctcagcaggaggccgcgggaaacaatgttttcctctcgcaggcttcggtttctgccactctgctagcagcccgaggttccactcttttctctgctg

SEQ ID NO: 679134 - DNA, 302 bp, Homo sapiens
cagcgcttcccatcataaccctgatgtaggacccaagtatttggaccttctgtaccaaaaccttttgcaggtcaacttagtatatgaaatgatccaatccaacttgaagtcaattgaatataaaggcgctttacttccgtgtacattcagttttaccatcatgagatgaatgagcataactctagataaattacaagacaggatactacagttggcctgctgaggctgccccatatttagaacatgtacaaatggtggtaaggccattaattagtcttccatttgataataccgcaaaatcc

SEQ ID NO: 679135 - DNA, 683 bp, Homo sapiens
  misc_feature (682)..(683): n is a, c, g, or t
ggggaaagggaaagctcccaaagcagctgtgtcatcgtgaaggccaaattcttcagcagaagagctgaggagaagataagagtgtggggggggctggtgtcctgggtgggttgaatgccattgtggagggagtttcattaaatgtgctaaactaatttttccaaaaagaaaaaaacaagaaaaataaagaaaacaaaaatatttgtggggcggggctttgaggcctcttcggaaaaagctgttttaaaaaacacaaatttgacgagagtggggcgcgcggaggcgccccaaagaaggcgtaacagcggcgaacaccaccatgcgcgacaccacaagcgagggtggtcccaaaaaagaacaccacccgggggagccaagcaagacaagagggaggcgaaggagaactcacacaccaaataaaaaaaaaacagagggcgcgggcgggatgggaaacaacaaccggcgatacgacggcgagtatatggagaaacaacaacattactgcaagaaagatgggagagaacaaccacgggggcgacaccacaacagcagcggggggggcatcaaaaaaactaacaaagcgaggggggtgcatcaacaaagagcgagacatcgtctgagacaataaaacacagaaatattataaacgcgcccccgccgaggtcggtggtggggggcatgnn

SEQ ID NO: 679136 - DNA, 369 bp, Homo sapiens
attggcccagtagtgggttttagctttaaatgtttgccccgccatccctttccacaggatcctttttccctcctcccctgtttttgggtgtttcgagcagtttaaaaaagggcatttccagcctatgaaacaggtgggtctttggccataaaaagtaaagatttgaagacaaaaggaagaaactccggagtaagggtttttagaccccttcaggttttacacccttttgccctttttccattgcctgcaccccaccccagccactcaaatcctggttgtttttcctttggccaaaggaaggtttaccagtaaaatccttggtaggttgatgtgggccaaacattcctttaataaaccattgggtacata

SEQ ID NO: 679137 - DNA, 100 bp, Homo sapiens
agtcggtacctgcttgttgtttaacttttgggtagaggggggggtctcaccacgtttgcccaggtgggtcacaaactccggggctcaagccatcctcccg

SEQ ID NO: 679138 - DNA, 404 bp, Homo sapiens
  misc_feature (331)..(331): n is a, c, g, or t
  misc_feature (374)..(374): n is a, c, g, or t
  misc_feature (383)..(383): n is a, c, g, or t
cacctatcaagaattgttcccacttccttcaactttggtggtaggatctaggagcaatctgattgtctcaaggttgcccaaattgcccacttgttcctactcagtggctaatacattcacatcttttctaaaagactcagatctccatggtggtgtgtgcatactgttaatgaattaacagtgtttatggcctctggatgaaatcgttcttaaggaatatcctaaaaggaacttgctaactgctactgggatattttaggtaattaggagtctggggagctaggctgtaggatttggggtctcaggatccaggccactttacttaggctcntatggacagtggggtccatatttattttaaggttatggaaccntcaggcttncattattttggcagggatagg

SEQ ID NO: 679139 - DNA, 412 bp, Homo sapiens
gcagaggtcgcaatgagacgagatcacgccactgcactccagcctgggccacagagagaggctccatctcaaaaaaaaaaagaaagagagagagaaagaaagaaagaaaaagaaagaaagaaagagaaagaaaaagaaagagagaaagagaaaggaagaaagagagaaagagagaaagaagaaagaagaaagagaaaggaaagaaagaaagaaagaaagaaagaaagaaagtaagaaagaaagaaagaaagaaagggaaaaaagaagaaataaagaaaaagaaagaaagaaagagaaagaaaaagaaagagagaaagagaaaggaagaaagagagaaagagagaaagaagaaagaagaaagagaaaggaaagaaagaaagaaagaaagaaagaaagaaagaaagaaagaaag

SEQ ID NO: 679140 - DNA, 403 bp, Homo sapiens
ccgcgacgtggctccctgtgcggcagaaccatgttggacttcgcgagcttcgccgtgaccttcttgctggcgtagatgggagccgtgctctacctctatccggcttccagacaagctgcaggaattccagggattacttcaactgaagaaaaagatggtaatcttccagatattgtgaatagaggcagtttgcatgagttcctggctaatttgcatgacagatatgggcctgtggactccttctcggttggcaggcgcctcgtggatagattgggcactgttgatgtactgaagccgcatatcaatcccaatagagacatcggacccttatgaaaccatgctgaagtcattattaacggatcaatctggaggcggcagtgtgagtgaccacatgaggttgttg

SEQ ID NO: 679141 - DNA, 180 bp, Homo sapiens
agcggggtagagagagtctatagggtaatacggcctatttcaaagatttttagggagaattaattctaggacgatgggtataaaactgtggtttagctccacagatttcagagcattgaccgtagatatacccccggatcgtgataagcggtgaacagtggttaggatttagaccgtccg

SEQ ID NO: 679142 - DNA, 153 bp, Homo sapiens
atcaaggagctcaccaccagacgaggaggacagaaaacctctgcggctgcagacctggtagacaagctgcagctaaaggtcaaggcctacagcgccaggccgaggagcggaggagcaagccaacaccacctgtccagttcccagtgcagcaga

SEQ ID NO: 679143 - DNA, 861 bp, Homo sapiens
  misc_feature (43)..(43): n is a, c, g, or t
  misc_feature (76)..(76): n is a, c, g, or t
  misc_feature (95)..(96): n is a, c, g, or t
  misc_feature (114)..(115): n is a, c, g, or t
  misc_feature (119)..(119): n is a, c, g, or t
  misc_feature (137)..(137): n is a, c, g, or t
  misc_feature (140)..(140): n is a, c, g, or t
  misc_feature (142)..(143): n is a, c, g, or t
  misc_feature (158)..(158): n is a, c, g, or t
  misc_feature (163)..(163): n is a, c, g, or t
  misc_feature (165)..(165): n is a, c, g, or t
  misc_feature (175)..(175): n is a, c, g, or t
  misc_feature (178)..(178): n is a, c, g, or t
  misc_feature (187)..(187): n is a, c, g, or t
  misc_feature (203)..(203): n is a, c, g, or t
  misc_feature (206)..(207): n is a, c, g, or t
  misc_feature (219)..(220): n is a, c, g, or t
  misc_feature (224)..(224): n is a, c, g, or t
  misc_feature (226)..(226): n is a, c, g, or t
  misc_feature (228)..(229): n is a, c, g, or t
  misc_feature (232)..(232): n is a, c, g, or t
  misc_feature (241)..(241): n is a, c, g, or t
  misc_feature (249)..(249): n is a, c, g, or t
  misc_feature (252)..(252): n is a, c, g, or t
  misc_feature (258)..(258): n is a, c, g, or t
  misc_feature (260)..(260): n is a, c, g, or t
  misc_feature (262)..(264): n is a, c, g, or t
  misc_feature (273)..(273): n is a, c, g, or t
  misc_feature (460)..(460): n is a, c, g, or t
  misc_feature (500)..(500): n is a, c, g, or t
  misc_feature (543)..(543): n is a, c, g, or t
  misc_feature (560)..(560): n is a, c, g, or t
  misc_feature (706)..(708): n is a, c, g, or t
  misc_feature (710)..(710): n is a, c, g, or t
  misc_feature (744)..(744): n is a, c, g, or t
  misc_feature (752)..(752): n is a, c, g, or t
  misc_feature (777)..(777): n is a, c, g, or t
  misc_feature (787)..(787): n is a, c, g, or t
  misc_feature (811)..(811): n is a, c, g, or t
acaatacacactatgttggaggaacgactttaaaatgtaaaangagaaatgggcactgaacactccatcctcactnccaacagaccacccacacnnctcttcaactgctatccnnacanggaggaactcttgtgganganannctcaacaccaaatanttgancntatgacattnaanactaaaggnaccccagacagatgtntannaagtagggttgnnaatntnannatntcccaacanctgacgtnggnccatcngngnnntgtcagagncatattgctgaggaaagcacagcatacaccagaccccggggtaagggcgagatcaacctatctcatagccataagcaatccactcacacctgtgcattaaacaggctttttcttttcttttttttttgagatggagtcttgcactgtggcccaggctgggtacagcagtgcgatctcgggtcaatgnaacctccgtccccgggttcaagcaattctcccggctcagnctcccaaggggctgggattacaggcctctgccaccacaccagntaacttttgtatttttncgtagagatggggtttcgccatgttggcgaggctggtctcgaactcctgacctcaggtgatccacccacctcagcctcccaaagtgctaggattacaggcatgagccaccgcaaacggcctaaacaggccttgcccaggcaatgcnnntncagttagacaggttcttcaaggcctagtaatagntctctggntacaacggtgctcagcttgtctgcnaggaatgggnctcccatctggacatgtctagggnagtgttccaaaatatggccagtatggaaggaggtcttatcacatgcttct

SEQ ID NO: 679144 - DNA, 213 bp, Homo sapiens
gtgggatgtagatagaaagcacctaatttgtgcttctgaattaaccactccaggacctgctttacctcttggactttttgttatgtgagatattctttatattgttccatttgctttgggaatatgatattgttacttgtggccaaaaggaacctctcttagtagaacaaaggagagttaggttattcaaaattagtatgggacaattgatat

SEQ ID NO: 679145 - DNA, 168 bp, Homo sapiens
tgggagccaaaaatttattttttcattttttgcatttgaaatacttttcaatgacatccttggcctgaaactccttgccatagtccttaactactacacaactggaaccaaccattttacgaggtttcccctttttgtcgtttttttgcaaccgtgttaacgcggccg

SEQ ID NO: 679146 - DNA, 796 bp, Homo sapiens
  misc_feature (246)..(246): n is a, c, g, or t
agcggctgaagcaggagagttgcttgggcccggaaggtggaggttgcagtgggctgagatggcgccattgcactccagcctgggcaacaagagcgagactccatctcaaaaaaaaaaaaaaaaaccggcattattagcactatttaaaaagcctttacatttaattttaattttttctgggagaagagagtatttataaaacagctggcattatggtctggataaaggggtttatccctttagccnttctttcttacttttcttggtatagcttggtactttcatatcaaagagtaaaatccctcaaggttgggagctaaagaaatagaactcttaattaaccggacttagaaatcattacaagtggggctggggcacggggggcttacacctggtaatcccagcacttgggagaggctagaggcaggtgggatcattggagggtcaggagtgggagaccagttggaccaacttgggtgaaacccggtctctactaaaaatacaaaaaaattacccaggtgtggggtgggccatgctggtaatcccccagttactcgggaggctgaggcaggcgaatcatttggaacccgggagggcgggagttggcagtggagccgagatctcaccatgtgtgctcccagccggggcgacagagtgagactctgtctccagggccacacaacaacactctttttaaattggggccaaatgcgaatttaccctttccggggccttaattcattggtgggccctgtttcctcggaaatagttccccttcttcgagattagttaacag

SEQ ID NO: 679147 - DNA, 243 bp, Homo sapiens
ggcccctgggggggcccaaaaaactttttaccctttttttagggggaaaaaaaaacccggggggggcccctttcccccccaccaaaaggggggcccccaaaagggggcctgggttggggaccccaaattccggccccggggggcaaaaaaaaaaggggaatgccccccaagggggtgggggggcccccccccccccccccccccctttttttttaaggttggggaaaaatttttttttttcca

SEQ ID NO: 679148 - DNA, 382 bp, Homo sapiens
ctttgggtgaccaaggcaggaggatctcttgaggccaggagttgcagaccagcctgggtaacatagtgagaccttgtctctgcaacaaaatttaaaaattagccagacttggggttcccacttgcaatcccagctatttgggaggctgaggcgagaggatcacttgagcgcaggaatttaaggctgctgtgagctatgattgtgccactgcactccagcctgggtaacagtgagaggcctcatttcaacaataaaacccagcttgggccgggcgcggtgctcatgcctttaatcccagcactttgggaggccaagacgggcagatcacgaggtcaggagatagagaccatcctggttaacacggtgaaaccctgtctctaca

SEQ ID NO: 679149 - DNA, 156 bp, Homo sapiens
  misc_feature (1)..(1): n is a, c, g, or t
  misc_feature (138)..(139): n is a, c, g, or t
ngctctaggctagatctcttcttctgagtctctgcctcctcctccaagcagatgcgggctgtcatcttcagatggcttctgctcctcctcacttcccagcggtctagggagcgttttgtgccccgctaggcttggaannactgctagtgccgtact

SEQ ID NO: 679150 - DNA, 156 bp, Homo sapiens
acagactcgagtcgagctcggtaccagttcatagcacctagttttagaagtcaatagtcctagttttagacagtttcaatagcaccttatatagtatttcgtcactgaagactttattcagaaaagaaaaacctctttttaattgggatggaaact

SEQ ID NO: 679151 - DNA, 247 bp, Homo sapiens
agcacgaggcaggcttgcaaattctgggccgtaaagaatttagactcagacgcgaacgcggatctggcggattcgagggtcaaacaccagaggcacaatgttctactatcccaacgtgcttcatcgccacaccggctgctttgccaccatctggctggcggcgactcgcggcagccggttggtgaagcgcgaatacctgacggcgaatgtggtgaaaacctgcgaggaaatcctcaattacgtgctg

SEQ ID NO: 679152 - DNA, 136 bp, Homo sapiens
gccatggctcgtggtcccaagaagcattttaagcgggtggcagctccaaagcatttgattctggataaattaccggtgtgtttgctctcgtcatccaccggtcccacaagttgagagagtttctcccctcatcatt

SEQ ID NO: 679153 - DNA, 850 bp, Homo sapiens
gctgggacgactatgggttggcaaaaactgtgtaaaaatgggccctttcgtcacatggtgcgccagccacctggggggcataacccggttttgggacgtattttcccccgcagtgttcccggcgtatattatcccggccgtctatgggccggcttgatgagccctcatgcgggcgcgcgcacaacagtattgttgcgtccgccgccccgccacgtcgtgtctgtcagcgtcccccctcgcaggtgtcgtgttatggctcgcccctccccttcaatgtgtatggggggcacccccagccgcacaggtcgtttgtatccgcgtcctcgcgcttttggtggagacacaaacactcccgggcttgggcttggggccccaacaaaaaagttcatgccgcccgccccggtgttatggctagtagcaccggcggcagcacctggcgtcacgaggaggccgcactactttatcggctggaccagagtgtggtttgtttctcgccgaacccccagagtcgccgccttttctttgtagttaggcaggcctgtgagtgtcgccaccacaaaacagacatcgggttacattgggaggcctcgaaagcaaaaatctaatcaccttggagagctatgagactagaggccgtgtatcgcccctcccgccgccccgccgtctagtttccacaaggcaatatatgggcccaagggccccgggaatgagaagaagtcttccacaggggcggctagatccaatgtctgtaatttctcccacaaaaagggaaaactcgcccgccgggaaggacatcctacaataatcgcgtgcaggtttacgttcttacccccccccccccaacataaca

SEQ ID NO: 679154 - DNA, 357 bp, Homo sapiens
tattaatctactgggtaagagatagggtgaggaggaggaggagggctactggtttcttatcttccggtgtgtagtagggaggtggcggggctggctcgtgcgcattgtatgaaccgttgtgaaggagttgcctggggttgtaataaggcgctggcggctgcttcttgggccttggcttcggctgcaggagtggaggggacatcggggccgctgaccggaggttccatgggcccagggtagggcggtggtgggggctgcacgtatcccattgccccgtcccatcatggggggtcctggatagaactcaaggtgggggcggtgcgataggggtacccaggagcccggggattggggtac

SEQ ID NO: 679155 - DNA, 136 bp, Homo sapiens
atggacaactacagcgaggaccaagtgactgagaaggagtggagtgacgtaatccgatccctgtccctaagcctggctcaggacgtcctcgtgcggttggaggaggggcctcctcactgccaagaagtggcggccg

SEQ ID NO: 679156 - DNA, 427 bp, Homo sapiens
  misc_feature (128)..(128): n is a, c, g, or t
cagagaagctcttcaaccagagggtataggtcagagggatataagagccagcatccatccctgggttctcagtaggaatgctggtgctgtctaaagacctggcattaatggaggcggaggagcagctntacgggagggatggacgcacccccccccccacgaccaccccattagactcaggccccatttaattctggccttagccttattagaataagactttatacattaactaaagtggagctttaatcactataaaaagcaaaagtatctatagacacagacacttgcctatacagagacataaccacacacactcagaggatagtgaacaaatctgtctttgacttacgacccattttgcaagacttaaagccggaagaacacattttcagattgttaaataaagtctgattctgactaaaaa

SEQ ID NO: 679157 - DNA, 129 bp, Homo sapiens
atatcagtctggggatgtgcctgttaccggctatccaggatcccagagtcacccaaagcatgaccgttatcctacccctcgtggctggcagcctctcagagaccccccacccaacctgccttactttgt

SEQ ID NO: 679158 - DNA, 819 bp, Homo sapiens
tggcgtgcggtaggtggcgcgcgggatcggacgggcggttggacttgagcgggacctgtgagctgagtgcagtgaagagccggtgccatggtggagaaggaggagtgctaggctgtgcggcattagccgaggaggagtgcggcacagtcatgacctgagccagatcctgcctgtgtgaggactggatggcccagcaaactgtgctgcgcggcctctctgtggtgcttctatgtcaggcttgacaatggacttgaggtgctgaacttgccaagaatctcatcttggcaggacgtgaacggactgaccatgctggatcacgaacaggtaactccagaagatcccggagctcagttctatgattcgtactgggtctgtttggccgaaatagaggctgcaagcctcttatggagcgagctccagcaatctcaaccccaataggtaggatgtgcaagtgtggacaactgcaggatatcagcagaagacaccgagagtatcatatttaccacgtcaaattccgcatgcatgatggatgtctgaatttgactagcatcacagggatgtcaataggttcacgcttgacccagactctgtacaccacaaacatacggcctacaagatactaaacaggcagcatgataaaacatggagtcaccccaggggctacaacattgtgacccaagatctacgggagaacgccatgacagggggtccgaagggcgaagagagctagaggtagcgacgaagggtaagcccaaggacggtctaaggaactggggcccggacaacccaagaggagcaaaaaaatgagaaactacatca

SEQ ID NO: 679159 - DNA, 295 bp, Homo sapiens
ggacaagaagcataatatcacacacgtgacctgaaaaactactatggaattatttataagtggttgcatagacttagtattatagacttgtataacttttcccaaaaagttgtactcagtatgtatcaaaggctaagacaacgttgtcgtcttccttttcacatagctcacgcaaggaaacactgatagatttaatggtgagagcaaaatccttcaacaaataataagcatctccttcattcatcctgttatcctggactaatcctatcaaggaaccatgtttgtagaaatccag

SEQ ID NO: 679160 - DNA, 550 bp, Homo sapiens
tgaatattcgaggctcacacctataattcccagcacttgggaggctgaggtgggcagatcacttcaggtcaggagtataagaccagcctggccaacatggcaaaaccttgtctctactaaaagtacaaaaattagccaggcgtgatggtgcacgcttgtaatcccagctattcaggagaatcgcttgaacccgggaggcggaggttgcagtgagccgaggtcgcgccactgctctccagcctgtgcaacagagcgagacagtgtctcaaaaaaaaaaaaccaaccaatttgttaaatacagggtgttacttccgaagttaccacctagtgtgcaaggggggtccttggaagatgccacctgttgctcaccaggctgcaaatgaatttcttaccatctcaggtgtagattcagggattcaaggctagatttaactaggaaagggggagttacctattttttctttatttaatggataattcttgggtgtcccccacagagggggatttggcagggtcatgggacaataggtgggggaagtcagccgataac

SEQ ID NO: 679161 - DNA, 2141 bp, Homo sapiens
tgttgcgtctgctgtgctgccgtgttggttaggagttagtcgcggtgggcgtggtgtgtataggagagtggtggcttcgtgtagtgatgttctgtcttgttttgtcgttgcgtggttgtttcggtgggtgtggttcgctcgggttgtgtggttgtcgtggcgtagtggttgccacgaacgtgatggtcgtacggtgtgggtttctgtttggttttgctagtcacctacacggcttgaggtgtgttggggagcatcgcagttgggtggtcgtccgtctgcgtggttgttttcgcggctgtgtttggttcggtgtttgtgtttccttcgctgcgaattgtttgcactcgactcaaggtttaggggagtggatcgtttgttggtggatggttgaggatggtgatcggagagagaatggtggatgggttgttgtcatgtaggttggtggttgtcgctctttcggtgttccggattttgttggttttcttgttctgtcttttgctgcgatgagttggtcttgtgtgctcgatgtgattgactacgttagttgtgtggtctgtgtggtagtgatactctctagtgcttgtgttgaggtgtgtgtgtgtctgtcctcgcgctcgcatctgctctgctgctttgatgctgtcatgtagtgtgttttgttgtgtatatgtgctgctcgtgatctgggtcgttgggaggtgctgtgatcgtcatatcctgatttgtggttatctgtttgtctgtctggtgtgtgctcttcttttacatcttcctcatcactgaggctgttttgtctcctctatttttggtttgttgttgttttgttcttagtgacgtctttgttgtgtgtgtgtcacgggcgctcgggttctctcgcgtgcgcggcgggtctgcgttgtctggtgtgttttttccctccacacatcgccgtgtgtcggggctgcggtcgcgtgggcgttgggtagggtgtctccgcccggcctctagctggtggtttcgtcttctcaggtgtttgtgtgtgtggttgtgtgtttgtttcgggtttatgttgagttgtgggttgtagtagtgtgtagtgggttgggtaggattgacttcgagcggcacgcctcggcgcgccttcgtctgttgagtgtgtccgccttctccgtcacgtctgcttgctgcggcggcggctgcggttgttgggtatgctgaggatgagttgtggtgggcatcggctgttggggtgggcgtgctcgcccttgtttttgtgtcgtcgttctgttggtgtgtgagtagtgtgttgtgtgttctttggctgttgtgtggtagtgtccgcggtggttcgtcgtctgctcctcctctgcgttgcgttcgccgccttcttctgtgatttgtgccggcccacgcagtgggtgcgcggcgcgctcccggcgctgctgctctctctcttctgcgtgtagaggagggtgagtcgcgtcgcgcgcgctcgtctcagcacagcgcgctgtgtgtgtctccgcgcgcgtggggtcgtgttctctctgttcgtctgctctctcgctcgctccgcgcgctcgctcgcgtgcgtcgtgtctgtttgttgtgttgtgtagtatctcttctgctcttcgttgtgtgttttgtctctctctctctctctcacgcgcgcgcgacagcacagagtggtatttatataggagtgcagggcgccacggctcgatgctcgcttctctctctctctctctctcgtcgtactactgagcgtgtgtgtgtgtgtgtgactagatgatgtgttgagagagagacacctagtataataaagaagatttagtgtcgctccgccgctggtgtcggcgtggtgtgtgttgtagatagatatagatgaggtgttcgcgcgtgcgtgtgtgtagtgcgagcaaaaagggcatatcgatgcgatagttcgttgttttgtgtcactcacctcctgtgtaataaatgaacagacgcgcggtgtgtgtgtgctgttttgtttgggtgtttttgtgtgttgttctcgccgccccccctgatccgaatagagaatgatcatctatatcatatctctatgtatatatatatatatatataataataataaaaaaaaaataatataaaataaatataaataatataaa

SEQ ID NO: 679162 - DNA, 352 bp, Homo sapiens
  misc_feature (5)..(5): n is a, c, g, or t
  misc_feature (26)..(26): n is a, c, g, or t
  misc_feature (43)..(43): n is a, c, g, or t
  misc_feature (73)..(73): n is a, c, g, or t
  misc_feature (84)..(84): n is a, c, g, or t
  misc_feature (140)..(140): n is a, c, g, or t
  misc_feature (187)..(187): n is a, c, g, or t
  misc_feature (203)..(203): n is a, c, g, or t
  misc_feature (242)..(242): n is a, c, g, or t
  misc_feature (306)..(306): n is a, c, g, or t
  misc_feature (313)..(313): n is a, c, g, or t
tgtanaagaaacccaacttgcttaancccaaaaacagggtganccccttgtgaaagccggaaaacatgtccanacagtcctgcnaaccgtggatgcttctgtagctcttctttagctctcccctccctggcatgaaaccnagaccacagactacccagaagatgaactgagcactctgcaatgggcnccagcacgctgctgcnctctgagaccatcttcccggccctaacaaccctggcagnctcttctccctggtggggaaattggccttacggaaaggacatctttaggacagtcatcctaccnagtaganctgactctatgcagccctgaatactgtttccctgggagg

SEQ ID NO: 679163 - DNA, 949 bp, Homo sapiens
  misc_feature (668)..(668): n is a, c, g, or t
agagaggcgagcaccgggaaggggagcgtggggcccgctggaatgggtgaatttacaggtccattcgagatacgatgtcatttaattatgttccatcaggaatccgctgtgtggcttacaataaccagtcaaacagattgggtgttttcagcgatacagtatggctactgttgcgaaatttatagaacgttgtccatgcaagactactttcaggagaaaattttttcccagtgtcagtgacggatctcgcgtggctacagtacacggcttcgctgtctggcgtcacgaacgtgacctagctgacctcgtttaggtgtatgtggcatctaatggccgagcagttagtggacgtagtgacttctagctagggcgttagaaacattcaaggtactgctatgggagtgacctgttgggagcgacctagtgtttgggacatcagtggccgtgcgcaaaccaccagctggacgtctcagagctatgttggcattgcgtcgtgcaaggaatggacgtactgatgaaaagcatattatacaacagtatagcaccacagaacgaagagatcgcagctgttggaaaagacacaattttggatcggcccgggaagaaggtcgcagtccatgagttcctcagggcgtggacatcccgtcgtgggtacgcgcacaagttgnccgccgtgggtgtccactagtactacactgtaggtggtgttgtatgatgatcaacaagtcgaagtgcgacggccgctggtatccataaaggaactggaaattgtagagacccaggggccatgttaatactgggggtcagatagtacttacaggccgggaagtgatgcgattcgtggttgagagggaagtcagccatttcccttgatccccgaatggccacctacgtcaattaaggtggttgggcaatgctgcctggaggaaagggtagcaggaccattggc

SEQ ID NO: 679164 - DNA, 298 bp, Homo sapiens
gtcttgccaaaaagggtaacctgaatttaatcatgagaaattatcagacaaacccaaattgaaggatattatataaaataactagctggctgggcacggtgactcatgcctggggtcccagcactttggtaggctgaggctgcctagtgaatcatatgaggctgtcctcgaaccccatacctccagtgatctgcccacctggccctccaaaagtgcttgaattacaggcgtgggctgctgcgcccagccaagaatgggtgtcttgaatatatgaattccctagtttaaagcccttcag

SEQ ID NO: 679165 - DNA, 273 bp, Homo sapiens
  misc_feature (2)..(3): n is a, c, g, or t
  misc_feature (80)..(80): n is a, c, g, or t
  misc_feature (133)..(133): n is a, c, g, or t
cnnccacttttgtggctgggctggggggaggaggcaatcgattgaacatatctgtaattctaatgcaaaaattttattanccgaagttgttgtcctgtaacaatacaatttttaattagggagcattttcccnttctagtctatttcagcctagaagaaaaggtaatgagtaaaacaaattgcgttgtttaaaggattatagtgctgcattgtctgaagttagcacctcttggactgaatcgtttgtctagactacatgtattacaaagtctc

SEQ ID NO: 679166 - DNA, 338 bp, Homo sapiens
acagctgtgaggcaggagaatcgagggaaatcatgagtacctgatagaaaaaggggtctcatagaaagttttttaaaaacaggcaacatttgatatgacttcattatttagtgaagagtgatgtgtgtactgcatgcatattcaggctcaaaaaaagtctggaagaggtcaggtgtggtggcttatgcctgtaatcccagcactttgggaggccaaggtaggtggatcatctgaggtcacgagtttgagaccagcctggccaacatggtgaaaccccatccctactaaaaatacaaaaattagccgggcatggtggtgggcgcctgtagtcccagcta

SEQ ID NO: 679167 - DNA, 145 bp, Homo sapiens
  misc_feature (85)..(85): n is a, c, g, or t
tcccccttcgtgattcctaccgctgctaagtaggtgagtatgtatgtgatgcccttctcgttcatgacaagtgcaaattcttacnaccaggagaggatgggatgtttgcgaaacttcatcttcactgggcacaccgtcggcaaaa

SEQ ID NO: 679168 - DNA, 1796 bp, Homo sapiens
acctgtgttttagaaacagaggggaaatttaaataatggagtcctggttagcctttccagggcattagggcatttggggtttttattttttctcgctctttttcacatcactcagacatatcgtcagtttttcatcacacacaggtcaagtttaacaatgtttcatggtgcccattctatgttacactgggcatatctgtgcacacagcacaccagtgaggtatgttcgtcccagtgcatcaacacgtgcatctccgaggtcacagcacatttctcaggtcacatcacccaagataagctgtggcacacaggttctatcagagatatcaagtttcacatcagcactcccagaggcagacatcaccagtggccttcgaggtggagaaatcaacacgtgcacccgtttgtatactatcagctctcacacaccttatttatacgcgcaagacagaccacgatcactctgtggtaagacacacgtggtgtctatattctcttaacagagtatcacaacagcattttcaatctgtgggtcgtcctctcccagaagtgtatacaattggtggccatatacaaatcacgagtctatcacccggtgcgggtggctattcagccatttgggcaatcagggccaaacaaacctactttgctgggcaaccagtgtgtagggcgcccccaatctaaagtgcgatttggggtgtcactaagtagttattccatataaaaagggcttatggggattgtggagttatatgttgaaaagtgttgtataaaagtccaatataaaaaagaaaaaatatagttgtgtatcgcaagaggagcaatgaattgatgtatggaggaacacgctgattttagaatatttgacgctaccaaacaatcatcatcagtgtagcggaacaatattattgggggtaaaaacattatatgtaggggggagtatacattcgcccataaaccgcgatggggatctaaattcaaattcaagttaatgatactcagacacacaagaggcttatgtgagccggtctattatcacgagcacactttacaggtgggggtctgtacacaaccacggacagacaatagtatttgtccaacatagcgaccagattaacatcatccgcagtctaccattcaagactacacagcaaggtcgtactgtcacacgcggacaacacgagggttggggctatatacacacgacaaaagttaactacgcacgacggggaaacgcaccacagaccactgtctaccgatatctaacggtttagtgcggtactctgactcaacgaacactattcttgaagtctaacgcggtcacgctatagagcaacgcaccccacaatgaatcgtttgtgcggtggtgacacacaccagtattgtgggacaacggacgcgcaactatcatacacaagcgacgagaatcacacgacggactagctaataagaaggcggtatgactatctaacatctaccagcgacgccacacaactaatcgcattaccctcttatacacagtgtgcagttcttacctagtttcacagagagtggcaaccacattttggtcgagcaaacaacttcgggagcggggtagcagacgcaacgtctagctacgtcagcacctgctagcgtagccttcactaaagtaccaacgaacgcttagacagtagctcagttgtgtcgcgacagcagcctaccagtgcctctcactaacagcgcacttgtgacagcacacaaccacatgagtcgatgtaggtgcgacacaaacggacatagcagacgacgcacacgac

SEQ ID NO: 679169 - DNA, 101 bp, Homo sapiens
gtgccttccactccctggctattgattcctagaagaagggagaaggagggaggtgacctggcgagcgctctccaaggccagctggtgccactgtctgcgga

SEQ ID NO: 679170 - DNA, 343 bp, Homo sapiens
gttgatggtgtacgccgacgattacctgctggaggtgcagccatgaacaaggtgcagaacaacaaggcctggtggctggtgttgccggtgttcctgctggtggcgttcagcgcggtgatcccgatgatgaccgtggtcaactattcggtgcaggacattttcgaccagtccagccgctactttgtcggtgccgactggtataaacaggtgctgctcgacccacgcctgcatgactccttgctgcgtcagttcatctattcggcctgcgtgctgctgatcgaaatcccgccgggcatcgctatcgccctgaccatgccgaccaagggccgctggtcgtcactgg

SEQ ID NO: 679171 - DNA, 631 bp, Homo sapiens
gcatggcatgtttttttttttaattttataaacattttttaaaactgcatttagaggcaagaccctttggatcaaaaaaaaacacggcttcctaagagacaaaaatacttctaggttaactagaccagacctgacttgggactttattcctaaaacaaactgcagaacgcgagaaaaaaagggggtatttacagaagacacaaggtacataagtacttagaggtacaaattgggggccagaaaagactcaagtatatgctggcatctgagaagcaggtctaaaagagcttagttcaattttctcgaattttaagaacgcctaagatcctccttaaccccagaccttgggagccaagtaggatcttaagtgtcccatatccggattttaatactctacaacaaggggaacacttggagacatactgggggtcaccgccgagaagagggagtggcttttggaaagaagtgcaggtcccccaggggaaaaggaagcggaactgggccattcattcccaagggaacagctgtctccacttatgagacaataccagggctggaacaataaaagggcccaacgccaagagtccccctttcgaggaagagcaaccccgcccattacccaaagaaatct

SEQ ID NO: 679172 - DNA, 1321 bp, Homo sapiens
taaattacttttatttaaagtggctggaatttactcccgggccataaagttttgggttttcttcagtttcttctggggatatctttttcttctggggcaacctcctcttctgggtttagggaacaatctggtgccttttccggaaagggatcatctcaatggtgggcagggagagctcatggtatggggttaatccggaccatgagctctggtaggtcccgggggcgctattcttaaggtggtcttgggtgcccatctggggtatatatggctccaatggaccaagaagaaattctcactattctaaaacccttaaatgttccagctattaactcctcctggggtctttaaagctatgtgtggcgagcaaaaatattccgagcaactctcttttgggggccaccggactcttgtgtgtgcccagcccctattggctgggcgcctggggcacaacctggccaattcccacctatgtggtgaacggtccggctctgagaccaggcaccatgggcgggttgggggccaaagaacaagcgcgcgccttacagaaagggcgggccaaaaaggggacgccaaagaaaagaaactgggggtgtgagacccccatttctcctaagagaacacagatcgggtcactcgatgcgtgagaaacgccactcgggctaatgtgtgccaattataacgaaaatttctcggggacaacagaccgctcgtccaaccagggaccccaaggggaaacccaacaattggcgctcctgagaaggggccccaaagggggtcccggggggtctcgagaaagtggaggtccctcgggcgccggatctctcgcccacacattgcactccacagtccgagcatctctcacgacacatattcccaaccgcctggggtctcactgggacaaccttgtccccggggcgtaaaacaaacgtggcgctgggaccataaattttcccaagcgcgcatgggggattctctcatccccgggtggaccacacatctgttgttgccgcattgtggtgcccaaccaacacggggcgacgcgacacaacacggaggtggtagagccccccaggctgcgacagcgccaatcaaaccaccccacgagggggaaccactggcgacacccgcccacggacccagagggggggggagtacccaaaacaaacgccgcacaaacacaatcatcgggcgaacaccacctatagtgcccacgcgcaccacaagggggtcggcacactccgacacaaaagctagttagatcacctacccgcacacggctgccacatgcgccaccaaaagggctacgaccattcatatc

SEQ ID NO: 679173 - DNA, 672 bp, Homo sapiens
  misc_feature (26)..(26): n is a, c, g, or t
ttaatatggcaccttagtatcagtcnatatgtagcactcatgtcaagtaggatcttgctagtccgtgagtgtatcctactcgttaagccactgtactactaagtgtcatacgattactacactgtgacatcacatctcacttgagactgcacaagcagcgttcaactcatacaactgtgtcaggctcctcattggctgccactacaggtgatggatacaactcacggttgagttctagatcatccagcgtatagccatgttggacagcctggttattgaccctaagccgcaacatgttccgagcatgttggcgtcctaaagcgctagtataccagggtgtaagctactgctgctgaaccaattgtcaagtcttgtatgtactagatcaatgaatggtcatctactctgctaatagtctcgtggattatggcacgctgtatgttcagctgtacgcaggcaattggatgtcatgcaagttataacgtcagtcaccgtttaagacgacctcaataatactttgactgtaaatgatcagaccgtgttaggtaagtgttgatcatgggcgtcggtgtatggatcattcacaacagcatctcgccatattgcatagtatggaggttcagaacggacatatctcagcatcaggacgatcgtagagcatgtgcagtcaag

SEQ ID NO: 679174 - DNA, 506 bp, Homo sapiens
  misc_feature (506)..(506): n is a, c, g, or t
accccatggctgggaggggcctctgaacggaacagtgtccccacagagcgaataaagccaaggcttcttcccaaaaaaaaaaaaaaaaaaaaaaaaaaaaaaaaaaaaaaaaaaaaaaaaaaaaaaaaaccagagcttaccaaacaacaaaaaacaaaaaaaaactactgtacgcgggccgcggttctgccgcggaagcattatataaaaaaacaaatcgcttgctgggtgccagcgggagcgccacccattaagggaggacagcaagggacgcgaacacaatagtgtgtagttgagctgacaagcaccgagcaggaagacaacacagcgaggggtggcgacgcccccacaataaaaaaacacaccggaggggaagaagcgagggtagttaagaaagaagaacaagcaagcgaggagtgtccaggccagagcaaggggtgtattataaaaggcaggcgcgcagcagccaaggacgggagaaaaaaaacacacgcccgctagtgggn

SEQ ID NO: 679175 - DNA, 929 bp, Homo sapiens
tttgctgtgccgcgccgacaattgcgttgtgacctgctgtgtgattggtcgaccttatcttgcggctcatatattgcggtttttgagagccccctattttaaagtccttgtggaaaggccccccggtattgcgtgtccggccgccggctttttttaaaaactcctgcttacttttcaagggagccaccctgtggatcccgctgtgataacatgcggcacactgttcaccaaacgatgttgtgcccaatcgacgtggcgaattctcgtgggaagctcgttaagagccacacaaatgttgtgaaataaaatcatgggggcctcactatataggtgaaaagcttattgaaaaaccccggtttgaggtggccctcccccggatactatgtggccattaaacggctttttaatttacagggaggaattgtccagtgtgaggagtacaaagaaagtccgcgtttaggggtgaggaacaacaagttactctgggggaggattttgactttacccaagtgcagttgtcactgtggagatgacacccttgtaaagtcctcacaagaccacgtttctttaagacccctctggccccgacaccaccatcttggggagtactctggccaccttagaaattcgagcgacagatcttccacgcaggtcgttcacttctttggacaaccaagcgtgattgttctcaacagggggggagaacaagtttcgcggccgccctctaaactgtggagtacaaagcgaccttactccaataagtttttaaccccgcctagtctgtgtcttggaagatatagtcgcgtctcctcaaacggtcttattgatagcaaggaggaaaccatcagttgatttccgtcgcgtaacaagaaaacaattcttccctgatggagaaaaaaaatttttccttgctaaacgcaccacatgac

SEQ ID NO: 679176 - DNA, 838 bp, Homo sapiens
cacgacgagggtgatggtagcacgaagacggaggagcgaactgcctggacccagcgacctaccgcctgccggggctcagcgagagagccagagtggcggaggaggcttgagacgactcggagagccgattgaagactttccacctggacacctgaccatgtgcctgccctgagcagcgagtgccacaggcatctctgtttgttgggcatgcatgggccatggtcctggtcttgtggaccctcagtgcaagttggcagggcgtcccctctgcaagtaggagggtctagggcccttcgggcccacacagtagtcagagcctctggctggtgtgctcccagggactagccggctgagcaagtaagacaatgcgaagctaagcagccaaatgagcagctgagtgagcaagttgagtaagcatgttgagtccaaatggcatggaagcagctatgaccaagatgtgcaagtggtggactgccgtacgtcaccagacctcagatgggcagatgacacacacagccccccgagcgtctggaacaagagcggtatcatcagtgagcccctcaagcaagatgccttgctgccgctcccgcccggtctcccagctactctatctttattggcagcagatgtgttgtgtaagttgtgcaggtggcaagcattgattgggcgtgagagttcttgcctgacaaggccactgcggcatgccaagcgctgccttccctgttgggccaatgggcatgacctggctggggccatggggggtggacaaaagcaaccctaactcaaagcaccaaagtggtgcttgtggccacgcctgctgagcaaagagaaacgggca

SEQ ID NO: 679177 - DNA, 457 bp, Homo sapiens
gattgtgagaggggcctgaattctgtaaaatgtaggtgtagttataaatgattaccagccattgttccggggctcataagatttgcaatttctccagttgctcctgtaagtaacatcactattgtataatttaagattggccttttgtgatatcttttcagactttgtatttctgaagaccaggtgctccacccagccagagactcaggactcagctggtcctgtggcccctacccagaagtggaatcagtagagaggaccagtttccatacccctatgattgcatccccaaccagtcagccacacccaccctctagccacctgcccaccaaactgtctttaaaaaccctagtctctgaattttccaggagggtaaattgagtaacagcaaaactgtggtctcctgtttaaccaactttgtgtgaattaaactctttcctttgcaatttccaaaaaa

SEQ ID NO: 679178 - DNA, 385 bp, Homo sapiens
  misc_feature (54)..(54): n is a, c, g, or t
ggcacgaggacgggagtaacaggacggccatccggggctgatatggggaccctnaagccacagcacaacgcagagggagctctaccaagactttgtatttctgaagaccaggtgctccacccagccagagactcaggactcagctggtcctgtggcccctacccagaagtggaatcagtagagaggaccagtttccatacccctatgattgcatccccaaccagtcagccacacccaccctctagccacctgcccaccaaactgtctttaaaaaccctagtctctgaattttccaggagggtaaattgagtaacagcaaaactgtggtctcctgtttaaccaactttgtgtgaattaaactctttcctttgcaatttccaaaaaa

SEQ ID NO: 679179 - DNA, 325 bp, Homo sapiens
aaaaggacaaagatctgaatagacatttctcaaaagacatacaaatggccaacaggtatataaaaaatactcaacatcattaatcatcagagcaatgcaaatcaaaaccgcaatgttatcatctcacccaagttaaaatggcttttaacaaaaaggggatgacagataagtggtgaggatgtggagaaaggggaaccctcataaacactattggtagaaatgtaaattagtatagctactatggaaaactgtatggaggttatgcaaaactaaaaaatgaactattgtataatccagcaataatccactactgggtagtcacaga

SEQ ID NO: 679180 - DNA, 480 bp, Homo sapiens
gcctccccccccaacccccaaacacaacaaaaaaagcctggtgttgaccacacagtgctcccggtgtaacaccaaccgaaaccaaaaattgaatcaccaaactggaaggaactccaaatggcccaaatattgataaaaaggaagaagatttagaagacaaaaacaattcttggcgctgaacctccacatcacactggtgaatgttaccctcatgagacaaactctgccactacggacttcgcactacaccccccttaaatggccctttttctccaataactaacatatcccccgccacccccccgcgcccctacatcccaccactgccgccatctaccatcttctttctacaccgactcccacgaccgtccctccgccaccccaccgacacccaacatagcgggcgacctatagccccccccctagccccccgaccctcccccctcctcctcctcctgaccgcctccccccctgcccccc

SEQ ID NO: 679181 - DNA, 151 bp, Homo sapiens
gttctcttacatatgttagggaataggcacactttcagagagagggataggagctgatactgccttcggaatcactttggatagagtagattgatggatgctggggaatgcagtgtaatatggaggatggcctcgtacgggtgtgatttgg

SEQ ID NO: 679182 - DNA, 652 bp, Homo sapiens
  misc_feature (26)..(26): n is a, c, g, or t
  misc_feature (28)..(28): n is a, c, g, or t
  misc_feature (51)..(51): n is a, c, g, or t
  misc_feature (56)..(56): n is a, c, g, or t
  misc_feature (60)..(60): n is a, c, g, or t
  misc_feature (68)..(68): n is a, c, g, or t
  misc_feature (91)..(91): n is a, c, g, or t
  misc_feature (94)..(94): n is a, c, g, or t
  misc_feature (121)..(121): n is a, c, g, or t
  misc_feature (151)..(151): n is a, c, g, or t
ggccccccccctgggggtttttttcncntttttttttaagaaagggtgggnttttntaanccaacctnccagggccttttgaccagggtgntcncttaaaatggccagggtttcctggaanacctttaaaaaaattgcggcccatttgggngggaaaccaattttcagaactctccatgggagaagtggaatgctccatggaatatcagaacaggagtttaactgcgtagactgaactaacagaagctatttacagtttttaacagttcagtaaagtacactcctgtgaataaaatttggagtgtatttgtttctctctacttgatttcttcagagtttggaaactatttgtgagtattcttaatttatggcaaatagttatttgtgtaagtgcaataagaatctgttttcttttgtaacaggatacaattggaaaaactggttattttaccaatgctttgactggaatggcatgctttcctttaaggaatcaaacctgacttgtaaagccaataaaagccacttggggaaatgccttataccttgcctatgcagtccctgtgcagggtttctgacctgtggtaagtaaagaatgtcactttctaacaggtccaggagccccaagttatcttggaacctcaagagctcgtgc

SEQ ID NO: 679183 - DNA, 525 bp, Homo sapiens
  misc_feature (21)..(21): n is a, c, g, or t
  misc_feature (44)..(44): n is a, c, g, or t
  misc_feature (126)..(126): n is a, c, g, or t
  misc_feature (308)..(308): n is a, c, g, or t
  misc_feature (310)..(310): n is a, c, g, or t
  misc_feature (327)..(327): n is a, c, g, or t
  misc_feature (334)..(335): n is a, c, g, or t
  misc_feature (344)..(344): n is a, c, g, or t
  misc_feature (354)..(354): n is a, c, g, or t
  misc_feature (356)..(358): n is a, c, g, or t
  misc_feature (360)..(361): n is a, c, g, or t
  misc_feature (364)..(364): n is a, c, g, or t
  misc_feature (366)..(375): n is a, c, g, or t
  misc_feature (381)..(381): n is a, c, g, or t
  misc_feature (383)..(383): n is a, c, g, or t
  misc_feature (394)..(394): n is a, c, g, or t
  misc_feature (405)..(405): n is a, c, g, or t
  misc_feature (411)..(411): n is a, c, g, or t
  misc_feature (417)..(417): n is a, c, g, or t
  misc_feature (426)..(426): n is a, c, g, or t
  misc_feature (430)..(430): n is a, c, g, or t
  misc_feature (436)..(437): n is a, c, g, or t
  misc_feature (513)..(513): n is a, c, g, or t
tctatttatttataaacatgntttataccgaggagatgggaaantggacggggcagggtggactgaccggggatggggaagctcctctcgctgccccctcggggcgggcccaggccctttggaggntggggacgccagtacactcctccctgaggttgtctggccgcctctgcccctggtgctcagaatcctgcgtgcccctcaattccggaatccctcccgggaccccaggcccactgggcatgctgcccctgctactcagaatcccgaagcgccattcagttccagaatcccctcctcagctgctngngtggcggggtaactacnttccccnntccaacccngaccccccantnnntnnttncnnnnnnnnnnatccantntacactctatnacagggggagntggggntggggntgggatacngaanggcgtnnaatgcgggggccattagggctcagccgatggtgaggccaaagccacactgaaacttgttcttgcggtgattcaggnaggccccaaggg

SEQ ID NO: 679184 - DNA, 134 bp, Homo sapiens
tcgaggattagccaacaacagtcgtagagggtagagtcggcggtactgtaagttttaccagaaagttgcacatgtcccattgtggcagctgctccgggatgttgagggccttccgcacgtcctggttgttgggc

SEQ ID NO: 679185 - DNA, 437 bp, Homo sapiens
ccacctcagcctcccaagtagtggtgaccacaggcataagccaccacacccagctaattttggtattttgggtagagaagggatttggccgtgtcgcccaggctgggtcttgaactcccagattcaagcaatccaccggcctcagcctcccaaggggcgggaatgataggcatgagccaccaaacccagccgatacctttgtttggtctaaaggcctgtatcctcccttagggtaaattacagtctagggtcgggggtctcttcaagaaggagttggattcatttaatcattacctatgagggacctaacatgtgcttcgggcaacacagtagtaaccaagcaaggtatgaggtctgccttcagggatcccattttagggcgggaaaacaatagacaagtaaacaattaatcacaaattgaagtggatgctatagag

SEQ ID NO: 679186 - DNA, 251 bp, Homo sapiens
caattccacctaaatgcaaacactcacttatgaagtggcaattcagtggatcatcgcattgaacatcgcagtgcttcagctctacggatattagcaacaatgataaaacttggccttgcagaaatttacacaactagttagaacttgtcactattgtaaaggaagagtcaactggaaaattcaaggagttaataaaatttgtttacttggtcccagcttttgagagataaatcccaggaatccccggtcga

SEQ ID NO: 679187 - DNA, 664 bp, Homo sapiens
gaatcattaagtcaagtcgcatatttgtcagatccttgtcaatgctacctgtataaaaataccagcgtattcactgctatcatcaatcaggagcgtgtggtgaataagacgtacaagagtaatctcatgtctctgaatagtttagcgatgatgaagttccagcaggactccatcgttgatcctgtggactatgagtggtttggctttgataaagctggtccagctgaagaactgcaaacactgcaagaaagccccatatacaaagaggatcgtctgggtttggcagcgatggattcagcagggaagcttgtgtttctggcctctgaaggagatcatctgcagttcacccgagagtggtttaatgagaatctgctgtcctacttgctatgaaaacaaaacttgcttattcacaataaaagtttacacgtgaatgcgcgcacagtgcttttattttcttatttcagcatgttcgtaactatcgtctcatacatatgcgatgtcttgtatagaaatgaagccagtcttgcttgttttattgcactgatcttttatttgatttaatggaacaaagaaatcaggtttaccttgatatttaggttttaattttactaattacgtactctttttaggtcatttttgttaagcaatacccacacagcgcaca

SEQ ID NO: 679188 - DNA, 414 bp, Homo sapiens
tgcgctcgtacccattctctgctgactctgtgttactccttagtgaacagacaaccagagagaagagaagcccaatgacaatgtgcctgaccttggtatccaggagaacagagccttggtctaaccatctagcagtggtggctgagggccctgcaatgaaagaggcacaccagtgatgaagcaagaggaggtgtatacatgagttctggttcaacacagaggccgccaacggggatctagctatgagtctgtcctggtgaccgtgcccaaccagggcaccttgtgaggacagttggcaccatccctcactcaggcttgtcttggccctcaaggaccccatgtcagggcctttttccaaccatgtactccacttgtgctgccatcctcttgggaacagggggtcaatcccaatcc

SEQ ID NO: 679189 - DNA, 535 bp, Homo sapiens
aatataatattaatgaggataccatgggatgcatcatttgcgttacacgatatgcaacgggtcagtatacagaggtttccggccagggtgattggatgacgttctcttaaacctaaccactggctctgtgctagtctaaatcccatcagccgtacatgattccttagcttccctctatgtcccagctgtggtggtcagagggtagatgaaaagttggggcgaagggatttaacaaaagttactgtatgcgtaaagattggtgggaagattcaggtctgaaaacatagcattagaaggtgtctagagatgatctagatgaggaaatacaggagcatgtggtcattctttcattcaccagacagctatgtagcacattctgctagtggcaccgcaggatatatctgatttacaaaataggaaccacagtaataatagctgcttatgcgtatggagcatggtcatgtgctagataggcaccatcctcagccctgggcagggctgagctcctttattgcttccaatcaacagtatgagg

SEQ ID NO: 679190 - DNA, 1537 bp, Homo sapiens
  misc_feature (293)..(293): n is a, c, g, or t
  misc_feature (1365)..(1365): n is a, c, g, or t
cctctactcgtccttccttcatttccttgtcatgcatatcagtgggtgcagcgacttcatacgacagacgacgtaaggattctccggactcgtatatcatggaaccgtgggaggttgaggggctcgaagctccccagtagacatgagtcgtttgagttcctatcctaccttcctcgacactaatatcagcacccatcgattctctacaatcagagcgtagacacgctcgaaagataatttatactattcgaccagcgaaggcgaaaacccgcagtccagtagattgccgttcntaaaattcaccctaatgctcgtgctatacaaaaccgagatattcgcgtacgtacactgcgtactaagtgtatacgctcactcacatcaacaatgcactttcattcgaatcaaagtagacatctcatatcgatttccattgacaatcgaatggccatggggaatgactaggctgggattataagagcgataagcgggcacaattaaggccgccaccatatgccaatcgtcttcctgtagctcacacccagtggggagtctaacacacgcaaaagggtcagtcgcaccacattacagtgaactcagtcaccacgtgtctccttgtcgatttccttaattcctttgaatggatattgtaacaaacagatcaatcgtcaatttgctctctctaaatccgttgtagagattaccttgttccttaagccaccaaattgatttacttactttctcacctactaacaataatatgagtcggttaagaggtgtactcctcctaacctttctcaatgcacgctctttgcgttccttgccaaacgctacgttgtgacttttcgatattacttatttagagacgaagaggcctatgtgaacgcggacatgggcatagaaggtatatttaaaggaattggctatagacaacccacaaggttattgaactgtgggcttgagaaaagatctcttttgaggaggcaaatatatacgtgggtcataacgaaagtgtttaaactttcaattggagtttgaggacctttggtaagatcatatttagagggacattgttctaacttaatttcggatttgagccaatatggcctttaagaggaatttaagacgtctatttttaacctgtaaaaatatttttaaacaggcttgagttactttaaattatattgttattggcccgtttaaaagatatatactaaaggtcgtgatattttggcccttgaggtgtaagtcttacctaaaactgttttaacgacactggcacattggtcacgcaactttgacaggccgtatattttaagcttaatacgaacttgaaggcctgtggaccaatgagcatatgagctcaanaacaatttggaaatttagagcagaggccctggtagaaaattctcccgaggaccatagcctggtgccataatatccccgtaaaagagaagcgcgcatttgtgcacacctctggcgtgtgaaaaccggagggtgcagtagggccgcacacaatttttgtgtggccgccattttc

SEQ ID NO: 679191 - DNA, 513 bp, Homo sapiens
aacatgcactgctaacttaggcattttttggtagagtgggtgttggccagtgatgcccaggctagcacgtgtaatcttacacgccttatatatggcttatagatacaccttggtgtacatgtgtgtggtgttcgattaaaatttcctaattatgaggataagacctttaattcttatttctgttttttcattttttatttttagctccgactcagatttagaacggatgtttgcatgtataccacagtgctacattaaaaaccagtcatgtggatgtggagaagggtgctgatcaggactccctgttggctaacaaattctacagcagaaacaaagtattagggttggcagccaggaagcaagtgcatggggaataagcctgcagcttcttccaaatgagacagagccaaatcttttttctgagtctgtattcttcatttctattaaaccaaggtcctttttaagcagtcgaatttcatccaaagccagagtgagctacttggtaggggggaa

SEQ ID NO: 679192 - DNA, 911 bp, Homo sapiens
  misc_feature (363)..(363): n is a, c, g, or t
gaccgagccgaagaagacatggatgaggaggcccaggccgccacctgcaaccacactgtatggccctaatggcttccctggatgcagagaaggcccaaggacaaaagaaagtggaggagcttgagggagagatcactacattaaaccataagcttcaggacgctgtctgcagaggtggagtgactgagaagagaaaaccaggtcttaagcgtgagaatcgcggacaagaagtactaccccagctcccaggactccagctccgttgcggcgcccagctgctgatgtgtgctgctgggcctcagcgctctgttgcagtgagatcccaggaagctggcacatctgtggaaggtccgtcctgctcgngttttcgctgtgaacattcccttgatctcatcaagttctgagcgggtcaatggggcaacacggttagcgggagagcacggggtagccggagaagggcctctgagcaggtctggaggggccatggggcagtcctgggtgtgggacaccgtcggggtttgacccagggttgtctcccctccagagcctccctccggacaatgagtcccccctctggtctcccaccctgagatggggcatggggtgcggtgtgcgggggcatgtggctgcctgtgtatgggtcaagcgggggggtgcttcctggggtctgagtccaaaaaaattaacattccttgagggagagccccgttaaaaaaaaaaaaaaaaaaaagttgtgggcgcgggcccggaaggttcaaccatcggggggggcgaccgagaaaggaactggccacggtgcaagaaacgggcccaaggggcgtccccaaaagccgggccggtggacaccccggtcggcttcgctcagcccctccccccccgcggaaaaaccaaacacaaaaaaaacaaaagca

SEQ ID NO: 679193 - DNA, 430 bp, Homo sapiens
gacaaagacagccaagagggcggctcggtttcccagccagcagcaccccagcagacacataggtttggctgggaactggctgtgggcagacacaatcccactggagaaaaatgtgaatctggacatttgtttagctgagtggcggtgatggcaaaggaaggctccagtcctgcagccgtggcatggcgccagctctcaggaacttactgagccaccctggtctgctggatctagggagccctgagtcgagccccacctgtcaccatactctaggtttgaccaggactagaagatgacagacagcaggctactcggctgggctatatggcttgctcactggcttgctcacttcaggtagtgattttcaaattccgtcatttaatgtgtgtccaaataaactcctatgcaaacctcaatatataatacagat

SEQ ID NO: 679194 - DNA, 947 bp, Homo sapiens
gggtggatgaccttgaggccctcaggaacgagagtggcggtctctctgtgaggctgaagtgccgatcctgcggatgcccttaggaggcctgaggctctgtccgcttgcagaactccatgtggttcatgacctgtctcgatatctcagtcatttgcttcagtgacctgactctatgcccaagatgtggatgtggcagttgcacggacgagtacgacttgtctatctgagcacaccaattcatggactccacaggcaatgcatctactccacatgcgactcagcgatagggttgtccagtgtttagctcccgtgggtctgcgttcctggctgcttatcttgaatcctttgtctctgtcgatgcgactattccctggcgtgcagccctcactccttcatggtccacttggggccttgtgacagagttgttgctcgactatgttcatggggcatgccttgcagtaaacgctgccgaatgcagggcttttgtgcactgtcagctttaatcctttgctggtgttagctatgtcaactatcacgatgtgggcatctgcaaagctgttgccatgctgtggacgctctgacctttttgacttcatactttgaagaattgatgtatgcctctttgctctgtttgtcatgccattaagctcacaataaggcacagcaactaccagattagtccattggtggacagcctaattgtcttaatcccagatatcttcgaactttactctcgcggaacaggttgagaggaatatatctaaagtgggagactgagtctatatctggagagttaaggggagtggcatccaagttggtctaagactcagaggataagtaagatgaatataagcttggcttcaaggtatcatctctaaagagaatcagtggtacgataatataggtcaaagtcaattgcctggaaaaggaaaggacacgttagcaga

SEQ ID NO: 679195 - DNA, 857 bp, Homo sapiens
accatggctgattcagctgagcgagagaacagattgctgaattcaaagaagccttctccctatttgataaagatggcgatggcaccatctactaatctaaaggaacttggtaactggcagtgaggtcactgggtcagaacccatacagtaagctgaattgcgaggatatgatcaaactgaatgtggcatgcgtgatggtaatggcgaccattgacttccccggaattcttgtgacgtagtgactgtgctatacaagacatgcaacacgatacagactaggtgaagaacgaacaatcccgctggaggcaattcccgaggtctttgacaatggcatggcaaatctgggttataatcatggtgcgagcatgaacctacgtcacggtcaatgacgaagagcttagagaggaaaaacgtatgcagcactgaatgaaggtaagaatgacatgtgcactcagagacagcagatattgatggagacggacaagtcaagctatgaagaattcgtacacgatgatgactgcagaacatgaagacctagctgttcaagcgtcctattttcgccccctctagaaagaatcaaattgagttctttgacttacctcttgcgaaagacaaactggataaccacaaccaagaccagcagctccatagagggggcccgcgcagatgttcctgtgtgaggcgggcctctcttgtggtgcgcaccagtcttgttgccggcaggggccggcccccggcgcggccctattagcccaggcagcggcgctggcccacgcttccgccgtgacactgctgtggttccgactttttcctgagcacctgacttcggtggggggacacttccggcccgctgctga

SEQ ID NO: 679196 - DNA, 294 bp, Homo sapiens
gagtgtggaggactttgttcctgacgaccgtctggaccgcagcttcctggaagacacaacccccgccaggacgttgaagaaggttggggccaaggctgcccagcaggacaagtgacagtggatggggaggccctggggcggcaacccagatgggttgcaggatttccagggacgatgttggaccttcgaagacccagccactgtggtgagtcccacctcttgtctgcaggccgcacgtcccccagttcaaagacaatcacttactttcagagtcgagtgatggaagccagttag

SEQ ID NO: 679197 - DNA, 712 bp, Homo sapiens
gcggaggcaggttgctgtgtcgtgcttccttctacagaccaatatgaaaagggctaagtgaaagaaagcaagtaaacgcagtgacctgccatagagcggtataaaatccagaaaaaggttgcgagaaacatcatcgaaaattaagaaaggaggctaaagaagcagggtcacaagaagcctaggaaagacccaggagttccaaacagtgctccctttaaggaggctcttctatagggaaggctgagctaaggaaacagaggcttgaagaactaaaacagatagcagaacacttgagcaggtcagagaggaactagaaccagaaaagaaaacttgaaactaatcctgatattaagccatcaaatgtggaagctatggaaaaggagttggggcttgtggaagaattgagaacaaagccgaagtcaggagcatagacagaattcaaagaagctgtactgcaagaacttaataaaggtgattgaagcctccgatgtggtcctagaggtgttggatgccagagatcctcgttggttgcaggatgtcctcaggtagaagaggccattgtccagagtggagagaaaaaggtggtacttatattaaataaatcagatctggtaccaaaggagaatcggagaggtgggtaaattatgtgaagaaagaataggcaaagaggtgttcagaaagtcaaaaaaagcaaggataaggggaagataaa

SEQ ID NO: 679198 - DNA, 643 bp, Homo sapiens
  misc_feature (559)..(559): n is a, c, g, or t
  misc_feature (570)..(570): n is a, c, g, or t
gtcatcagatactgccagtgtgcctcttcagtgtgccagagaccctgatcgtgtcaagcagtcctagaaaaaatgctcacccgctttctcagatgaagtgcagtagggctccctggcctgcacaaagccagtgaccatttttttaaaagcccttggaaaagaaaggcatatattctgcaacacaatatttggtggacactatcatagcattttgtaagatcgtatgtaaccccaactgtggctctgaacaaaaaaatattattcagccccagaaaggcatataaatccctacaaagtacagggtgggttttgtgggttttattaagtggttaaattctcacaattttttgcctttgttcagtgcagggagacagtggtctgcaagggtggtaacaactgacttcctgagaatcttttttctttgagacagggtcttactctgtcacccaggctaaagtgcagtggtgcagtcatggctcattgtagcctccacctcctgggttcaagccagcctcccacttcagcctcccaggtagctggaactataagcacatgccancacacccagtntattttttatacgagatgagagggggtctcactgcattgccaggtggtctcaatctaggtcaaggatggcagc

SEQ ID NO: 679199 - DNA, 788 bp, Homo sapiens
  misc_feature (737)..(737): n is a, c, g, or t
  misc_feature (744)..(744): n is a, c, g, or t
aattcaagcttctaacgatgtacggggacatggggaagcagatttgggtaccacccaagtattgactcacccatcaacaaccgctatgtatttcgtacattactgccagccaccatgaatattgtacggtaccataaatacttgaccacctgtagtacataaaaacccaatccacatcaaaacccccctccccatgcttacaaggcaagtacaggcaatcaaccctcaacttatcacacatcaactggcaactccaaaggccacccctcacccactaggataccaacaaacctacccaccctttaacagtacataggtacattaaagccatttaccgtacatagcacattacagtcaaatcccttctcgtccccatggatgacccccctcagaataggggtcccttgaccaccatcctccgtgaaatcaatatcccgcacaagagtgctactctcctcgctccgggcccataacacttgggggtagctaaagtgaactgtatccgacatctggttcctacttcagggccataaagcctaaatagcccacacgttccccttaaataagacatcacgatggatcacaggtctatcaccctattaaccactcacgggagctctccatgcatttggtattttcgtctggggggtatgcacgcgatagcattgcgagacgctggagccggagcaccctatgtcgcagtatctgtcttggattcctgcctcatcctattattnatcgcanctacgttcaatattacaggtgaacctaccctgaaacgtgacttc

SEQ ID NO: 679200 - DNA, 83 bp, Homo sapiens
ggatttgctggtgcagtacaactaggcttaatagggactcgaattcgaggaggaacagctctttggacactaggaaaaaaaaa

SEQ ID NO: 679201 - DNA, 169 bp, Homo sapiens
aacgctgtaatttacactggcacatcccattactctacgctacagccactctctgcacggagtgaccacacgatatgtgtacaactatggtacgagcttgcagcatcagttataatcctcaaaccatgaaacccaccttatttcaaaaacatattggtacagaccgtcg

SEQ ID NO: 679202 - DNA, 774 bp, Homo sapiens
  misc_feature (66)..(66): n is a, c, g, or t
  misc_feature (723)..(723): n is a, c, g, or t
  misc_feature (730)..(730): n is a, c, g, or t
ggaggacgcaacctagtctcgataaccagcaaatcaccaggtcaaaagccattaaggccattccantggtaaaggatcattcagcaaaagagctaacaccatgaatattgtacggtaccataaatacttgaccacctgtagtacataaaaacccaatccacatcaaaacccccctccccatgcttacaaggcaagtacaggcaatcaaccctcaacttatcacacatcaactggcaactccaaaggccacccctcacccactaggataccaacaaacctacccaccctttaacagtacataggtacattaaagccatttaccgtacatagcacattacagtcaaatcccttctcgtccccatggatgacccccctcagaataggggtcccttgaccaccatcctccgtgaaatcaatatcccgcacaagagtgctactctcctcgctccgggcccataacacttgggggtagctaaagtgaactgtatccgacatctggttcctacttcagggccataaagcctaaatagcccacacgttccccttaaataagacatcacgatggatcacaggtctatcaccctattaaccactcacgggagctctccatgcatttggtattttcgtctggggggtatgcacgcgatagcattgcgagacgctggagccggagcaccctatgtcgcagtatctgtcttggattcctgcctcatcctattattnatcgcanctacgttcaatattacaggtgaacctaccctgaaacgtgacttc

SEQ ID NO: 679203 - DNA, 622 bp, Homo sapiens
ggctggtgtctgctgtcttccctgagccagtgtgctgagctctccgctgtcgccatctgtcagccctgctgcactggccatacctgctgtgcaactccctgtgctggcaactgctcttgctttggccttcgcccaatgccatggttggacctacagccaaggtggagtcccggtggccactttagatgcccgtggccaaagaggaacaagcgtgggcggaacccagggaacggcccaaaaggtgccacacggcaaaacggagcacaaaacacccaccatggcacagttgagccaatttggtttcccaaaccaataaaccggaccctgtagtgtgcctggtgccggacgcatggtgcgacacctcggcacaacggacccccctttgctgggtgggctcggagcccaaacaaaacaacacggctagcgtgggccccagttcgggtataacagccggggacccgcccaccagaaaggcagccaacccaaaaagagcgggccaattcactaacacgacggagggaaagaagaacgcctatacacagaggacaaaacgccacacaccccacggtgagacactgccacgaaaagcggccccagccgtctacgcctccggggctcgagg

SEQ ID NO: 679204 - DNA, 636 bp, Homo sapiens
  misc_feature (636)..(636): n is a, c, g, or t
tgaggcaaagttttgcccttgttgcccaggctggagtgcagtggcacaatcttggctcactgcaacctccgcctcttgggttcaagcgattctcctgcctcagcctccggagcagctgagattacaggcatgcaccaccatgcccggctaattttgtatttttagtggagacggggtttctccatgttggtgagactggtctcgaactcccaacgtcaggtgatccgcctgcctaggcctcccaaagtgctgggataacaggcgtgagccaccgcgtccggctggagcaagtatttgtattgtgtggtgagtgtgtcttttgtgacatgaatttgtgcactgtaggacaagtttgtgtgctgtggcacaattgtgtgcatcaaggagtgatatatgttgtaagatgtaccgttgcatgtctctgtggtggggtaaacttgtctgaaagctatagggagagtctctgtagtatgggtttagtctgtgctttgcggggtgactctacgtgctctgcaaagtgtctgtgtggtgcttggcgctgtgttctgaagtgatgggcttgggcctattgtgcttgtctggacaccaatgggggagtctgtctgttggggagaagctttttgttggcgggctttn

SEQ ID NO: 679205 - DNA, 492 bp, Homo sapiens
  misc_feature (459)..(459): n is a, c, g, or t
ggattgctgctttaaaaaactcgaagtcatctttgagagagttggctagaatttgaaggcacagaacgatgcagcatgtgctttctgtcaggattgcacaactgaacagcagaagtttgtggtagtgatgaagagcatgagtctcagagtctctcattaggaaaaactagagagccgaatgggagaaatgccaatgtttggagtgtttcagataaagctataaagtgcagacatttctctgaagtttatctgcgttcatctgaacaacccaagtctagagatcagcttgcagatctaccacagtaatttctctggcaagacttccagtgtctccctgttcctgactctttcattggatcttacaaccttggctttgttttgtcttatccctgtaataaaaggaacatgatggcacagttaaaagatatattcaatggaaacaaataccaagatttttcnccctgtagcaataaatgggaatatatctaaaaa

SEQ ID NO: 679206 - DNA, 163 bp, Homo sapiens
  misc_feature (111)..(112): n is a, c, g, or t
cggggacggggtcgggcgtgcggtgtgggcatgtccctgacctggctggggccaggatccaagagaaacaatgggggtgtggtgcatggatagaagtttgtgatggcaganngcgctggagctggttctgattctgatgaaatcgcttgtcaaggcactgcaa

SEQ ID NO: 679207 - DNA, 231 bp, Homo sapiens
  misc_feature (12)..(12): n is a, c, g, or t
  misc_feature (14)..(16): n is a, c, g, or t
  misc_feature (39)..(39): n is a, c, g, or t
  misc_feature (48)..(48): n is a, c, g, or t
  misc_feature (61)..(61): n is a, c, g, or t
  misc_feature (70)..(70): n is a, c, g, or t
  misc_feature (88)..(88): n is a, c, g, or t
  misc_feature (187)..(187): n is a, c, g, or t
  misc_feature (196)..(196): n is a, c, g, or t
attcgcgggcgngnnnacggggggctggtctcgaactcntgacctcanatgatccacccancttggcctnccaagaagcctggaaatnttagccccattccctttccttcgggaaagggggaggaactggagattgagttaataattgatcatgccaggtcaggcacagtggctcctgtctgtaatnccagcactntgggaggctgtctactctggcatgaataaagatat

SEQ ID NO: 679208 - DNA, 767 bp, Homo sapiens
ggccagcgtggaaggagctgcggggcgccgggaggaggaagtagagcccgggaccgcaggccaccaccggccgcctcagccatggacgcgtccctggagaagggagtctcgggtcttcattgcccaggcttgagtgcagtgaggcgatctcggatcccttgcaaccttccgccttcccgggattcaagtgattctccgtgcctcagcctcccgagcaagctgtgactacaggcgtggtgacaccaaacccgattaattttggtattcccaagtagagatgggggtttcaccacgttgggtcaggatgggtctcaaacgcctgaccttgtgatccttcagcctcagcctcccacggtgctgggataacaggcgtaagcacatgcaccgtggccggggacttagatttatattccctgaacgtaatacaggcccttagatggacataacacgattaatatggggggctaatggcggcagaaaacgacaaaagcatgcgtgtattatgacttgtggatgacttaatgtgctggaaaaatagtcgtgggtcccaacgtgcaaaccattaatttgtgtcattatccctgtctttggaggaatagactatcctgcgttaaattctacatggtaatataaactcaagagctatgtgaccagttgtaaatgatcccatttacactggctggtgcatacattatactggttacagaaaccacatgttttggtggtcacccctaaattaaaataaatcccattaaatgtttgtgacc

SEQ ID NO: 679209 - DNA, 403 bp, Homo sapiens
  misc_feature (403)..(403): n is a, c, g, or t
aggccgactcggtcacgaactccgatcagagatctccccgtcagctccaagtactaggactacaggcgacacatcatgctggcatacttcattacagtatcatatgaagatagtgtattacagatgtaagcttacaactgtcagatgtgcatgtgattgggggtagatgtgaagaatttgcatatttatctcctgacatataatggaaaaataggttaaataaccgtgtgatagaaaactgtatctcgtataggtctctagagtgtacagacattgcatatacttcttctcctaagatgtattggaagaatgaggttaataacactgtcatgataggtcctaagagtgcgccagtgttatagagtcagaatgagaccttaaagtaaatgaacggaaaggttcn

SEQ ID NO: 679210 - DNA, 358 bp, Homo sapiens
  misc_feature (221)..(221): n is a, c, g, or t
  misc_feature (247)..(247): n is a, c, g, or t
  misc_feature (293)..(294): n is a, c, g, or t
  misc_feature (320)..(320): n is a, c, g, or t
ggccgtgttgctaaggagtaaaaatgtcagaaactattactggtgaattgcccaacctgcgggaaaacggtggtgtggggtgaaatcagcccgtttcggccattttgctccaaacgttgtcagctgatcgacctcggagaatgggctgctgaagaaaaacgaatccccagcagtggcgatctttccgaaagcgatgactggagcgaagaaccaaagcagtnacatttgtctgatgccgcacgtaggnctgataagacgcggacagcgtcgcaatcaggcatcttgtgcaaatnncggatgcggcgtgaacgccttatccnacctacaaaaacaaaatttatcaatgatgttagaaatc

SEQ ID NO: 679211 - DNA, 878 bp, Homo sapiens
  misc_feature (62)..(62): n is a, c, g, or t
  misc_feature (109)..(109): n is a, c, g, or t
  misc_feature (122)..(122): n is a, c, g, or t
  misc_feature (277)..(278): n is a, c, g, or t
  misc_feature (280)..(281): n is a, c, g, or t
  misc_feature (855)..(855): n is a, c, g, or t
tagttagaatggttgtttatcaaattcacgggcgctcgcctggtggtaactgtctgaaagcntatgaggaacttttgtcagtaacctcaatggaaccaccgtgctggantcacccagggatngtgctttcctgcattctgtatcctgtgcagagggttcctgatcattttctcacagtacttgtgttctttttcacctacctggaaaactagattcctcactgactttgttgtcctaatagttcccatggtagccactttgaccatttgggcttatnnannctccttgagcttctcggtgtaattatctttggggcagggctgttgtatcaaatataccgaaggaggacctgctatgccagactgcctttcctaaaaatccttgaaaaattcttgaacatcagtctagaatcagaatacaatccagccatctcctgtttccgtgtaattaccagtgcgtttactgctattgctattttggctgtggacttcccactttttcccagaagatttgccaaaactgagctctatggacaggacaatggattttgagcaggtggtacgtcgattttggggctgcaatggtttgtctagagggcaggaggaaaaaatatatgggaggggccaaattgcattactttacaaactcaatgtactctggtttggccattagtcttcctagggattcggaccattagcccattataaaatcaataggctatcaggaacatttaacagagtatgggggtgactggaactcttctttaccataaaaggtggaaaattagaacaccactggtgttgattatttttcccctagaaaatgctggattattggcctcggcattactggttnataccagctagccttgagttact

SEQ ID NO: 679212 - DNA, 560 bp, Homo sapiens
gtttctgtttccaagtggtaattttgagcactgttgtcttgtttaaaaaaagtctatagttcccccgtcaacccatatagtcgagggaatcacaaattttaagtactagctaaccacaagactaacctcgcaaagttgtatttatgagcctgtgactttcatccaccaaagaaacctgtcttagccatcctttccctttcatagctctcactaaaaatcctctggctttattaccaggtatataatattaatgtttagtgtaggtcaaggggtgatggcctttttaaaaccaagaacccttttgaggcttagcgtcttaaagagagaaagaggcagactctttcttatttatattcctttaacctaaatgcaatcttttccttccctattatgagttgcttttctgacagagaaagggaaaggaaatcatgtctcccttgagtgccgtttttaaggcctctctttgtagtgatggattataggcagcagtgagaatgtacgggaaaaatgtgtcagcatggttctctggagatgcagtaacacgggtagaaaaaaaaagg

SEQ ID NO: 679213 - DNA, 301 bp, Homo sapiens
cgttgaatgtgtggtgttatgttcaactcaatcgattccaatgctcttttgtagtttaagccgctatcaatatctgttacaacttcatccacaatcattccttttgcgttagcgtattgccttaaaaactcgacttgattttctaaatcgtctttttggccttggtttgacactctggcgtatatgactgtcttacctacttgattttcctttggaatacccatatactctctgtactgttcttctgtataatatctccttccttttaggcataacaccacacaattccgggtaccgagct

SEQ ID NO: 679214 - DNA, 893 bp, Homo sapiens
acggccggggtccaatgcttcactcagccattttacctcacctccaaaaaaaaaaaaaaaaaaaaaaaaaaaaaacttttgggccgccgggccccaaaaattttaaaaacatcggttggggacgcggggccaacataggaacggcaccaccgtgggccacaggggttcccaaggaagcactcgggtgtacacagacaaacgggtcggggattcgccaccaaaataaacacgagacgggcggaacacagacggtcttgaacaaacactccagaagtggagtccaagagtaacatacggggactctaaaacacagagatccaacagagcagctcgcatcgatcaagtaacgccccgcgacacgagataaccagcgacagactgacgagagaggcgacaaagaagcgagcaaacagaaggaagacgaaggaggacaacgcagagatcgccgggagaggaagccaagcaggaaacaacgaaaaggaacagcgagacaaagagaggcagaccaaaggaagcagacacaggcgagcgaggaatcagaggaaagcaaagcgggagacggaaggagtgaagacgagcacaggaaagaaaagagaagacggaggaggaggacgagaagagcgagaaagctgaaaagagggcacgggacaaagccgggatgacgacacgcaagagaggaagcagaagaaagacggcaaggtagaagacaagcgagatgagcaacaggagaaagaacgaagagacggaggaaaagagagagaagggaaggcgagaacgacaaacgaagggacacagaagcagagacaagaacagaaaaaaggacagaagggacaagaaagaagagagcagagaactacgaagagaaagaaaggaagaaagaagaagagagaaga

SEQ ID NO: 679215 - DNA, 223 bp, Homo sapiens
aagctggtcattttctctatcaagacgcagtagtgttcttgcccgtgattgccttatctgtagctaggggcaaagacaataagagagctttctcggcggaggttgcagtgagctgagattgagccattgcactccagcctgggcgacaagaacaagacaccgtctcaaaaaaaaaacttttttttaatgggcagcgcatggtaccccacggcgtgtatatccc

SEQ ID NO: 679216 - DNA, 947 bp, Homo sapiens
  misc_feature (53)..(53): n is a, c, g, or t
  misc_feature (55)..(55): n is a, c, g, or t
  misc_feature (64)..(64): n is a, c, g, or t
  misc_feature (779)..(779): n is a, c, g, or t
tagggacagcagtttcctcagacgtgatgtggtgccccttgcatcctgctcananaattgtcangggggacagatacactgcctctaggactgggacagatagccactgagtacctgcttcaaatcaccctgcacgttttctctttggaaagataagcactggagaaccatctcgttaccttcagcagaaatggaaacaaatcaagacattaagaatgccgcagtggacagcagttatgcaagggtcagcagaggaagttttcaagaggggggggctcactagccagaggtcagaaaagatcgaagctagccttttcatctcagctgctccttaaatcagggcaacccctccaaattaatgggaattgaaacttgcgttgcttttcaacttaattgaatacttactatatgggaaccactggacaaaatgggggaagaacatgggggagacaaaaatgtggggcctgggttgagtgaatgacgggcaggggaccggagcttggcgttctcctggggtgaggagcgggatgcccaaggagggaatggctggggggggagggcacggaggacgggtttgggctcgtgcgcctgggggcgggccggcccgcgcggggccctggggcgggcggcggtgggggagcctgggcggtggggaggtaggcgagggcaaccgggcggggcacgggggggtccggggggaggggcggggacgggggtccggggggggggggggctcgggggcgcgggggggcgggccgggcggggagggcgtgggtggnatggcgcggggcgcggcggggggcccgggggcgccccgcggcgccgcgggcggctcgagcggggagacagtggaggcgcggggcacgcggcggcgggccgggggggcgcggccgtgcgtgccggcgcccggcggcgggcgcgccggcgtgccctgcgaggggcggggg

SEQ ID NO: 679217 - DNA, 107 bp, Homo sapiens
gggacatgatgcttctggtagctttgaatgtcataccacacctccccttggccaggcagatagaactggacaccatgggctccagagtctgatacagggtgaaccag

SEQ ID NO: 679218 - DNA, 307 bp, Homo sapiens
tatgagagctgctgaaccagtaccacaggttcggagaagttctcttctggaagaatgagagccgaagcggggaagatgtttcatcgtgcaaagcgtggggcagaaggttcttccttgaatgtggtcatcttcacttcagctcaggaatcctgcagagacgcaagaaagtgtcgttttcagacctggctctactaacagtttattttgccctctttcacggactcagatgagagcactgcacgaggaacaaaaacaagttctgaagtctccatgagtcaatactcctgcaaatcctgcaacatgttgg

SEQ ID NO: 679219 - DNA, 409 bp, Homo sapiens
  misc_feature (60)..(60): n is a, c, g, or t
tcgctggggtggttctcgccggtgcggtgcaggatttcatggtgctgtttgtttctacgngccgtgacggtcgctcgctgggtgagctggtcaaagaagagatggggccaaccgccggggtgattgcgctggtggcctgctttatgatcatggtcattatccttgcagtgctggcgatgatcgtggtgaaagcctgactcataggccgtggggaacatataccgttgcgttcaccattccgctggcgctgtttatggggatctacctgcgctatctgcgtccggggcgtattggcgaagtgtcggtcatcggtctggtattcctgattttcgccattatctctggcggctgggtggcagaaagtccgacctgggcaccgtactttgactttaccggcgtgcagttgacc

SEQ ID NO: 679220 - DNA, 572 bp, Homo sapiens
tggcaggtaaccggaacctaaaatttattatgtggaatgcttaatgcaaacttaataggggctaaagtggctaagaaaaggggcctactgaaataaataacaggaaacagaatgagtcacattgtggattgggggggctcgcaaaacacggaaaatcaggggcagatataagctacatactttattccaagttaccatctgggaagcgcaaatgggtgtcaacacggcaatgggccaaatgtaacagtgtcacggattctagtggtcttcagcctgccgacagcaacaccgggttgcttggcgccctgtgtacctccctgggagccaaggtgttaaggggcgcccatgaggccagctttgttccactctctctctgtggaaacgcctcaagggacagtgttgtgggcgctctagactttgaagcaagggggcggccccaaatagacaggccataaggtataccagggggcaacagagacggagagccttgcgcaaaagaggacgccctccaagtgggcacaggtaagggcaccctatgaggaaaaagtgatgcatccctcggtagaattcct

SEQ ID NO: 679221 - DNA, 1286 bp, Homo sapiens
aataaaaaaaaaaaaattaaatgggtagtgacgttcagagatatttatcagcttctagtaaaagtttttttattttaaaccgtgctagctacttttactttatgtaaaaattaaattgggaataactcactggagaattaaatgcatgttgagtatttataaccacgtaatattttatgggggctcttatacatggtttactaatattggtaaacccacttgtgtcctcctattccatataatggctaaaatggatcttggaccatatcttggtggggtataagagatctattaaaacaaaatggctaaagggccagggcaaccatgggtctccacgcctggtaatccccaggatctttacggaggccaagggctagggtggattgaccttgtagcctcaggagtttggaaaaccagctcgtgggccaacagtgagtgaaaccttccgatcctcttaccaagaaactcacaaacaaatttatcccaggtatgtgaatgattgtgtgacgcccgtgaatagtatcccgagacttactgtggtgaaggccataaagagatggcaaagagaagtggattgggggaccaccgcgaagggctaaaaaggattgccagtgtgaagcctgaagacatagttggccaccactgctcaataccccaaaacccgtgggcggacaacgaagaaggcacacagaaaccccgtgtcaactcaaaaaaaaaaacaacaaacacacatacacaaaaccaaaagggaggcccacgagtaaaaacagagaaggagataacaaactgcccatgggataaaccgacaggaacaaatagagggaagagtaataacaaggcagcggcgaaaaaaaacattctaagagagagatgcacagaagatatcgttaataacaaaaaacagcacgttggtagccacaaaacttgggtgtaaataaccccacgcatctcttttctacacaagagctattacccactataacaattttacaaaagacgcttataataagatggatgacccataatacccccaaagatatctaatgaagaacacaaatacgagcacgaagaaaaaattagagtgagacaccctgtgagaagatgtgaagaatgattcagcagagaccacaaaaaaaacacacccatcacgcatacacagggacggagacccacaagaagagaaagcagctgatgcaacaacacagaagcaaaacaaatgagacaaaaaacagaagagatgaagtagcgccatcagtgtgaatcaatcacaaagcgacaaactagaa

SEQ ID NO: 679222 - DNA, 427 bp, Homo sapiens
  misc_feature (46)..(46): n is a, c, g, or t
  misc_feature (61)..(61): n is a, c, g, or t
  misc_feature (128)..(128): n is a, c, g, or t
  misc_feature (181)..(181): n is a, c, g, or t
  misc_feature (241)..(241): n is a, c, g, or t
  misc_feature (301)..(301): n is a, c, g, or t
  misc_feature (336)..(336): n is a, c, g, or t
  misc_feature (416)..(416): n is a, c, g, or t
tgggcatgaccctgttcaagggttcccttctgggcctgacctctgncctgggccttgggcnccagatgcaaccttgcccttcccagctagtgtctggtggggccataagatgctgaaatgtccttctncccctgggacagtctgtacatctttgtcctcgatacaagggtgctacagactnagtcaagaaagggtagaagccctggatgatgccaagtggaaacctcaggcaagggccttnaggaagggattttaaactcctcctaccctccatcagctttctctccattcttgaaatggncaatgacttcctactgtcatgcaagcttccagggngtatgtagcttctagcatctttccatctaaccagagtgctttccctaaaacctttcaataaagaaatttcagaatagttnttgttagaaga

SEQ ID NO: 679223 - DNA, 129 bp, Homo sapiens
atggcagcaggccagtcagcacaatcagcatggcatggcatagcatggcagcaggtccagtggcacagatggcatggcatatcattggcagcaggtccagtggccccatcagcatggcatggcatagca

SEQ ID NO: 679224 - DNA, 952 bp, Homo sapiens
  misc_feature (608)..(608): n is a, c, g, or t
ccacgcgtccgaaattgttaatttccacttgccttagtttcctcatcgaaaagagaatggcatttgtgacactcctaggatcttaaatgccattctcttttcgatgaggaaactaaggcaagtggaaattaagatcctaggagtgtcacaaatattaataaaatgtgtttttttctagtgagtttgttagagaggttcacggtgtatatgtaatgttaactgtagggttcccaggttatttctagcatctgactcagttcagcaggactccatgtgatatggtgacaccttatactatacccaccgtgacactgttttcgttcattccttaaggtattcatgaatttttcaagtttatagaatgctaatatactttagaatgcaaaataatggttgagaaattttaacaggaggtggcaattattattttgtaaaaaactgagataactacatatattacacatattatatatacaaatatataataattctgtttcccagtgaaaatggaaaaatgtctatattacaactggaaaaacattgtgggtcaatctaatctaagcctgagttttcctaacagaatctaatgagtcttggttctgtattgntttcacaggttttctctatacaagagcacagatactagctgggtctgcccggtccctctcccggccctcttggttattcaggctgtggcgcaacccacgagtataatgggcccccgtgggagattggggcacccagcgggaaaaggctctcgacagcgaggaatgaggaaattgcgttcgacaacacaacgttatatgtaacatccgacaatggtgctgtgacaacaaatatgttgctcacagactttgatgtggaatagatcacgacacacaaactgcgtgactatctcacgagggtggtgtataagtgcgtccatatagcgaaggatagaaaacacaactca

SEQ ID NO: 679225 - DNA, 948 bp, Homo sapiens
  misc_feature (174)..(174): n is a, c, g, or t
  misc_feature (948)..(948): n is a, c, g, or t
tggaaggtccaaatcaataaggtctttaatggcatcatttaaattatcacaagtaggtctaaaggtggtcatctgggcatcttctttctggtacgccagggtaactctaaaatctaattcatcagcctggctagaacagtcccttttccaagaagacataagataccatccaanaaattccctggatactcctggttttaaactggtggtggcgctggctagaatcaaacgccggctagaatttggaaacaagcgctcaatggtcattcccttcaagggataaatctcatctttctgggcgcttggaagatactggaacaagcaacacccttgatcatggtcctggtacatagactacaaatatgtccagaagggtagccagtcccttctcggtgttaccccaccattggtcaaccgcggagcctctttttttccttcccaagaaaggcgtgagtctctacatggagtggtgatggagagtccctcgcgaagggtccctcgggggcccttacagagaaaaaactggtggcgtcccttacaaagtaaatggtcagaccatttcctggagaatggtccgacagtctggatggctggaagaatagtcctcacattccggttcacaaggggccgttggcagatggaccaaaataagggcagatcccgaggggcccgaaggctacaggcggaggcgtgtcccgggagagcgcacctaccaggagctgtgtgggtcaaccagaaacccaattgggacacccccgggattctcgccgccttcagcggaaagctctaacaagtgcttcaagaaaaggggtgaaagcaaaaagcagattcgggcgggggctgaaagagaggtccacaaaatcggtcaacaacggacacagagggaccacggttgggacggaacaacaccgtcccatgggaggtatacgggcatctccacactggcgn

SEQ ID NO: 679226 - DNA, 698 bp, Homo sapiens
caaaatcgtttaatacaaagcctattttataataaagtatgttgaatatctcatgtaatttttgaagattacattgaaagtgaaaaacagaatggttgggtacttgaaatacagcttctactgaatgaataattctaaagttgaaaaataatagtaagaaccaaaaaaaaaaaaaaaaaaaaaaaaaaaaaaaaaaaaaaaaaaaaaaaaaaaaaaaaaaaaaaaaaaaaaaaaaaaaaaaaaaaaaaaaaaaaaaaaaaaaaaaaaaaaaaaaaaaaaaaaaaaaaaatttaaaaaaaaaaaaaaaaaaaaaaaaaaaaattgggggccccctttgccccaagtttttttaatctcgggacttttttttttggggcccaaatttgggccctttttggcaaatccccctttaggggggggtttaaaaaaaaatggggcccgtttttaaaaacgggggcttgggaaaaacctggggtcccccaaattaaacgcttttgaaaaaaatcccttttttcacggtggggaaaaagaaaaaaggcccccccagggggcctttttcaaaagtgggcccccctttagggccaaaggaaatttggggccgttattttttttaaaaaacccgcgaaaaattttgttaaaaccccctctttttttaacccaaatggccaaaatcttgaaaacctcttttaaaacaataa

SEQ ID NO: 679227 - DNA, 317 bp, Homo sapiens
  misc_feature (55)..(55): n is a, c, g, or t
  misc_feature (71)..(71): n is a, c, g, or t
  misc_feature (82)..(82): n is a, c, g, or t
  misc_feature (131)..(131): n is a, c, g, or t
  misc_feature (155)..(155): n is a, c, g, or t
  misc_feature (169)..(169): n is a, c, g, or t
  misc_feature (181)..(181): n is a, c, g, or t
  misc_feature (188)..(188): n is a, c, g, or t
  misc_feature (191)..(191): n is a, c, g, or t
  misc_feature (194)..(194): n is a, c, g, or t
  misc_feature (206)..(206): n is a, c, g, or t
  misc_feature (212)..(212): n is a, c, g, or t
  misc_feature (220)..(220): n is a, c, g, or t
  misc_feature (230)..(232): n is a, c, g, or t
  misc_feature (239)..(240): n is a, c, g, or t
  misc_feature (245)..(247): n is a, c, g, or t
  misc_feature (272)..(272): n is a, c, g, or t
  misc_feature (279)..(279): n is a, c, g, or t
  misc_feature (287)..(287): n is a, c, g, or t
  misc_feature (294)..(294): n is a, c, g, or t
  misc_feature (303)..(303): n is a, c, g, or t
  misc_feature (311)..(311): n is a, c, g, or t
aatgtatttcaaaattaagaaattacacatagttcaattaaaattaaatttgaanataattttatttgtgntgttttttagngcaccaacaattcatacacatgatcttcattctcatagccacttaaggnaagtgttacctccattttgggggngaggggtttggggntcaaattggctnttttggnggnggncacatagttttngggggngttgggtntggcccaggnnnggttggnnttttnnnttcacttaccaccattccagcagantagcagngcaatttnttttttnctgttattnagggttantcatcc

SEQ ID NO: 679228 - DNA, 1447 bp, Homo sapiens
  misc_feature (571)..(571): n is a, c, g, or t
cggcttattattatgttataagcgcgaagcggtgctctcttgtttttttttgttttttcctctcccttgttgatggttgtcctccctttctggtgtggatgcacttcttccttatacctacacttccttttttttgtgtctcctctctcgctgactcatagatgaagataatctaccctccgcggcgggcgtggagagatgattctatcaggcattcttcctcgctggggatgatttttttttagctgactcctatgaatggaccgcgcgggcgtgggtgcgcggttgtatgtacctattttttttgtatcctacactagggtggaatactcatttgttttgtacccttctttatctgtgctcgctctcttttgtttgtggggggtgcgacactcttgtttgtgggggcggccagctctttgtggtggtggtcccctactaatatgcgtgatcgcgccgcgtcgtggttgttgcttccgcgctgctctgcgtccgcgattatttttttctctgcgtcggtggtgtttgtcgtttcgtctctcgtctgcttctttggtgggtgggtcgtgcnccgcgcacacggctctctcgtttgtttgtggagtggttgttcctctctcctctgcgtagtcagtgtgtgtttccgcgcgcgtcagctattatttgtttttagggaagtggtagtagtatctgctacgatacgcgactctacgatcgatacgtacagcgactacgttggagaggccacgcggcgtcggctgtcatatattaataatagcattcttcttctggtgtctcatcttctactgctacgtcgccccccgccctctataggaagagtggtgttaggtggtcgcgcgcgcgatcatatataatattagatctgttactactatttggtgggtgtggttttgtgaggataatagctcgataccacttctgtgttcgctctttctctccacacagattaggcgcgcgggatgaatatctctctctcgttgtggagggagatagaagagatggggtaaacgctgtgtgttgtatcgcaccctctctatatacgcggcgatatatatccccagcgccgctcttctcacataatatatctccgcgacagagtgtgtttttttgtgacagcaagcaaccgcaagagagagagatatttaagagaggaggtgagataatacacgccggcgttgttcttaccacaggttgtgtgtggcagcagagagttctcttgtggatagacctctgggggcgatattatataataatatttgcgcgccctcaaaaggaggtgtcgtatctattttggggccttttttgattgggagggccgcttcatcctccacatgcccctcttgcccccggggcccccccgcggggggttccaaaaaaaaaaaatttttggggcctttgtttttataaaaaaaggtgtataaaccca

SEQ ID NO: 679229 - DNA, 454 bp, Homo sapiens
agaatgtaaaatgttgcagcctctgtggaagactgtttggcagttcctcaaaaattaaacatagagttaccatgtgacccagcaattgcatgcctagatatatagcctctgggaattgaaaacatgtccttacacaaaaactgtacaagaaatgttcacaacaacattattcctaatagccaaatgtgaaaacaatctaagtgcccaatttattattggataaacaaaatattgtatctctatccaatggaataatattcagccataaaaaggaataaagcactgctgcatgctgtggtatggatgagccttgaaaacattacactaagtgaaacaagccaaagaagccagtcacaaaagtccatgtattatatgattccatttatatgaaatgtccagaacaggcaaatccagaagcagaaagcaaatgaaccaaattcatttttaaaacggg

SEQ ID NO: 679230 - DNA, 777 bp, Homo sapiens
ccccttgagtggacaggtctgggatggaagctaagacgcttggagtatctgggtaacaaagggccatgccccataagatatgagcagaaagttctggtcctcttccctgaaaaagttttccccaccccagccagacatcttctgcttccccttgggttagtgaccaggggtagtggggagagaggctgaggctctagctcccctgagagaccttctctgtagagagttggggtgcttcatggaaaatgccaagcctgaggttaccctgtctggtctctggccaattagatgtgttactcggtagtcctccatgtccttgtttgactttttccctgtgtcctatggttatggcgtgttggcgaagatgttccctgctcattgatccctcacctcccatgcccgcaccagccttcatgttacagcggctggtacatctgcatgtgaggtgttcctgtctctctctcctctcttggttggtgttggttttgggctaccgtgtacctcaggtgggatctcacctcatttcttggttctgtcttactgtgactcagtattcgcgagcctgtaatggtgtccactgcgttgggatgacctataaaggcatgtttcgcattggctgggacgtcatacgataaccatccgaaccgaagatactccttgtactcatgtcggacttcctctaggattgggggggaacttactcaacctttcggcccttgttgtatgcacctctgatgctggagggagaagctatggatgtaaagggggaaactccgg

SEQ ID NO: 679231 - DNA, 109 bp, Homo sapiens
tactttgataagcattccccttttgttatttattagggctatctttttttttacgtgttaaatcttgtgattattaaaataaaggacccttgtaatttaaagtgaaaaa

SEQ ID NO: 679232 - DNA, 557 bp, Homo sapiens
ctgactctaaggatcccccgctggcgtcttttaggatactagagcgaggtgaatgtcccgcttaactctgacttcatcacgagagccgtgtactctccccttcactgcacttgagctctcacactgattacacccagcacatttttattctatctttctctcaaatgttccatgtctgtctggggatgagtcagtgcaactactcccgtctgatagtggttttaaaaactagggaattgtcctcaaaagaccaaaaaaaacaagagaaaaagatcacacacaaaaaaaaacatgaatccaacctaaacacaagttctgtgaacacaatatatgcactaaggtgaacatgtggtttcctctatacacctgagtggatcctttattgctgtgatcctgagaggtgagtatccttgcccttgtacagaaggctacagagcagcacagatctgtgggaagtccaaaatactcaaggggctagagctttgttatatttcaacagataccaccatattttttccccatttttgccatgattctgaagccaagacggcaagcgg

SEQ ID NO: 679233 - DNA, 204 bp, Homo sapiens
tgctgggattgtaggcgtgactatgcccagcctaactcatttatttttaatgctgaatatgttccattgtttagatgtgccacagtttacccattcaccaagaaggacatcttgcttgcttctaagttttcacagttatgaataaagctgctacagacatccatatgcagatttttgcatggatttaagcgttcaacttattgg

SEQ ID NO: 679234 - DNA, 951 bp, Homo sapiens
gcccaccccacgcccctcgtttgtttctcgtcgtggagggggagtgtaccccccccccccggcggagtgtgggtcctcgttcttttctgagctcgatgcaccacagatcgaggtcctcctctcttgttgtgttgttgggtgagcatccttcttcttcctctccctccttcggcggaggacacccatacttaggggggttcggccccccccctgtttttgttccaacaaccatggtcggtcctcctgtacgtgcacgttcacacacctccatgctttgtgttgtgcacacacgccgcggtgtcgtacgacgaccacgtgttcctcgctctcgttttattgaagatcatttgcttggtttgttttttctctggcgcgcccccctactatctaggtgctcgtcctagaaggggcggctctcctctctctgttcgccgcgctcctccctcccttcctttcttgtgggtcgctccccaccaccacgacgaacacattctagagtatgttatctctctctcacatccctcctcctgtggatggatgtcgtgcgtttcaatatatttgtctcgtgcgagtgaaccacccctcttggtttttccgcctccctccccagcccccgagcggtgccccccccccctcgcccccctcctgctgtgtgtgtttgttttcgtgcggagcacacaacacacctcctttgctgccccctgcttccctcttcttctcgctgcagacacaccctccctcttttccttcgcttcggcggtccaccccaggaggagggaggcgctcccccacccccacgccctctcttctgtccacctgtgacccgcagggctacacccttctgctgcccccccccccctcgggtttttttcccccccccccccccccccccttttccccccccccccccccccttttttcttaaaaaagtgggggggggggggcccccca

SEQ ID NO: 679235 - DNA, 160 bp, Homo sapiens
  misc_feature (135)..(135): n is a, c, g, or t
tggactagaggaccccaagcagttaatacagactcacatatcagttctgaatgtacttcatgtagatatttgaatatagtgtgaggtaagggtctaatttcatttttctagtatgtaggatatccatatttaccncaatgcctatttatatgaatgggac

SEQ ID NO: 679236 - DNA, 383 bp, Homo sapiens
cagctagagatctgctgctcacatggtgatctctcggtcacgcgtccatgtctggatcagctcctccttggacagccgtgctggcacagctccagctcagtgtcagtgtgcggtgggctggggggagacaccggttccagcttgcccgtcaggctacggtccttggtgaggtcttcagatcccgcaggcttacccgtggccagcaggtgtgacggtcgcaagcagggggtcaggcagcagctctagccgagggggaaagtctcgggtgtagcgagctttccctcgtatctccacctgtaaggtaacggtcacaggagactgtgcaactcctgatctccctgtccccagaccttcgcctggccctggaaaaagcccattgcatc

SEQ ID NO: 679237 - DNA, 626 bp, Homo sapiens
  misc_feature (72)..(72): n is a, c, g, or t
aagtcaagagtaatgtgtagttcggaaagttttcctgagcaagggtgtgtttaatcttctgcttttagccancagacttccagctcatctctctccaccctcatctcctgcacggtgttatggatggggtaataggcagctgccagcctgtctaaatccagggacaagagccatctatgacaacacgatgggccctgaggcaagggaggaatgtcatttgttaactacctttctagctatgtctgcctgattcattacactcactctttcgcaaagaaatatggacaaatagattacaataagcaaaacagcccattaaaaaatatgtatgtgcttggaaaaaaaattgatttcttttgaatgttagttcttgagggcaaaaccatctatgatgctgtacagcactcaaatgacataaagtaatttgaagctttgaaggcctcatttaaaaagcaatacaaaaatagccaggagaatgtaaaatagtgctacttctatggacagcaagttggcaatacccatcaaaacctaaaatccagtaaaatgtaagccaaaagttaaacttatagggctttatcatactggaaacttggctctgtaaaaggttagccaataaagtattgttt

SEQ ID NO: 679238 - DNA, 187 bp, Homo sapiens
ctgtgggttcttattctttcagctattcataatttctctcaggagaagcagactcggcctgtgagctgtgctatcacacagggacccccattcagaagggtccacatttggggattggaaaccctgacagtcaccagtcttgaaattcttaacgagttttatcatggcaatttgtgcgttattatac

SEQ ID NO: 679239 - DNA, 256 bp, Homo sapiens
ggtctgagcacgctggcagtgcatgtgtgttctggagagccccgtggccatcacgccacagtttcccggagggtccactccatagtcttctgggtggctgtgatggcatgtactgtggtcatgagtccttccacgataccaaagttgtcattggatgaccttggtcctagggtggtgcttaagcagcttggtggtgctagggaatgtcattgcttgatgatcttcgaggctgttgtttagtactttctcatgtgtt

SEQ ID NO: 679240 - DNA, 248 bp, Homo sapiens
ggccagccctattcctcatgagttggcggggggaaagccattgtttttaatttccccttaatatgaaaatggttggttttaaaatggtttttcctgctggaccaatggattttttaaaggaaaaaaaattttcttttgggtctaagaagtcagctgtatgagcaggggtggccatatcataacatgctgatatgataggaatcaataaatttttccctctcagggaaaaaaaaaacccccaaaaaaaa

SEQ ID NO: 679241 - DNA, 778 bp, Homo sapiens
  misc_feature (11)..(11): n is a, c, g, or t
  misc_feature (95)..(95): n is a, c, g, or t
  misc_feature (113)..(114): n is a, c, g, or t
  misc_feature (129)..(129): n is a, c, g, or t
  misc_feature (173)..(173): n is a, c, g, or t
  misc_feature (186)..(186): n is a, c, g, or t
  misc_feature (233)..(233): n is a, c, g, or t
  misc_feature (235)..(235): n is a, c, g, or t
  misc_feature (263)..(265): n is a, c, g, or t
  misc_feature (267)..(267): n is a, c, g, or t
  misc_feature (301)..(301): n is a, c, g, or t
  misc_feature (309)..(309): n is a, c, g, or t
  misc_feature (319)..(320): n is a, c, g, or t
  misc_feature (388)..(388): n is a, c, g, or t
  misc_feature (476)..(476): n is a, c, g, or t
  misc_feature (597)..(598): n is a, c, g, or t
  misc_feature (602)..(604): n is a, c, g, or t
  misc_feature (606)..(606): n is a, c, g, or t
  misc_feature (609)..(609): n is a, c, g, or t
  misc_feature (612)..(612): n is a, c, g, or t
  misc_feature (640)..(640): n is a, c, g, or t
  misc_feature (645)..(645): n is a, c, g, or t
  misc_feature (649)..(649): n is a, c, g, or t
  misc_feature (666)..(666): n is a, c, g, or t
  misc_feature (675)..(675): n is a, c, g, or t
  misc_feature (678)..(678): n is a, c, g, or t
  misc_feature (683)..(683): n is a, c, g, or t
  misc_feature (685)..(685): n is a, c, g, or t
  misc_feature (725)..(725): n is a, c, g, or t
aaaggggagantccagcacctgcaacccctcacggggtacagagggcaggggcagggccggcggggacatgaaggcaccgtcagcactgagaggnggggactcgtggggctannggagggaggccagangctgggggcccagggtctgggggcaccaaaatggggcctctgangtcagtgtctgtnaagggggtgcactagtgtctttggttggggctgaaggcaccgcaggngnggtcgggtggagcagggaccttataaannnanaggaagggaaaggggtgatggagggccgattttngggcctangaacccaggnnccgagtgtaggtgacataaagcagcagcatgaggaccacgtagaagacgacgaagccgcccaaaccanatgggggccagatgggcggtagggccttgccccccacccgcttcacggcctccagcgcggtccgcagcccccgggcagtgccctggangagatccgagggcgagcacaggtcagcctcaggcacccccatttttcgacaggcttctagaaaactctccacattcttccgagccttgagggcactgagttttggcacagcaggggagggnncatnnntnaanggntcggagcgcggccgtagctggttggcanctggnacangatgacccactggccanagcctcggncangtctnangcaggggccgctgcagccgggactcaaggacctggcgcantgacgtcattaagtccttctcatctggaacctgggggtaccgccgaggtctca

SEQ ID NO: 679242 - DNA, 621 bp, Homo sapiens
  misc_feature (207)..(207): n is a, c, g, or t
  misc_feature (212)..(212): n is a, c, g, or t
  misc_feature (214)..(214): n is a, c, g, or t
  misc_feature (225)..(226): n is a, c, g, or t
  misc_feature (230)..(230): n is a, c, g, or t
  misc_feature (235)..(235): n is a, c, g, or t
  misc_feature (245)..(245): n is a, c, g, or t
  misc_feature (247)..(247): n is a, c, g, or t
  misc_feature (250)..(250): n is a, c, g, or t
  misc_feature (252)..(253): n is a, c, g, or t
  misc_feature (256)..(256): n is a, c, g, or t
  misc_feature (258)..(258): n is a, c, g, or t
  misc_feature (262)..(262): n is a, c, g, or t
  misc_feature (276)..(276): n is a, c, g, or t
  misc_feature (288)..(289): n is a, c, g, or t
  misc_feature (291)..(291): n is a, c, g, or t
  misc_feature (303)..(303): n is a, c, g, or t
  misc_feature (307)..(307): n is a, c, g, or t
  misc_feature (316)..(317): n is a, c, g, or t
  misc_feature (322)..(323): n is a, c, g, or t
  misc_feature (329)..(329): n is a, c, g, or t
  misc_feature (339)..(339): n is a, c, g, or t
  misc_feature (341)..(341): n is a, c, g, or t
  misc_feature (369)..(369): n is a, c, g, or t
  misc_feature (438)..(439): n is a, c, g, or t
  misc_feature (451)..(451): n is a, c, g, or t
  misc_feature (463)..(463): n is a, c, g, or t
  misc_feature (472)..(472): n is a, c, g, or t
  misc_feature (511)..(511): n is a, c, g, or t
tcttacttttgcccccagagccttttggggtttttaaaaattgttgtttttgtaaaccagataaaagccggcccccaatcggtctacaagcccttcaggccccttccgtccaggccttcacttcccgggtggtggccgggcacctcggttcctaaagtgggtcgcgggggcgggcttgtcccaggtttgttgagacagtcttttttnatttngnattgttatttnnattnttttnaatttaaacntnatnanntgnanagcntctttcccaccggnaagatcggcctnntnccttccctctgngggntgggggtgnnacagnnccagtnggggccaggncnacactcagcgcagtgtgggctggacccncctctgtgctccaggggctggccggtcttcgggggcgccggcttccaccactcgccgccccacccctgnnctccgtgacctntgagaacccagntggcccctngttagccccagggtctgccgtctagagggagcccaccgnctccggacactgtcttcccgctagaccccgtcctcctctgcgggctctccgaccccccttccccctcacctccaggcagggacagaataaatgtttgtatggattttaaa

SEQ ID NO: 679243 - DNA, 282 bp, Homo sapiens
catcgagctcggtaccggtatttatcgatgccaccacctaccagcttgtaagagtgtgtacgtggatggattttgaaactctttctagatttctcttctcttgtagcaaatctggcgttcatctatgatatgtcctgcaattagagtaattagacatgttttcacttgcagtcgtgaaatacaggcgagatgtatactgacatcatatttcattaatatatctcagcattctgagaaagattgtgcacggttgacatgaggtcttctccttgaagcttctat

SEQ ID NO: 679244 - DNA, 745 bp, Homo sapiens
agtctcgagtattatttttttttttatttggaaaactgaaatgttccccatcataggggattcttaagcacgtcccccacgtatgcggggtgcaagcggaatgtctatgagggcataatggttacacgttgggcaggtgatagcacacaggttgggtgtcttcaaaaaggccaaccagataggcctcactggcctccgtgcaaagcaccgatagctgcgctctgtggaagcgcagatctgtttataaagctcctgagcaattttctcgcaccagacgcgtgaaagggaagttggcaggaatcagaagttcagtggacttctgataacgtctaattccacggagcgccacagtacctaggcctgtaacgatgagtgtttcttcaccccttccagtaaagggcgcactcttgacagagcgggctttggtacgccagtaggctcccggggtggctataaccaccggatcgatatgagcgggcagtcgtgatataggtacagagccagggtacatgagacctcctaacttaccccccttcatcctatcggctgggaagcctcggagagccgaaagggcggagcaggacgatggaggacagagggagacatagtctcgagataacaagctaacaacacacccacatacaccaaagaatacaagacctcacagaagggtggggacaccccatcgaacggggcaaagtccctaatagggccctgctgggttcaccatcactgaaggacacga

SEQ ID NO: 679245 - DNA, 136 bp, Homo sapiens
gagcagacaatttatttgatgcagcaagcagagagcttgtgcaggcaactccctgcactgatggtttttaaaaccatcagatctcgtaagactcattcactatcataagaacagctccggaagtgaggagagtggg

SEQ ID NO: 679246 - DNA, 369 bp, Homo sapiens
  misc_feature (48)..(48): n is a, c, g, or t
ttccaggaactagtgcatagcataaacagtttattaagaaagtaagtngtgaaaggacagctactccatagaagtagatggagtaacctctaacctgaggtcagtcaagtgtccttgccttttattaagaggggcctctaactcactctgtcttaggagaaactccaactcccctaagttgggcctctaacccaatcccatttgttactcgggtaccccatcacttacccaaagtcgtccaatcagtgctgcagtctatttctttggggttggggggatttcttcagtatcatcctttctgtggtttgccagaaatatgttacaggaccccaacacttacgcaaaggtagccgttgggttcacgtttct

SEQ ID NO: 679247 - DNA, 91 bp, Homo sapiens
  misc_feature (80)..(80): n is a, c, g, or t
aaatgttcagttccttgcaaaagtcaacatttatttatttgaacttgcttccagctaaggttactggttgcatttcaaancaccggtagca

SEQ ID NO: 679248 - DNA, 468 bp, Homo sapiens
atacattcatctagattaactagtaatataagcatagaggtgtagtattataccctgatggtaatatgtattcatgtgggatcggtggtgatatccccttatatcataaaaataagcgtctatatgaatctcccctcattaatactttattagtactatgctagtcagatctatcaatatagttgatcctttcaaaacaacagcacctggattcatacattcattgaaggtgttttttgtagtctctataaccttcagaatctgcactgatattagttatatactatgccttctgctagcttacgaatgtagatattgctcttgcttatctcgatacttaaactagtgaagtcagggtgtacaaatatagaatctttacctgcttactcttgtgggcctatcagtgctataaataaccactctacacaatgcttagaatgcgtgcgtcgatcctaaacttacctggtg

SEQ ID NO: 679249 - DNA, 711 bp, Homo sapiens
ggagatttcttggcttatttccttctgggcaggggagatttgaggaggcttatcattaataggaaggggatctatagggagcctaagatacgggtgtaagctgagaggtcctcctgtgggatgtaaattgcaagctttgcatagttgtgtattttccttcaatgaaaagaaagcctggacataaggtatttcactccatttgccttccctcttacagaaaaggtcaaactgcaggatagtattgtaatttgtacttccctcaggtggccatttttccccatcagagagagaatattggggcccggctgtagggcagaaaaaaatgagccacctctttttcagggtttgtgggtcaaattggtcccaatggcttaggacgcatttcaagggtgagcctgttgatgcctgagtgtttcccatctgaaagccaaaactgcccatggttttgggtttgttttgtttctccccctgcccgagaacctgcaacagtccctggaccctcctgatgggcttagttgaactcacgacgcaacagcagaaacactagttttctcccagacacaaggtggactgacgaaggttgatttagtggcccttaccaacaattcttgaaaaccttgacccttgttgtccttctagacacgtaggcttggcttgggggggggcccgtacccaatttgccctatagggaggcgattacttcctggccgc

SEQ ID NO: 679250 - DNA, 1113 bp, Homo sapiens
  misc_feature (344)..(344): n is a, c, g, or t
  misc_feature (357)..(357): n is a, c, g, or t
  misc_feature (727)..(727): n is a, c, g, or t
  misc_feature (744)..(744): n is a, c, g, or t
  misc_feature (758)..(759): n is a, c, g, or t
  misc_feature (769)..(769): n is a, c, g, or t
  misc_feature (791)..(791): n is a, c, g, or t
ggagcaggatcggggaggacacacaggtgggcgtctcaagaactgtggtgtacacagctgagcccctgcagctctgctttgccgggcctcaccctcggtgctgggtgcaagacgtgacaagatggcatgggaagcttcccggggaacgctggaactgggtgtttgaaggaggacctcatggcggcagctccagcccaagtactgcaactgtggggccgtgccaggagcaggtgctgcggagcctgtgtgggtccaggacaagaggagcaccagaagctcctggaggcggtgcagacgacactgtcggccggcccagcccaggccccagcagttgactcctctgngatcagaggatgnggctgaggatgtgcatttccgtcaagttcccaggagaacctggtgctgctgcttcggggaccccactttgaggaccactgatctaacactgcccctcgtggcaaacgcggaatgactcaagattcagctggatggatcattcagggagcaaatccacccttgccgcctggcacaccctggccattcggtaacgatgccatcagggttactggcttcttcattctccactgtgcattccagggtgggcatttccacagttgtgagcccatcatcaactcagcgagttcccattttccagttagaaaataagctttctgatcgttagccattcacttcaattggctctagaaaagatttctgggatgtatantttatttttaacataangaaaagctaagtgnnaactagatangctacaattgtcccagacgttntagacactcacagcaccgttttcctcttctagcaaaacaaaacaaaaaattctgcaatcatacaggcagtaggaaaaaaaaattagctggacaccatggctcacacctgtaaccccagcactttgggaggccgaggtgggaggatcacttgaggccaggagttagggactggcctgggcaacatagtgagatcccatctttataaaaataaaaaaaatctgggcgtggtggagcacacttgtggtcctagctactcaggaggctgagagtggggaatcgtttgattcccaggaggttaacgctggagtgaaccatgttgcag

SEQ ID NO: 679251 - DNA, 260 bp, Homo sapiens
ggatgctgaggaggacaggatgctggccatgaattttactgaatttttgacggggcacgctacgttacattatggcagaaaaaaagtgcaactgacatactacaacagcagattttttaagtttaaaaaaagtttggatctttaggattactttatttttttggctctttctgtgcttcactaccgctgaattataatcagccacacaactaatgagcgttttattttttttcctcctggctcaccccaaatcagcctgt

SEQ ID NO: 679252 - DNA, 142 bp, Homo sapiens
tgactccccacctggttcatatctagcccatgtagccttccaaaatgatgagtgaatgagcaaggcagtgagctgggacaagatggagagccactttatactgcccagctctgagttgagctataacatattcatacaataa

SEQ ID NO: 679253 - DNA, 101 bp, Homo sapiens
ctattatactaccgtggcggattacaaggtagctaaaaataatttaatattcctacccgctgaacagtggacccacataccccacccagtggatctaggct

SEQ ID NO: 679254 - DNA, 126 bp, Homo sapiens
aagtgaaacgcagtctgcatgagaggtggatgggggcctgtcattatgtttcccccccagcccccaacgtaaaggaaaactaagactcccaacataaacagtgtctttgaggtgaaaagaccctgt

SEQ ID NO: 679255 - DNA, 449 bp, Homo sapiens
  misc_feature (187)..(187): n is a, c, g, or t
gtgtgcagaggggcaggaagactctctaccgggagaagtgtgtgccgtcctgagccaggtgctggggcgaatcacctctctatcaccttgagccacccatgtccttctgcaggagccgggcttgcagcggctggaggagctccgggaccagcagcgctcccagtgcctggtcgacctgcaccgcagnttccacacctgcatctcccgccagcgcgtcctgccccggatgcaggctcacatgcgtgggttccaggccagcctatcttcacacattccttccacagctgttggcttgaccgtctgcctcatctacccttgggccagattcttggcgacagaagctggggatgccagagacggggcctcccaggctggttgggaagtcagattcagatggtagagcagccagtgatcttcccagagagtaaactcgaggggctgagaaatga

SEQ ID NO: 679256 - DNA, 320 bp, Homo sapiens
atacaaccgagctcgtacccccttctacgtctcatcactgcagggaagtaggatgaagcaagggactgatggaatgtgctttttgtctttttctttgtgacttctcagtgaaccctttcttgatggaatagtgctaaagctgagaatgaaagggtgctaggcagctgatggaggagcaagggcattttaggcagtggggtagagtgtggtgcgagacgaggttagaaatggaggtggaggttggagcctgcagcaccctataagccatgataagaaactttatctttatcctagaaatatcagtgatgagacgtagaagg

SEQ ID NO: 679257 - DNA, 437 bp, Homo sapiens
gaatacgtatgtgtacatattaggggagacacatattcactctatatatatattatatattatatttttaatttgggaaatactattcaggtttgtaggtgtgcttgtgtgagttgtgtgagtattaaaggattagtaataattgcgcacggaaactatcattagggagggtttaggtggttgctggttggactgggagggatgatttaaatttagtgcgtatgaaaccaattttagtgactggacaggttatcatttgtgagacagaaggtagctattaagctaccctgtgaggcatatcaaaaaagtgtcagaggaagattagtaaatatttatcaattaaaatcattttggttttctaatatcttaacatatcctcccctttaggaggaagaacgtgccgtgaggagctatagcgaatactggaagagatccgc

SEQ ID NO: 679258 - DNA, 1377 bp, Homo sapiens
agatcgcgagcggctgccatttttttttttgtccaattgttttaatttttgggatggcccatttttttaattttgcaattaaaagttttaaaagtttaaaaaaaaaaaaaaaaaaaaaaaaaaaaaaaaaaaaaaaaaaaacagacaacacaaaaaaaaaaaacaaaaagagaacacacacaaaaaaaaaaaaaaacagaaaaaaaaaaaaacacaacaaggacccacttagcgacccaaaaactaaaaaaaaagaaaaaaaacacaagaagaaaacaaaaccccgcgaaggacggaaaaaacacgacacaccacggaggagcacatcagggaagaacaacaaccacaataagcggggcgcgagcgagaacacccagcggccccaaacagataactacaacagagagatacatttaaaaacagccgatatagggagagaccatatataataacattatagaaagagggatataaaataggggttacaacagcaagatgggaataaatatgccagtgaaggaagctcatgaaatacatatttgagaccacaatcatggagatgctaacttatagtaacagaaacatatttttttgactacacaaacgagtgagatacccattatataataacaaaataaacatcttgatctttataatatatcaattatgaataccatcttacagtaactcaactaccatatcatcacatactatatacaactatgacaaaaacatttgatcgaaaaaaaaacatacgtcctccgtataccagaagaagaagataagagagaatagtagaacggaaataagaagaagagatgaagtaaagaaaaaaaaagcaaaggacggaggagagagagggggagaggaaacacagaagagagaagggaagaaaaaaaaaacaaaaggcaaaggaactagggcaggagagaaggagagggaaagagaaaggaaaagaacaaacacaaggaagtggaacagaaaggagaggaagagtacgacaaacaagtagaaagaaagacagaaacaagacaagtgaaggggaagagagagcgataggaccaaggggcgagagaaagagcggagaattagggaggaggaagggagagaagcaagagagataggtatagacgcgtaaagagaaagaggaaacaacacaaatacaaaaacataacatacagaatacaaaataaataaataaacataataagcaatcacaaaagacaaaaaaaacaaaaaaaaaaatataaaacaataaacacagaaaaaattaaaaatacaaaaagcagacaaaccaaaactaagaacagagaaagaaaaagtaacaaaactacacacacaaacaaaatcatcgtgtatttcattatctctaaaaag

SEQ ID NO: 679259 - DNA, 257 bp, Homo sapiens
actagtagtgtgtctagtgtgtatttgatattgcctgccattatttgatagattcattcattcattcaacagaggcttattgcaagtcttattgaggttgggcccagtgactcatggctataatcccagcacttagggaggcccgggcagtaggatcacttgaggcggggagctcaagactggcctgggtaacatagcaaaaccccatctctattgttttttaacaaaataatttttaaaaagtctcttgcatagag

SEQ ID NO: 679260 - DNA, 202 bp, Homo sapiens
cggaaccccgggaaagcacacccctttctggcagatttgggtctactgtcttaatcaggcaggctaagtcgcccagggagacttctccattctttctgtctgccttatctcagcattaccatcttcctaggctacaggatagcgaactcgatcatctctgacttcttttcttcaaagccaggaagttatccagtcctcctga

SEQ ID NO: 679261 - DNA, 251 bp, Homo sapiens
cgtgcgaatgacagctggctgttgtggtgttttccagcgccggtgtactcggtctcttggacgacaacgatctggtcgcgatccatctgacgagccatggcaaccgcggccgtcaagctggtgttgccggccggtccgcgctctaggccttcgatcttggtgagaagctcggtcatgtagaagacctcgccctgggacactagctggtagccgtccatgtaacgtagcggacgtgcagcattgcgcgggac

SEQ ID NO: 679262 - DNA, 494 bp, Homo sapiens
  misc_feature (73)..(73): n is a, c, g, or t
  misc_feature (202)..(202): n is a, c, g, or t
  misc_feature (332)..(332): n is a, c, g, or t
  misc_feature (440)..(440): n is a, c, g, or t
catgatcatatcccttgccctgcctgggactcaatattttactcctgggccctgttaacctgcaggacagganaaggatggaagcacaggctaccatggtttggttctactacattagctatagaggtcttccaacctggatttctctttgatttctttccaataattatttgcctttacatgtacatttacctactggaanaaatgggttggttaataagcatcaatatttgaaacacttgttagctatatcctcattgtaaatcaataaattatctttgatttctttccaataattatttgcctttacatgtccatttacctactggaanacatgggttggttaataagcatcaatatttgaaacacttgttagctatatcctcattgtaaatcaataaattatctttccagtgttccccctgcctctgcagcttcangtgaatgtgcatcctaaagctgttatcaccaccaatgtgtctatagttcagttt

SEQ ID NO: 679263 - DNA, 232 bp, Homo sapiens
  misc_feature (165)..(165): n is a, c, g, or t
  misc_feature (196)..(196): n is a, c, g, or t
  misc_feature (204)..(204): n is a, c, g, or t
  misc_feature (208)..(208): n is a, c, g, or t
attatctctcaggaactctgcagcgcttcataacatcagagcgtctagtgagggctgtactcaggttctctggccaccggttcacaccactgtcctgtgtaatcatttgatgtgcccactatgggtaattggtgctacggttccctgcaccccctcccgcttctntctgcagacactgagccacctgtgtgcacgncccctcgntttnggcggtgtgggttctcagcctccc

SEQ ID NO: 679264 - DNA, 885 bp, Homo sapiens
  misc_feature (767)..(767): n is a, c, g, or t
ttcttgctgaagggcgggcaccttgctcatagcagctgataccgtattccaatcccttcacgcaaggactaaacgtcgaccgacattaccttcgacttgaagccgagtttctcgcgctaagccacggtatcgaggtccgaccttcaaagcttgatgcgcttatgtggtaccaaatgatgtcggcgccaataatcgtgcatggcctgctgacccacgcaggactgaaagccgcctgagtatcaagattcagggcgccctacgacggccacgcccactcctgcaaaaactccatccgggccaagccggctaacccagggatctccggttatccctagcggggaataatgcaggctcagagcctcggctactacggccatgatgccgagcagtgctccagcgtcgcgccagaccaggctggatgcgtcattgtatttggcttgggtctttccaggttctgcgactagcaatagcttcgtagcactcgatgatggcaacgaagtttcgatttcagcagacagctcttcgaataatccccctgaaccaggaaaatcgataagagcatgacttcgagagtcgtatcggcaccattcaacttcgtctggaagctttagcaggacgtgaatggggtgaattgcgcctgcagacggtgcaggtctctgctcaagttcgaaacccaaagctgaaggcgctgtagcgagcgtgcgagcggaacgccgaagtagctcggaaagatcattccctgtcagcggggcaaaggtttttcggcntctacggcgctctatcacctgaaaaacctcctgcgcaactgagatcgccgatggctcaaaagacggctctgggttgtcattaaaaacccgcacacgattccatttgggggaccgctac

SEQ ID NO: 679265 - DNA, 86 bp, Homo sapiens
cggcacgaggctcatttttgttgtagccaaccagtaagatttgctaatgttctacattaagtgccttctccaaagacatccctctt

SEQ ID NO: 679266 - DNA, 447 bp, Homo sapiens
ttcttgctgaagggcgggcaccttgctcatagcagctgataccgtattccaatcccttcacgcaaggactaaacgtcgaccgacattaccttcgacttgaagccgagtttctcgcgctaagccacggtatcgaggtccgaccttcaaagcttgaaccgctgatggtgtacgtcacgccagacacatcggctgccaagctgagaggcgatgttgaaaatcttctgcgcagggcgcccatggtgcttcgtttccggttggacacagggatcgcttttgagcaagcccgctttgctcgatccgttgcaaccgaagttgagcatgcgggtgtcaaggtcgagttcgattctcccctgtaacgtctccctttaaatttccgtgaacactaggtagggcctgctgatacccttgtcaggaagcccccggccggattctctccagatcgactcg

SEQ ID NO: 679267 - DNA, 732 bp, Homo sapiens
  misc_feature (4)..(4): n is a, c, g, or t
  misc_feature (69)..(69): n is a, c, g, or t
  misc_feature (91)..(91): n is a, c, g, or t
  misc_feature (94)..(96): n is a, c, g, or t
  misc_feature (105)..(105): n is a, c, g, or t
  misc_feature (110)..(110): n is a, c, g, or t
  misc_feature (131)..(131): n is a, c, g, or t
  misc_feature (133)..(133): n is a, c, g, or t
  misc_feature (135)..(135): n is a, c, g, or t
  misc_feature (141)..(141): n is a, c, g, or t
  misc_feature (151)..(151): n is a, c, g, or t
  misc_feature (158)..(158): n is a, c, g, or t
  misc_feature (171)..(171): n is a, c, g, or t
  misc_feature (195)..(195): n is a, c, g, or t
  misc_feature (202)..(203): n is a, c, g, or t
  misc_feature (212)..(212): n is a, c, g, or t
  misc_feature (217)..(217): n is a, c, g, or t
  misc_feature (258)..(258): n is a, c, g, or t
  misc_feature (269)..(269): n is a, c, g, or t
  misc_feature (275)..(275): n is a, c, g, or t
  misc_feature (280)..(280): n is a, c, g, or t
  misc_feature (293)..(293): n is a, c, g, or t
  misc_feature (345)..(345): n is a, c, g, or t
  misc_feature (357)..(358): n is a, c, g, or t
  misc_feature (365)..(365): n is a, c, g, or t
  misc_feature (486)..(486): n is a, c, g, or t
  misc_feature (635)..(635): n is a, c, g, or t
gggntgatcctcccatgttgggagataaaatgtggcaagtgacaaagctctgagcccgcccctcttggngccaaagtggtagggatggggnttnnngatggaccnatggntggggtagtaccatgattggngntnggggangcaaccagangcctgtngctttggggaggngcattcccccaaccatgtcccganacctctnnagtacaggnaaggnccttccagtcctacttgtcctgcatcttctcaaggataggnacaatcatgtnaaattngggtngctttgaagggtnttcattcatgcagatcttcatgagcttacacacatgaggggaaatacctggngggatggtaggnngaagttnccaatgccaccttcattccaatctccatattggagaggtcagcaaagggtacctcccgtgtcaccagttcccacagaagcactgcaaaactccacatgtctgctgagcgtctgtttgtgtnttcaggcttcttctgcagagcttcgggggctacccaggcaggtgcatacatgcgaccaggacattggaaagagaacttgacatcagccatgctaattcgggcagtcatgtcctcatcaatcattacactacggctattgagtgcatgtngtgggatgaggggctctagtgtgtgtaggaaggccatgccccttgccatgtccaaagcaaacttcacagcctggctctggtccacgacgaaattggt

SEQ ID NO: 679268 - DNA, 523 bp, Homo sapiens
agggagggacgagacgcgtgcgagcggtattagagaacacatcatgactagcgatggatacgctcgatagtcgcaagccaagcgcctgcgcactcaccgtttcggcaaacaacatccccctgagttcatagccgtatcctgggagctgtagcggtgatgcacggtcatcgggattggaatacggtatcagctgctatgagcaaggtgcccgcccttcagcaagaacgtgaaccgctgatggtgtacgtcacgccagacacatcggctgccaagctgagaggcgatgttgaaaatcttctgcgcagggcgcccatggtgcttcgtttccggttggacacagggatcgcttttgagcaagcccgctttgctcgatccgttgcaaccgaagttgagcatgcgggtgtcaaggtcgagttcgattctcccctgtaacgtctccctttaaatttccgtgaacactaggtagggcctgctgatacccttgtcaggaagcccccggccggattctctccagatcgactcg

SEQ ID NO: 679269 - DNA, 222 bp, Homo sapiens
  misc_feature (28)..(28): n is a, c, g, or t
cccccttcccctttcccggttttttttngggggggcccccttgggggtttggcccccttttgggggggaaaaaattttttttttttcccccaaaaactttttcccccctttaaaaaaattttttttttttaaggggggggggggggtttttccctttttttttaaacccgggggggggggggaatttccggggtttttaaaaaaatcccccctttttttcca

SEQ ID NO: 679270 - DNA, 438 bp, Homo sapiens
ggcggcggccacgcgttcgatgatctcgttggcaatttcgccgccaccttcgctgttggtcatcacacgacgccatagcccttggcgacatgggcaacggcgcggctgcggaagccccagttggcgccgctgtgacggaaataccagccttgccccttctgctcgatggcaaagccgacggcgtaaggcccgacgcccaccggcgccaccatgttctgcatcgttgccctatcgagcacgacttgcgactggccggcgagcgttttctgcacatcgatcatgaacagcgcataatccgcggccgtggtccacaggccggccgccgcctgttcgggatagacatgccagcgggccgtccccagcgccttgccatcttcatggccgcgtgcggtccttgtctgccagtccggcggcagcggctgttcgaaactggaatgg

SEQ ID NO: 679271 - DNA, 117 bp, Homo sapiens
ccgatcacatcgaaaggtggctggcagctgtcggaggcttaaggctcttgaggcgctgcagaccaccaggctgactgagcagaacgccagctgtttggatgattttgcatagcaatc

SEQ ID NO: 679272 - DNA, 184 bp, Homo sapiens
tgcgccgcactcgtgctcggccgcacagcttctccaggccctgccgatgcactcagtcccccaggactcaggatcatagggctagcggctcccagggcacgggccccaaggcagtagcagttcctgacctgacccacccctacttgtcactgaggcccagtggtaccattgctatggggtgaca

SEQ ID NO: 679273 - DNA, 743 bp, Homo sapiens
cctctgggtatgctcattgggcgtgacgagacttggtacgactggcgcgcctaggttcgtttacctccggctactgtctgcaaaccctgtctgggtggaatccatgaattccatgagcggatctgatcaaacagagccacgagagaaatatgtactgcgtaccatagtaacgattgtacaggaacagcacgctggcaaatcttaatgaggcgtgcgccgtcgatatgactgtccatttcacatgcgttgacttcttatagaaaatgtctgacctgactaactgtgtaagatgcaaagaacgctgatcaaggttaaaagaatctgctgtcattttcacgttgaccaactactggcctcaaatgccgtgcctgactttcacatatgtaccactatatgggacgcagtgaaggatagaactggcatccacgcacgaatgatgatatgttggaggcagaactgtgttgggaccacagttaaagctaaagtaaagccatactgggccatgggtcctagaggctgtatagcactaaatcagattgccatgtctttagctcaaacgatcttaattatgccaatacacaatatgtgaatatgctaatgacaagttaaatactctcatgccaacaaggccaaagtaaactcccttttcgcccgtttggtgcggccaagtctacactttacaattttattcatgcgccctgattcaaagtcactgggcaattccccctaaagagagtctgctt

SEQ ID NO: 679274 - DNA, 349 bp, Homo sapiens
  misc_feature (166)..(166): n is a, c, g, or t
  misc_feature (308)..(308): n is a, c, g, or t
caatacatgtatacagtgtacactgatcaaataagagtaattagcatatttatcacctcatttcttttgtggtgagaacatttaaaatcctttctttttgctattttgaaatatacagtacattgctattaagtatagtcatctggctgtgcaataaaacaccagnacttacccctcctgtctgtgactttgtaccctgttcaccacccctccaatcctctagtaactaccattctactctctacttctatgagcctgactttttaaaattccacatgtaagtgagattacatggtattattctctcngtggctggcttatttcactttaacataatgtcctctaaatt

SEQ ID NO: 679275 - DNA, 314 bp, Homo sapiens
tcgtatctagaggatctcggcgagtgcaatggctgctattagaagtcaacaaacaagaggctgggtgtggcggctcatagctgtaatcctagcacttcgggagtgccgaggcacgggatcacctgaggccaggagattgagaccagcccggccaacatgacaaaaccccatctccactaaaaatacaaaaaaattagctgggcctggtggcaggcgcccgtaatcccagccacacgggaggctgaggcaggagaatcgcccgaacccgggaggctgagtctgcagtgagccgagattgagccattgcactccgg

SEQ ID NO: 679276 - DNA, 857 bp, Homo sapiens
gccgccgaagaagcatcgttaaagtctctcttcaccctgccgtcatgtctaagtcagagtcgtcctagagagcccgaacagctgaggaagctcttcatggagggtggagctttgaaacaggactgatgagagcctgaggagccattggagcaatggggaacgctcacggactgtgtggtaatgagagatccagagacaccaagcgctccagggcttgggttgtcacatatgccactgtggaggaggtgggtgctgctatgaatgctaaggccactcaaggtggatgggagagtgtgtggaaccagagagagctgtctccagagaagattctcaaaagaccaggtgcccacttaactgtgaaaaagatatttggtggtggcattaaaatgaaagacagctgaagaacatcacctaagagattattgttgaacagtatggaaaagttgaagtgattgaaatcatgactgaccgaggcagtggcattgaaaaggggggtttgctttgtgaacctttgacgaccatgactccgtggataagatttgtcattctgaaataccttactgtgaattgggcccaatgtgaagttagaaagcctgtcaagcagagatggtaggttcatccagcaaagagtcgaggttctcaaactgtggtgggcgtgaggtgcttcggggaatgacaacttcgcccggaggaactcaggtcgggctgggcccccgtgggggttgggcgggtgcactggtggcacggcacttcgggggggccccgttggagtcacactcaaggcccaggagatgggaacccctggggaattaccacaggggtgtcaagtgaataaaagaacaagccggaactcttta

SEQ ID NO: 679277 - DNA, 484 bp, Homo sapiens
  misc_feature (22)..(22): n is a, c, g, or t
actgagcaccgattacgccganagctccgtactttctatggggtttatataagagcaattcgagtctccccactcctcacttagtttaagctcattttgccctgagtttatctggtagcactttattttagcggacaaggagggaagtggggaaaggaaaggaattataaaaatacaaggtagacgtgcacaagaaccttcgttctattattatttagtaaagtgagaactggaaacagcttaacgtccagggtaagttagtttcactcactcgacggaatgtatgcagccgttaatgtatttctgcattttcccatatttccagtgaacatacagtactttcgcaattcggagtacaaacgaaaaagggcgagagaaggtcgcattttgcctgccggagctaggggcgcgcttgccggttccaacgagttttcggtgtcggaaaacttgtctttgctcacattctcggattcccgcggccgca

SEQ ID NO: 679278 - DNA, 469 bp, Homo sapiens
  misc_feature (33)..(33): n is a, c, g, or t
  misc_feature (36)..(36): n is a, c, g, or t
  misc_feature (171)..(171): n is a, c, g, or t
  misc_feature (180)..(180): n is a, c, g, or t
  misc_feature (231)..(231): n is a, c, g, or t
  misc_feature (241)..(241): n is a, c, g, or t
  misc_feature (260)..(262): n is a, c, g, or t
  misc_feature (267)..(267): n is a, c, g, or t
  misc_feature (271)..(271): n is a, c, g, or t
  misc_feature (275)..(275): n is a, c, g, or t
tgcacaactccgctgagttggtggaggtggttnccngtttgtcagggttggggctaacatgttttttattaacacaagctaagcggcattgtttctggaggatgatagcaccccaggtaagcagagtaactgcctctccagagcgtctcagaagcagaggctctgcagtcnatccggtcntgtaaggatgactgacatccattccctttcttcctgcagactgcatcaacnagtatggtcnccgtacaccaaaaactcannntcgcnaccngcgngcaaagtaagtcggcctcctttgcgccttcctgggagcactgtgggtttgggcggctttaggcttggctgtggtttgtggagggccctgaatagttctgttttttaaggagctgtggtcccttgccgaggcctgctcccttttcgccaaactttcttttttaaacaagtaaattttgacgtttttagcaatagg

SEQ ID NO: 679279 - DNA, 356 bp, Homo sapiens
  misc_feature (56)..(56): n is a, c, g, or t
tactgttgtgtacgtgcatggttgcatgtgtctgtggcggctcggtgagcgctggnagaaagcggtgctcctggtgcgttgggctgtacgcgctggcagtgcgggatccgtccggctacaggctcgaatcgttcctcgggctgcggctggttcaaggtctcggcgcgggcggtgtgtcggtgatggcgcgggtgttggttcgcgacagtttcagcggtgccctgtttggctaaaggcttgaccgtggctggggattacattcgtgatcgccctgggcatcgggcagtttgtgggctcgcttgttgcaagtggcattttggctgggaggcgatcttttaatgggctggcgatagcgg

SEQ ID NO: 679280 - DNA, 317 bp, Homo sapiens
  misc_feature (41)..(41): n is a, c, g, or t
  misc_feature (103)..(103): n is a, c, g, or t
ttttagcaataaacgaaaagtttaactaaggctatactaanccccagggtggtcaaatctcgtgcagccccgcggtcacacgattaacccagagtcaatttangaagcggcgtaaagagtgttttagatctaccgcctcccttaaagctaaaaatcacctgagttgtaaaaaacggcagttcgacctacaatagtcttcgtaattggctttaagatatatgtgagcaccagatctaattccccacatggttttagatagccccctatgcttaggtctttaccaggccagttctatcaataaatgtgctagagctctc

SEQ ID NO: 679281 - DNA, 341 bp, Homo sapiens
cctgtaggctggagcttgctgtgcgcgcagtcgcgccactgcactccatactgggtgacagagtgagactccgtctcagacaagaacacgccacctgtgctttcacgttgggtgtgtggctcaggcctcaggcctgttcatcccagcacttctggaaggtcacggtggggggatcacgaggccaggagttcgagaccagactacacaaaatagcaagacctcatctctaaaaaaataactaaataaacaaccaaaaacttgtgtgcattttgcattctatataataatatcaccaaatgatctcggacttcacaccatcttcttggaaccctctgcaccat

SEQ ID NO: 679282 - DNA, 349 bp, Homo sapiens
  misc_feature (1)..(1): n is a, c, g, or t
nggctttccggcggtgacgacctacgaacacagaaccaggcttttggaaagggaggtccttaatccttttccagaggaggagaggaggaaccccaggaggaaacgcctggtgcaaagccccaatctacactaaggtatgaaaagtgcccagtgggttataaattcaccagggtttttacccgtgcacaagcggaatttgtgtgtgtggtgtgctacagtggcctgtgaaactctagggggggaaaagcagggtttacagagggatgcctttgaggaggagccccttaaaagctttctgggacaagaggagtgggacaccatctattaaacacattgggataaaaaattc

SEQ ID NO: 679283 - DNA, 514 bp, Homo sapiens
gggaattacttcgtatccaggtctcactgtggagtaggaagggcatgtgttccttcccaccatggagatccgtagaaatcacaagctccagccgccatcaatagatgacagggttaccagtcacataagcagattcatcagaagccaaatacgcgctgcggatgggtatttcttctgcagtagcgaatcttcccgtgttgagtctcttcacataatcattccgtgcctctacaggatatcctctggcttgtattcttgcttgtagagatggcgtatcaacgtgttcctgggcacacacagttgcacctgatgccctgctggatgagatctgcagcgacagattagagtgaggccaatcacagctgccttggttgtgctgtacacacgtctgttcagactcctttgacgctggaggcctcagaagacatgtcgataatattgccagatttcggagcaggcattttaggaaggaatgccttgatcatcaggtacatgctgcggcagtggagttcat

SEQ ID NO: 679284 - DNA, 172 bp, Homo sapiens
taccgtgagcgaagcattcattgcattgctctgtagtgtgagttgatgcaccactgcggtgcatgccggcctgtacaagatccggcgacacttgagcaccgggctgacctccaaatatcgttaagctggagcctggtcgactctatatcatcctacagaaccctagcatgca

SEQ ID NO: 679285 - DNA, 216 bp, Homo sapiens
tggaaacttcttaaaatagggcttagtttaaaaaggttccataagcctcagccaatttttcttaattataagggtatctttcctcccagaatccttcaatatttatgtggtccacttgattccggatgctatcgggtcggtaattattaaagtcttaattgggaggtattttcctccattaaaataaccgggaacggggatcccggaggcccgaat

SEQ ID NO: 679286 - DNA, 497 bp, Homo sapiens
  misc_feature (3)..(3): n is a, c, g, or t
  misc_feature (9)..(10): n is a, c, g, or t
ganagaganncagcaatttggtcacactggaagggattttcagagccaaagagatcacacaggctaagtcaaacaccgagccggagttacaggagagagacatcgcgcacagacaaattatctattctctccgcatggaacggccgatgatagcatggaaaggaaatggcgagaaaagactcgacataaactgcgagagactacgtggtgcatgacagctgactgtaggaaaattgatacaacattggaacgaacaacgatcctctgtacacggtaactgacaggggaacatctattgaaactggctgatgtaagagacactgtgcaaaagagaagaaagacttgaatacacgcatttagataagttacaaacaacttgagttattattacgcggaccagtgccaccatttacagggcaatcaacgtgaagtaccgggaagaaagcggaacagactctgcttcgacagactgaagacctgaggaatgagcagctatt

SEQ ID NO: 679287 - DNA, 343 bp, Homo sapiens
gtactgagggactgcagcagacagcgggatagcaggcagtagcggtccgcctacgctcagactacgaggctcgcttatccgagagcaccacgacgctcatatagccggcatccgcaacggccggcaccgggtgcaccatcgtgccgaagtcttcgccgaccgtaaaacaaacgcgcgcatctcgctccagcatctccatttttcgcccttcttccgcaccgcgaacataaatggcaccgttccaccaaacgaaattcaacggaacgacatatggttcatggccgtcggcaagtcctaaaaaccctgtcggcgccaacgataaaaatgcagaaattttttcttc

SEQ ID NO: 679288 - DNA, 307 bp, Homo sapiens
atgacttcaagattttagcttatggcactcaagaaagtaagctcctcatattgcctattgctggaccccaagctttattaattataatgaggacctatacttacgaaaaactactgtggaccacaagtcgagattgctgaaggtgcatatctgtctgctcgtagtaactgagccggctatagtagaagctggtggaatgcatagctttaggactacacctgacagatccaagtcaccgtcttgtacagaactgtctttgtgactctcaggaatctttcagatgctgcaactacacgcctctgcaggc

SEQ ID NO: 679289 - DNA, 1543 bp, Homo sapiens
taaccaaaccatttacccaaataaagtatagtgcgatagaaagttgaaacctggcgcaatcagcatatcagtaccagcacagggaaagcatgcaaacacattataaccacagccatcaatcatcagccaaggcactaacccctcataccattcatgcatcaatgcacattcaactcagcacaatcaacgtttgccaaggcagcagcccaacagctacagcacccccagcaaaccagcacgcagctcaccataagcaaccagctcacaacagcagccacaccacgtcatatgtcagccaacaatcagatcgggcaagcatattcatcagcgtcagcagtgcagcacaacaaccatcacccgcagcctcgcgtgcatcacgctggcgttgagtcaccacacgcattcagcaatccttcagtataccacacttctcacacattgtgcccgacaagcaacaccatctaaacatccccccttcgtcaacatcttacacttgtctcagtccccacacgcaggcaaccagactcgttatgtgcaccacgtcagtgcaacacacaaccatgtggatcgcagcaagagtcacacaagacatgttcaacgacccacatcaagtcagtgcacatcaaacacagcccagcacaagcacacagttcagagcacacagctgtctcccaagcttcctaagcaccacacgtagcttaagacaacatccgcaaagaaccattcatcaaactgacaacagtcctcgacacagcacaacatttgtgacaccaaatcgtcatacaggccctcattagcaaagcaaactacatcgtacacgatcactcaacggtcacacacatgtcaaaacaacttcatcacatcccgacattacagccatgcgatccaggcaatcacacacacacgtggaacacgtggacaccacagagccaagccatgacccagcaatcacactaaccgaaagtcacaagccaaaacaaaaggtcccattacatacaaaccacctcaactgggtcaagcacccgaacaacaggagcacggcaccacctgaagcgcacacgcgctacacacgacacagtcacacaggaacgctcgcgacgacatctgttaccccgcgcggttccaccacaaaacacatctactgatctaaagaatcagcccaagggatcagaacgggcacccggctcgtgcacaagcagacacaccacgtagtaacacagcaccagcggaagaccccaacccgggtccacggcatacactaacccggggtacgtaaaatcgatgacggaacacagcgagccaaacggggacaccgtgaccacccagaacaacgacgacacaacacagaacaaaggagacggacagaacaaaagcaactcgagacacaaacagacaaagaacaaaacagatgagacaggaacagagagcgagacacacgacagcaacaaacagaacgggccaagcctgacggacgcaacagcaacagccagcagccccctagagcagcaagcacgcaagacgcaagcgagaacaaagaaagagt

SEQ ID NO: 679290 - DNA, 258 bp, Homo sapiens
  misc_feature (26)..(26): n is a, c, g, or t
  misc_feature (91)..(91): n is a, c, g, or t
  misc_feature (128)..(128): n is a, c, g, or t
  misc_feature (142)..(142): n is a, c, g, or t
  misc_feature (147)..(147): n is a, c, g, or t
  misc_feature (170)..(170): n is a, c, g, or t
  misc_feature (214)..(214): n is a, c, g, or t
  misc_feature (234)..(234): n is a, c, g, or t
  misc_feature (247)..(247): n is a, c, g, or t
acccaatgggcagcagtgtcaacagnacgggagtccagtccagggtgggtgcccttgttcattgaggttagggtacagtctatccccaggnttatgtcctgggccccacccagtcagggagttggggntccccccatcaggnctgtnagctctgtgggccctgggatgtnatctagctcagatgccctctcatccttgatgtcatagttgagtncacccaagtggcacccactngcggccaggggancagcctggttg

SEQ ID NO: 679291 - DNA, 490 bp, Homo sapiens
  misc_feature (10)..(10): n is a, c, g, or t
  misc_feature (12)..(12): n is a, c, g, or t
  misc_feature (43)..(43): n is a, c, g, or t
  misc_feature (90)..(90): n is a, c, g, or t
  misc_feature (204)..(204): n is a, c, g, or t
  misc_feature (206)..(207): n is a, c, g, or t
  misc_feature (216)..(216): n is a, c, g, or t
  misc_feature (219)..(219): n is a, c, g, or t
  misc_feature (225)..(225): n is a, c, g, or t
  misc_feature (235)..(235): n is a, c, g, or t
cttgaagcgncngctgctctgtggggctctggcgcgcatggcntggccgggaccatgtgcgcgtccgggacgactggcgctgtgcatccnatgcacgagttttccgccaaggacatcgacgggcacatggttaacctggacaagtaccggggcttcgtgtgcatcgtcaccaacgtggcctcccagtgagcaagaccgaagtanannacactcagntcntcgacngtgcacgccngatacgctgagtgtggctttgcgagaatcgatggccagtgcccgcgtaacctaggatcaggaagcaggacccagggagcaacgaagagaccaaagacaacggcccgggttacaacgtcaaattcgagaagatcagcaaaattggcgtgatcggggacgacgtccaccccctgtggtagtggatgaagatgctacagccaggtaatggaatcttgtgatatgccactgcaagtagattctcattcaagctatcatc

SEQ ID NO: 679292 - DNA, 649 bp, Homo sapiens
cagcctactttggtctccaacacaatgaccgctcgcacggcagaccacatcggtggcaagtacaccttggggttcatgtcagatccgagagaagcttgatcagcatgaggaaaaccgtcgcagaaaacgccaggacgaagagaaatgcaggatcgctttgaggaggagaccgacggatgacggcgaactgggaggagacgttcatgagcgaggagagtgcagggatacaagaaaccacagaagtactccgccaggacgcggtcaccagtctacaccagggagtacggcgatacggaggcggtacaagaattaaatacctccacgaagagtcgacggacaacttgtcccggtacccgcctcccgagatagacatcggcgccaccgcagccgttcccggagccacagccggggacatcgatcgggcttccacggcgaccgaagctgcgaaaagcaagattctaccagagagcgggcatccagagaggagtcctgggagagcggccggagcgagcgagggcccccggactggaggcttgagagctccaacgggaagaaggcttcacggaggtcagaacgagaaggatggccggcgagatctgaacccggtcttcccgggtgctgtaaatatacgctaaaggtccacacagtc

SEQ ID NO: 679293 - DNA, 364 bp, Homo sapiens
gcacgaggtcagtcacatagccccagatgggctgcttaggattgggaaaagaaagctgggttagaaagtctcatgctgctggccgggtgcaatggctcacgcctgtaatcccaaactttgggaggccgaggcgggtggatcacctgaggtcaggagatagagaccatcctggccaacatggtaaaaccccgtctctactaaaaatacaaaaattagctgggtgtggtggtgggtgcctgtaatcccagctactcgggaggctgaggcaggagaatcgcttgaacccaggaggtggaggaggttgcagtgagccgagattgtgccactgtactccagcttggtgacagagcgagactccgtctca

SEQ ID NO: 679294 - DNA, 148 bp, Homo sapiens
cagtatccgccatgaagcctgtccagtttggaaccgttcctctcctgtgcacagaaacagagaagtctggcctaggaggtggaggatgcagcgcaccaagatcgcaccactgtactccaggatgggcaccagagtgagaccttgtctc

SEQ ID NO: 679295 - DNA, 530 bp, Homo sapiens
  misc_feature (382)..(382): n is a, c, g, or t
  misc_feature (497)..(497): n is a, c, g, or t
agctctctctgtgggggccaatattcacatcttaaagaaaagaattttcaacccagaatttcatatccagctaaactaagcttcataagtgacggagaaataaaatactttacagacaagcaaatgctgagagatttggtcaccaccaggcctgccctaatagagctcctgaaggaagcactaaacatggaaaggaacaaccggtaccagccgctgcaaaatcatgccaaaaggtaaagaccatggagactaggaagaaacggcatcaactaacgagcaaaataaccagctaacatcataatgacaggatcaaattcacacataacaatattaactttaaatgtaaatggactaaatgctccaattaaaagacacagacggncaaattggataaagagtcaacacccatcagtgtgttgtattcaggaaacccaccccacagagagagcggacgctctctctgtggggaaaagaagcacccagaccccgcgcccggntgatcttgcttcagtccttgaatcacctgtggg

SEQ ID NO: 679296 - DNA, 369 bp, Homo sapiens
gtcgacggtacatccaacgtcgcattgctcggatgcttggtgtacctcgaatcactgtacggatgctatcagaccctttcgggagacgggttcctatacgcggagaccgagacaaggccgtcatcggtgcacatcggttcaggaggatcgtttcattatgaacaatgtattgagaaatccctttaccacagctcccgaggttagaactcgcctatttgaagtgagaaatctcagtgtaagtgaacgaacagcgagaagaaggttgccagagaggaacctaactgcgtttcgtccagcacgtgccccagaattgctcacacagcaccgcagaggtcgacgcggccgcgaatttagtagtagtagtcgacc

SEQ ID NO: 679297 - DNA, 1181 bp, Homo sapiens
ggggggtggtgaagggtcactgctgaccggaggcagctctgccagtgcagttgtcatcagtgggcttcacgtttgactgacagcccaccagcgtcacctcctcagccccgagctggaccgtgacttgccttgtggatcacggttttccatcttcctagaggcacgcagccccagactggagtgcacgcaggtccgacggacggtgggcgttggactctttgctgaggaccccggctggctggcccggggtgatggcggcctgaggctggcggttgcggcgggccggaggtcgacatggcgcgaggagcaggatcctactcggaggtggacgctgagccccgttgggctcggcaggagccccgtctgtcctgttcccctggggatgcgtcgccctcgctagggcccgacggcgggccgagcggctggcatcggagcctgcgaggccagtgcccggaggctcaggcgtagccatgtggcacaggcctcccaagtaaatgggagccaggcaagaggaacgtgcgtaggtcggtgtaccgcagtaatcataggttcccccgctggttgcaatccggcgaagaggctcgattccatgtgcccagggatgacttccagccgtgcttaaccgaacttggcatagcgttgagttgtccccaatggcccgcgttggccgcctggtttaacctagtgacacagtctaaaatagcaaagcccgcccacggttccacacgcgtgtcctcaatggaaacggccttttacatttgggtttgtttggcggcttccaagaggtcaagaccggccagccagtgaaaagcttacggcaggggaacaccaaggctaacccctggcaaacccttggaaccaaacacggccttggacgcctcccacggccaaaggaaccggcttggggtggcaaaggacttccttagggaggggcttctgcttttgaacatccggcaacgatcgtttgaacccaaaggccgtctcccccctttttccaattcggaaagtgaagtggcgttgatggccggggcttcccgattaatggccacaggccacacacagaaaaaaaggagcacaaccccggggagcttaacaaaggataacccaagaccccagggccggacgggaaagaaaccggggaaaccggggccggtcccagtgggcggaaggggcgaaattgc

SEQ ID NO: 679298 - DNA, 161 bp, Homo sapiens
gggaagccacacgctgcagtaagcagtgatagagaccactgcactctacaaaaaataaaatcaaattgaaaattagccagccatggtggtggtgctgtcatccccagagctgcttgaggaggctaaggtgggaggattacctgagtcccggaatttgaggc

SEQ ID NO: 679299 - DNA, 134 bp, Homo sapiens
gggtcacatatcatctttgcaaggagtacacagagaggattattctccatcttactaatagaactgcggcccagaaggaaatcccttagtgtctttagtggataggaacacagttctagtgatagggaatgcta

SEQ ID NO: 679300 - DNA, 449 bp, Homo sapiens
aaggaggcatggactgaaaaactacttattggctaatattctcattacctgggtcacgcgatcatttgtactccaaacctcagcatcgtgcagtaatatgcatggaacaaacctgtgcatgcaccctctggatctaaaataaaaggcaaacatgttttttaaatgaatgtttgctctcaaaacagtttccaggcagctgtgaacttttcattaagtgtttaatcttgaaaataatttatttccattttatcctctatataaatgaccatttcttaggtcctagctgttaagcctaaattggggtagactgaataatggcaccccagatatgcccacaacctatgaatgctaccttttatgacaaaagggactttgtagctgtgcatgatattgtgaaatatatatttggtcttcctcccagtttcctggcatacaacaactaaaatcct

SEQ ID NO: 679301 - DNA, 688 bp, Homo sapiens
  misc_feature (120)..(120): n is a, c, g, or t
tgaggcaatctcagtaacccttaaggccattagtctcctggtcgtatataaggggaataaagaacaagacccaacccgattattctggtttgggaaccgggtcctaaggtgaatgaaganacgtcacgaacttgacgacgcacggccttgcataggtttaagtgtgcactataggatcatgtgcaaacagtgccaaagctacacacttccatctagatcttgcagaataataacctgaatttgctcagaggcctgtctgtgctctttgcccatagcctcaggatcagtccagtctgggtcggtgtggtcttattaccatgaagcagggtcattcagagttcatgaacatcgtcgacaataacattgggtcaaagaacccttgtttggaatgccaactgtgggagaccctcctgctctgacctgtggcccctgagaaaggtggtggactcttctaacggcaggggcccctgcgtctgtgtagaccatggggctcagggtgattgaggtcgtgcaaggccaaggaccaggtaagaaaggcggttttcagggcagggccaccaagatgagccggcggatgtaggctcaggcgcttctccaggactacatcagcgcgcagagtgctacgcagtcagggcttagggcactcccctcctgtttccacaggaatctgttggtcaatgttatagat

SEQ ID NO: 679302 - DNA, 322 bp, Homo sapiens
ggtcgacagaggttaccaggaactgtggggggacaatgggaagttattgtttaattagtacaaagtttcagtttgggatgataaaaaaaagttctgaagataataggggtgatgggtgcacaacactgtgaatgtacttaatgttgttgaactgtatacttaaaaattgttaaaatgaacaatttgtgttatgtctattttaccataatataaaaaatgtaaatgaaatcgctctgctttgcaatttataaaatgcttttccaaaaatatgttaaaacttttctaaatacagtaatttctgaaaacttaatttattcattat

SEQ ID NO: 679303 - DNA, 1660 bp, Homo sapiens
  misc_feature (757)..(757): n is a, c, g, or t
  misc_feature (1092)..(1092): n is a, c, g, or t
cgttctgttgtgggtcgcgtatttgttgcgtgtgtccacccttgttttgtggggtagtttgccttcttgctcctcctgctgggttggtctgttgtccctctccgcgggcgtccctcctaggtgtggctgtctgcccgggggtagttttcgttgtctctctctctcgggcggccgctctttgctctctcgggcgttgttttgttgccccgtgttgcttcctgtctgcccgcgtcgcccactgttgttccacgggtgggtcagcgactgttcttggggcgctcctttctggtgcaggttgtgcgattcgcgccagcacgtgcgcgggggaaccccgcgggggggcgccccccacgtgtgttgcatcgtgttggcgccccgtcgtttttgttgctgccgtgtgtgtctccccctatgctcgccctgttgtgatcaccgttttggtgggcccgggaatgtcccccggtttttctgaggcgccccacccggggtttgctccccggtttctaatgaagcgctcttcttggggagaaacaggctttccccccccgttgttgtgccccccaccacggggcggttttgctaaacatggtttatggctgcaccctattggcgggtttttttttcgtccggagggtgtgtcctcttgttggtgtgttcacctttgagcggggcctcttttttggggggggaaaagggacacctcccaacttggcgtttatacgccccctgtgtggtgccccccacgtgtttgaagggngagcgtaaacgcctctcctctcctgggatgcccacgttgttctgttgggtctcccccccaatgtgggacgccgccgcgagagtgtcttcttggttcgcgctctgctggcggcttctgtttctgttcgcacacagttcctcagggggtgcacacatgggcccttgttctcgtggccctctcgagaggggcgttctttatgtgcccatatgccccacacgtgtggggagcaggtacccggcagcattagtgtgtagcacacctccgcgcgtgtgggtgtgattatgttggcgcccacacatctcgtgtttgccccttgtcccccttgggagcacccncccccgggggagtatctctggcgtctctctaaggtgtttgggagctcccacatacgctcggagaatatttgctgtgtttatatgtgtgtgtgaattatattacattgtgttatatgtcaaagaaagagttatatacgtgatatataataagatacaccccaacactcacatgtagacccctcttcttggggtttctttttgcgccggttgtgaaataagatccccacacatagtggtgccatccagagaaaatataagcccattctcctctcatcaccccatatatatagagatccagcctcccttgcacctcttgagagggcccgagagatgcttctctggtggtgtgtatttgaaatcccttctctgcccttgtttccatggccacatgtgaataccctctttggtccctgtccccagatgtcatcttttccacatgatttcttgaatccatagttcttagattgccttgaccctgccccctgggtccccgtgttcatctgagcataacctgtacttaatcccttttcccatatccagtataataaaggagtgatgtcgccaatta

SEQ ID NO: 679304 - DNA, 159 bp, Homo sapiens
  misc_feature (6)..(6): n is a, c, g, or t
  misc_feature (8)..(8): n is a, c, g, or t
  misc_feature (33)..(33): n is a, c, g, or t
  misc_feature (69)..(69): n is a, c, g, or t
  misc_feature (104)..(104): n is a, c, g, or t
  misc_feature (113)..(113): n is a, c, g, or t
tcgcgnangtgttatcctcgcgaacgtgttatncctcgcgaatgtgttatctctcggctataccttgtntacattggataagacgttcgcgagaataacacgtncgcgggatnacacgttcgcgagtggtaccgaagctcgaagttcgtacatcagtgg

SEQ ID NO: 679305 - DNA, 223 bp, Homo sapiens
aatgccatattcaagctgtaactgttctctttgcatacagactccgtgtaacttgtgtgaacacttgggatttttctcctctgtcccgaggtcgtcgtctgctattcttttatgggtttccttctagaagattgcgacgtgcatatgacagggctgagagcacctcctcaaaacaaggctgaagacgaggggtaccggagctcgacatttcgtacaatcaatg

SEQ ID NO: 679306 - DNA, 412 bp, Homo sapiens
aagagaagtattcagtctagatgcagacttcccgtatggagctcttaggggcataatatccatccagttagtcatttccacaggcgtgataaactaagcgcacagtcaacgggccattaatagcatagtgagctagatttgtggcatcctcagtattaagtaaacagtgatggtgaacgtcactgttcagaagaagtgggcatctttgcctaatgtgcgtgcctatcgcaacagtcttagatctgcaagggcccttagagatcatctattcatctggtctactcatgttgcaatggtgaatctcatagtagacctgcgggtaagagagtaggtgaagaaggagcatggcattagagcggagtctatcaatataatacctggcaggaactcatgtggatgaagagtatactcg

SEQ ID NO: 679307 - DNA, 262 bp, Homo sapiens
caaacaaacatttcaccaaagtctattaccaaccattaaaaaatacagttcttactacaaataccacgattctatatatgagatatgaagaaacatgatgtttggttttcatatcttttgatacagctgcatggtaaaaggatttaaatgcagaatatcagactctaagttagtcccacctatggagccagacaaccatgagtgaatctctggccaaggaggccaagtacaggaattctgcaggtgtatccatcagtcttcc

SEQ ID NO: 679308 - DNA, 761 bp, Homo sapiens
atgccggtgcagcggggtggtgccggggtgccctgagtggccctgggatggggaaccgcggtggcttcctgcggagtgtttcggcagtggcatcctggggccggggtcgctggcctgtggacaggggccggggccgatggccgctggagctcgcggagtgcaatggcctggaggataagtgagtggatgccctgtcaccaagttgtgtgccgcttggtcaatggacatgaagatcaagtccctgtgtatggagatctatctcttctcccatgcctattaaggaatcagagatcatttgattttcttcctgtgggtgcctctctcaaggatgaggttattgaagattagtagccatgttgcagaaagcatgacccctggtgcctgtgccaggctgcaaccaatgtgttcaaagggcatttttggttgctattctgggggactaccagcaatgtgccacagtcgggacattgggttgttaaagttggctccagatggatgtgttggccacctgccaataccaggtggggtgcccatcaatccttggccaaggctctccaatcggtccccgtgcgcatgagtgctaattggggggaacagagatcggaaagccccacacgtgtcccttgcaaggtgacaggccagtgcgggatctagtgcttggtacagacctcatcccatggaccacaggtgcagttggcatcagcatccgaactgtgacaaagaagatggaaagaaagatgtacagataatggaaaatcaaa

SEQ ID NO: 679309 - DNA, 872 bp, Homo sapiens
  misc_feature (697)..(697): n is a, c, g, or t
gaaaaaaatcaaacttcaaaataatctacaaaaaaacaagtatcaagggcatgaaagacaaaaagaaaagctgaattttacttttttaactttttttattttgggaaagggagtttggcattgtcgccaaggttggagtgcaaaggcgtgatctcggctcactgaaagctccgccgctgtgggttcacgcaattatgacttgcgctcagcctcccgcaattagctgggactaatgggtgcccgcaaccacgccagctaaatattttaggttaattgttgtagctagaaaacggggtttcacacggtttaagctagagatggtctccatctcctgtactcatgatccgcaccgacctcggacctctccacaagagtgcggggattacagagccatgagtcgctcgcgaaacccgagataagaagaagatctacaaagaagatgtctgcatgataatgtgcaatatgtgaccctgatttggatcctgagttaagaaaacactttaggtggaaccatgagacaaaattttgtcacatgaaggtctgctaggtaagtaactaattcgtgtatcaatcttcctaagtgtgagtaacggttacgtcttgagaatagtggggtgttgagcgaggtaaagaaaatgcgtgggtgtgagagaagtatgtctgggaaatctctgaatgttttgaaaatatattttgngttagaggcttaaaaggtagtttcaacattggaacaaatttttacacactacatgggaattgacgaggagaaaaaaggcatagggaatggaaatgttcagaaaagtatgtgggcgctagattttgaaattccgtgggctccaatccgcgaaaggccttttaaaattgacaggggt

SEQ ID NO: 679310 - DNA, 302 bp, Homo sapiens
agtagccgtggctctatatggcatcagctctgctctctctgtggaccggctcttgtcccttgtactgcactggccataccgtgcctgccctgccctgccctgactcagtcctggctcagcccctggcccaaccttggccttggcattgcccctggtcatgccatatttcttgcggtgtccataccctggccttggctcttgacccttacctttgatgtggccctgcctttgccctaaacgcatgcccttggccctgtcactggccttgcccttgaccttgtacatggcccttggcatttcgc

SEQ ID NO: 679311 - DNA, 357 bp, Homo sapiens
  misc_feature (136)..(136): n is a, c, g, or t
attcgcggccgcgtcgacgaaccccgaagcggaaggcgaagaaacggaggcacaggatccgaccccgaacgcctgattgcaccgggctctgctcctacagattcagggcgtaccaaaacccgcgctcgacgccaanctgtaggagccgggcttgccgcgaaaaggccctcaaaaccgccaaaagcttcgcgagcaagctctgctcccacaggttccgtagcgttttcgaagtcatatccggcttagctgaccgaccgccccacatcccccatcggcatcaccgtcacctggacttccgggtcatggttgccgccccccagaatcaccccgggcgacgcggccgcgaatttagtagta

SEQ ID NO: 679312 - DNA, 216 bp, Homo sapiens
aatgtgttctaggacacttatggataccaacatctctggatgctcaagtccctgatataaaatgtgtgtgactatttgcatacaacctgtgtacatcccgtattattcaaatcatccctagatcacttatactacgtaatacaatgtcaatgccatgtaattgactgtactagggtgattagggaataccgaagagatgaaaaatgtacatgtgca

SEQ ID NO: 679313 - DNA, 790 bp, Homo sapiens
ggaatctccaactcccaggttcaagcgattctcttgcctcagtctcctgagtagctgggactacaggcgcgtgccatcacgcccggcctagtaaatttgtatttttacgtaagaagacggggtttcaccatgttagccatggatggtctccatctcccagacctcgtgatccacccgtcttggcctcccaaatgtgctgggattacagtgcatgagccactcgtgcccggcagattctttaccatatatgtatagatgttcagatggtgttcttttaacagcaggagggccatgccagtttaggaagcatatttcactgggaaggttagctgggatcttattaggtatttagttggtttacatctacggaataattttgtatttatagtagaaccattttctttaggtaatagaagtcaagtcagtgctaaaaaagttaacatgatttaagagctttctgtgtgaacctttaggcaatactatgaaaccttgtgtcagcgttacttaaacacttgtaaaacttgagcactttcattttcccctaccatatgataagccttccccatctctatagaatgggcactcttatgaagtgccagttgtcaaaccaaacactgtggggcgggtacttcattcttactccctcaattatcaatcttgccacatccaaagttaatcgggtagcttcccctataatctccaaaacaatggggcaaattctcccattaactaatagccctaagtgccggagtcacttggcaccctataacgcattctattcccaggagga

SEQ ID NO: 679314 - DNA, 411 bp, Homo sapiens
  misc_feature (411)..(411): n is a, c, g, or t
gtaattaagggaaggggatgcggtggagagcgcatacagaaaggagaagacgggatgagtgagggcaccttacgcttatagaagagcaggaggagtatatacgggaggatatagaatgggctcacattgactacttcaataatgcgatcatttgggacctaatagaaaataacacaaagggaatcctggcgatgctggatgaagagtgcctgagacctgggacagtcactgatgagaccgtgtgaggcggaaccaagtatgtgccacccaccagcatgatgaaagcaggatgagcaagtgctctcggatactcaatgacacgtacttggcacagaggtggttgaggagccagcattatgctggaaaggtgctgtaccagggggaaggattcgatgacgcgccttggtcgcn

SEQ ID NO: 679315 - DNA, 272 bp, Homo sapiens
atatagtccgctagggatagtgaaaaatttggggcttggtttagattggagaggtatatggtggggtgtcttataaggcttaactttgggagggcccagggccttgatttctgtcccccttgccttgcgtggcctttgaattgaaagctttgaattaggccttcatagattttagtgtgcatacaaataacacgatctttttataaggcagattatgattctgaaggtttagtgtgggacccaagctttcgcatttctgatctataaggtga

SEQ ID NO: 679316 - DNA, 244 bp, Homo sapiens
aggcattgtatcatatcttatgcctttgtgtcctcatagtttagctcccacatatccgtgagaacattgatgtttggttttccattgctgaattacttcacttagaataatagtctccaatctcatccaggtcactgcagttgctgtatcccagaggttttgataggtgtcattaattttgttaatttttctcttcaatttccattttgattttcaagaacaagttaggaagtcggagagggag

SEQ ID NO: 679317 - DNA, 740 bp, Homo sapiens
  misc_feature (555)..(555): n is a, c, g, or t
  misc_feature (557)..(557): n is a, c, g, or t
  misc_feature (559)..(559): n is a, c, g, or t
taatgccaaaggaaaaaaaagaacccaaacctcccttaaggaggaaaaggagaagtgggcccccaaaacaaagcggagaagcaagaggtcaaaacgaaaccaggcctaaaaggctgtgtttagcaccaacccacaacaaaaggtgggcagggaccgcaggtatcggaaaggaaggccgcaggaagaaaaagtaaggaccatggaggcttcttcaagaacccctgaaagaatcaaatcctccatgggagcaaataaccaaggcgaggggactagagggacgatactgctttgcaaacaaaagctctatgaaggggcacaggaagatcacaatcctaaaattcaacaagctccaccttaatcccccaggcatcagaggcatcatccagagtagactgcaagatgagagcaaaatcttcacagcaagagaggatctgagaaagattcttggtgcacagaacattcatcagagaagtatgtgccaaaagacgggttgatgagacagagttggagatatatgcagcagccagggtagcattctcaacgcggaaatagagnanantagtacccccccccgtcaaaaaaacctgtgtgaggatctcctgaggaggaacatcaaatgaaatagttaccatgaccacattgatgaaactgtcagtgtatggctctctctctctctctctctctctctctctctctctctctctctctctctctctctctctctctctctctctctctct

SEQ ID NO: 679318 - DNA, 265 bp, Homo sapiens
  misc_feature (110)..(110): n is a, c, g, or t
gggggtggggaagggttttttccccccacctggggcagggggggcctggccccccctttttgttccccccttgttgggggggcgggggccccaatttttggcggtccccnccaggggggctggggtccgtcctgtttttgggggggtttgggggggggggcccttcccccctccccccctttgggggtccccccacctttggccggctttccggggggtgggattttatggccccggcccattaacctttttttggggggggcca

SEQ ID NO: 679319 - DNA, 923 bp, Homo sapiens
  misc_feature (1)..(1): n is a, c, g, or t
nttgaccgacataacggacggaggacttttaaaatcctgacatgtccaccggtacaaacatgtttgccaaaacctgggttccccccattgcgtgggcacaaaatgggcagtgcccgccatttcccgggccgccgttatatccccccgcgtagttgttccaagcagttcaacggccaaaaccaaatgtgttccctttaaaaaaagagaaattgtttctccaaaggaggaaagatgttgaaggtgtccccccgctcctagcaggatccgcgtatctttgtgtgtgttcaaaaggaggaacatcattggccatcaccgcgcctgttttggaaaccccgagttgtccctcttcttttacaaaaagaattttgggtactctaattctttcgtttgtttacaaaccaacgctttcctggggttccacataagcacaaactggtgtatgctcccccaagaactgtctataccattttgtgtttcccccccttgataatagaatttctttttccttgaacccctctttaacaaaaacacaatgttccctccttctctccactacgagaaaatatatcataataccgctgttgttctactttttctcgcccggaaatttataggaagatttaaggggccaatcagggtctgcgctacccacgtctgccaccacccctataatttggtacagaatgcctaaattgcggtaaaagaaccccccgcatccttgggagctcatgtaagaatgagtttaacacacaaggaaccacacttcttcggactcatgtagtgccttaaagcccctatattaaaataaactatggcggagtaaagacgtaatgcgataggcagaaaaattatttttctgttagtaaacccgagaagggttatttaatcttaaaaaaactttggggcccccaccaaaaaaaaca

SEQ ID NO: 679320 - DNA, 935 bp, Homo sapiens
  misc_feature (1)..(2): n is a, c, g, or t
nngggtctctttctggtttgttttctgttttagtgttttcttgtgtggcttctgtgttgtgtgtagtgtagtttctctggggaggagaatagcggtacagagcggggatggtgtgtatggcaagagcagaggtaatgaacttgaccgagtagagatgggtagttgggggcgcttacgaactgacgaacggggtctctctgcgcgttttgtgtacgcgcatcctatggggccgcttcccggtgttcgtcccgcggcccactctaccaattgctggcgtatgaggatagtgttccgccgtgcgtggaaaaccggtggtgtcgtccctcaattttaagccgtgcggggagcccccccctttgtggtataggtgtcgctcgggacgacacagttgtggtgagacgcttctaagagagaacacacccttgggggcgccttccgttctcggaattgagaccacagcaactaatcgctggggggtgaacaaacaacacagtggggcaacaaaggggcttgtgagttgcggcaaaggagcgcccactttttggccccggaagcttctagtaaggctttaagtatgagttttctccccttatacgtttcgcgctccccgctgtgtaaccacggtgggggaaaacagcggtttcaaagacgtgttggtcgtatgggcgcgcctgatgagttgtagttggagaaaacggggcgttatgatacacccaaggtgctggttaactcttcttcgagggaaaaggaggaagatcttttgtcgggaccacccaatgggggtttctttttttcgcggtgtgcacaccttttaaatatattatttttttaaaaaccacaacctttttaatgggaacacacacctctgccccacaaattttgctccacacaaaatttgtgaggccccccttcaaaaagtttaaattagagagaga

SEQ ID NO: 679321 - DNA, 136 bp, Homo sapiens
gcagcgtgtggcttactgtgtatgctcatgcctgtatgtgcccacatctgccagtgcctgtgtctgtgtgcacgtgcatctctgtgtccctgcatcacgtgtgtgcctggtactctccgcgctgtgggtctgtggt

SEQ ID NO: 679322 - DNA, 133 bp, Homo sapiens
cagctactctgcaggctgagacagaaggatagcttgaacgccaggagttcaaggctgcactgagcaattcaaggctgtagtgagctgattgcaccattgtactccagcctgggtgacagagccagactgactc

SEQ ID NO: 679323 - DNA, 114 bp, Homo sapiens
cccgctggttctactcttctgaaaatatctccaacttcaaccatgccctggagtcaaagactgctgccagctggggctggaggtgatcagcagcaccttagaccatgctacagc

SEQ ID NO: 679324 - DNA, 364 bp, Homo sapiens
ctgctccgcccctctctggctggtgttctggagcgtgagcgaccaatgcgtctagctggggttctagagcgagagcgtccacgtctggctggagttctggagcgagagcggacacgtctagctggggttctagagcgagacctgccacttctcctgcctggcgatctactacgagacctgcgctgaactgacgatcgctgcctagatctgcgcctagcaggtgttctagaccgagacctgcccctccggactgatgttctagaccgaacctacgcctggtgggagttctggatcgtgatctccgcctggcaggtgttctagagcgggacctgccccggcgggctggtgttctagaacgagatct

SEQ ID NO: 679325 - DNA, 856 bp, Homo sapiens
aaaatcactatctttatctcgctgtcctttctagagacactggctaccagataggtgtattataaggcttgggacacattggtggatgtcccgtgtcatgaacatcctagctgcgccatgctctgcaatccgccacctccgcgtagtactgctgtggagtctcgagcacatctaccagcatagagctgttacatgacagatgattcctggtgattctgtacagcatggaggtctcttaccatgggtacccatatactatttatcagatgtgaatgattaaccagatctagtcaatcaagtctgtttactgcaaggttcaacttattaacaattaggcagactctttatgcttgcaaaaactacaaccaatggaatgtgatgttcatgggtatagttcatgtctgctatcattattcgtcagatattggacaaagaaccttctctatggggcatcctctttttccaacttggctgcaggaatctttaccaagatgcttttaaccagagtctgaacctatttcttaaacaccttgcaacctacctgttgagcatcacagaatgtgctacaggaaatcaacttgcttatcaacttcctaaatattatgagatgctggcttgggcagcatccccttgaactcttcactcttcaaatgcctgactagggagccatgtctcacaaggtctttacagtgactaattggccttgcagacattacacacacattctcagcatcacggtcccactgccctgatgcctctgtccttctggcatgggttttccacattagaaccaccaactgacaacagttcacataacttcactctgactgttcttatgcagacaagcctctctcga

SEQ ID NO: 679326 - DNA, 817 bp, Homo sapiens
  misc_feature (3)..(3): n is a, c, g, or t
  misc_feature (65)..(65): n is a, c, g, or t
  misc_feature (71)..(72): n is a, c, g, or t
  misc_feature (84)..(86): n is a, c, g, or t
  misc_feature (107)..(108): n is a, c, g, or t
  misc_feature (111)..(111): n is a, c, g, or t
  misc_feature (113)..(113): n is a, c, g, or t
  misc_feature (120)..(120): n is a, c, g, or t
  misc_feature (149)..(150): n is a, c, g, or t
  misc_feature (189)..(189): n is a, c, g, or t
  misc_feature (193)..(193): n is a, c, g, or t
  misc_feature (200)..(200): n is a, c, g, or t
  misc_feature (203)..(203): n is a, c, g, or t
  misc_feature (230)..(230): n is a, c, g, or t
  misc_feature (244)..(244): n is a, c, g, or t
  misc_feature (260)..(260): n is a, c, g, or t
  misc_feature (267)..(267): n is a, c, g, or t
  misc_feature (314)..(314): n is a, c, g, or t
  misc_feature (336)..(336): n is a, c, g, or t
  misc_feature (352)..(352): n is a, c, g, or t
  misc_feature (368)..(368): n is a, c, g, or t
  misc_feature (545)..(545): n is a, c, g, or t
  misc_feature (547)..(547): n is a, c, g, or t
  misc_feature (669)..(669): n is a, c, g, or t
  misc_feature (809)..(809): n is a, c, g, or t
atnttctccccacttcctaaacaaaataaaatagcctccccttgaacacgaagacctcaaaattntaaaannaaaaaaaaagannnccaaaaaagaaaaacaaaacnnccncngaaagcnaaccaaaaagaaataaaaaaccaacaacnnacaaaacaaaaagagagagaaagaaatttttgggggggnagangagaccnggnggcagaggggggggcgggggggggggngagtggcgaattcnagtgccgagagggggnagggggnggggggcacagcagcggccaaccccaaccaagaagcaacggagaccnccgggcccccagaatgccccancctagtcttacccccnaccatgtcagtccttnaaggagaaagaagaaaacccaaaaagaggaaggaaaggggattgaaggctgacaatcccaggctggctctgggcagggaagaaataacctggggttttgtttaattttccctgtccttaaaaaacatatttaaaggaaaaaatgctttttggcagagagaggccaggcatctccgtntnagcttcctccagcccccggggccgaggcccgccctggggtgccgatgctcccacacgctctgcgacaccccagccccgggacctcgggttgagtggcttcgttcaaaggtcgatttacagtnttgaaaaagaggtcataaaagagacccaaatgacatcgtaattttgtaaaaatttctcactcattcgcccatgtctctccctgtggctgccccggctccctccagcccccagaagggagaggagggctgggggggtagtnagggaagc

SEQ ID NO: 679327 - DNA, 168 bp, Homo sapiens
cagctcggactgtcaagtgcatctagtacaacctacgcgaaaatccatttcactatcatattcatcggacgtaaatctaagctttcttcccacaacactattctcgagcctatccggcaatgccccgaacgtcacttagacagggcgatcctgctaggacgtcgacct

SEQ ID NO: 679328 - DNA, 122 bp, Homo sapiens
ttggctgggtgctggtggtgcccttttcttcctgcaccgtggaggtggggatctagccaacagccagggagcactgcagaaagtcttctgattgtcaccctggtaccctgtgtacctgcttc

SEQ ID NO: 679329 - DNA, 315 bp, Homo sapiens
agaggccatctctcccaaaagtacaaagtcagccaggtgtagtggtgcacgcctctggtcctggctactcttgggaggctagaggctaggaggatcgcttgagcctgggaggctgagactgcagtgagccatgatcacaccactgcactccaaccttggtcacagaaaccccgtcctccctacaaaaaggagggggatagacggtaagcgatctaaactgaaggcgagcggggtacggtggaacaggtgtgagacagggcgagagagacaacacgcgagagagagtacacacaacaaaaccaaaaaaaaaacgac

SEQ ID NO: 679330 - DNA, 404 bp, Homo sapiens
ttgttttatactcagtacctcttttaagaaaaagtgacaaggaagtaaaaccaaagtcaggcagcctggtgccaggcctgtatccaggcctgggcctgtctggcctaaacccagtagttaaaaatcgactcataacttagaaactgatgttattcatagattccagacattgtatagaagaacattgtgttactccctgccctgttctgtttctctctgacctctggtgcatgcagcccctgtcatgtaccgcctgcttgctcaaatcaatcacgaccctttcatgtgaatctttagtgttgtgagcccttaaaagggaaaaaattgagtatttgggaagcttgaattttaagacagtagaaaaataaagatacaaaataaataaaaacattcattcaacaaaa

SEQ ID NO: 679331 - DNA, 374 bp, Homo sapiens
ccgggtccaccagctctggtctttactcttcttgaaaagcaagaaccagaaggcgagtaatcagaaagcactagcaggcatcagttaatccaagatactagctcttagtcccaaaagcactggcaaagaaaacctttgggggggaggggggggagagggatggaagcactccataagtaaggggcaatcccaggcagggtgtatgccaagtctcatgaggctatttttggaattaatccttgactgggtcagggtttttgccctcaaatcacaatttttctttggcacttttttccctcaaagtataaaaggtatgaaatataaccaagctctggcacggcacacttgaggggggcatcgataaacacggggtc

SEQ ID NO: 679332 - DNA, 176 bp, Homo sapiens
ttacaacccacgatcaccaatctcagtggttgaactacccttgatatggttcagctctgtatccccaaccaaatctcatgtcaaattgcaattcccagtgttgagggagggacctggtgggagatgattggctcatggcggctgacgccccccttgctggtctcgtgatcgtgggg

SEQ ID NO: 679333 - DNA, 147 bp, Homo sapiens
aacagacgaggtcaacgattccttcctttaccatcaaattcaatttggccaccattggtactgaacctacgagtacaccgactacggcggattaatcttcaactgctacatacttccccattattcctagaaccaggcgactgcgat

SEQ ID NO: 679334 - DNA, 181 bp, Homo sapiens
taggaatacacagcgataaacgtatgtttatactatattgtagtctaaaatgtgcgtacgctttatgtgtaaaaaaacagtgtagttaccccaattaaaaaaatattggtaaaaaatgctaatgattatcttgagccctcaggttgagtcttaattctctccggctggtgcggctggttat

SEQ ID NO: 679335 - DNA, 1299 bp, Homo sapiens
ctcaacagccccctgtcaggcgcaaccaggtggagcaccggctggaagtcgcggtgctccacctggttgcgctcaactagccccctgtcaggcggaatgctggctggtcatccgtcggtggccgcaccttccagtgccgttccagcagtgcgcgcggcccgttgcgcggcctggcgcgagccgctatccgacgcactacctgttcctcgacgcctgtccagtgacactgtacacgcatcgctgctgccggcagacacgacacgtctctacaggacactgatgccccatacgtcaacacatcaacggcactgacgtctggctgcataaccactatgaattggccacggcatcatgatacatacagagcactctgagctggctccagcctagtacacacctcgaacgagcaaacagccaagttcattacctccaacattatgaccgcgataagacgtgcaaccacttcacaattgaacgagacatcgcaccaacaacctgtagcacccccaatcaataagaaagcacgtaagatgagacaacttgagacatacagctcacacaacgcaatacagcgagccgcccaaatcggtatatataacaccgcaaaaccatgcaactacacagttgactaaagcaacagagatagtagcacgggaaaacgaggcagtagcataaccacacaataccgacgaaaaacaaagtagggcacgcgaaggagcacaatacgagataatgacctagacactagacgttgctagtctagacgacatgtcccgtagagagaccccaaaagaatgacggaccaacaccagaagatgttccaactcaagtaaaaccccataagaaagtagtcaggagctactccttgacgcaatataggaagaaaacgcaatgaccttcatcaacatgaatattttggagacacccctaaacctaaaatcacaactagggagaacacgtaaggaatataggctaagacaaaacggagaccaggaatagcaacaatacaccatttgataagattcacatgactatatagtgaaatatgcgatagagtcttaacaaattgatgtgtgctgatgaggaatattatcaagggtgggctgacaaagacaccaccatgaaagagcagcggaaggatatgctagggataatgtgatcacgcatacgacgaacaccaagtaaaaaggagtaacaaatagcgaattccagaaggacaagattcttgaaagagatcgaaaaacacagaaaagacacaaaagaagaggcactaagaagtggtacgctagtcgacgccgc

SEQ ID NO: 679336 - DNA, 268 bp, Homo sapiens
  misc_feature (158)..(158): n is a, c, g, or t
  misc_feature (160)..(161): n is a, c, g, or t
  misc_feature (199)..(199): n is a, c, g, or t
  misc_feature (208)..(208): n is a, c, g, or t
  misc_feature (225)..(225): n is a, c, g, or t
  misc_feature (264)..(264): n is a, c, g, or t
ggcggacccaaccgtagcacttaaaactttaaaaagatttagttcgcaacatagagcttacaacaactttattgagtattccgaagcatatttaaattacgagttatgcacggattaaaaattacatcagtgcaaaaacggcatgtattcaatatctntnnggcaacaacacacacacagagagaaatagcacgatcanaagaatcanagaataatgcgggtganttttagatgtgtcgcgcttccacgtaatggtggggatcnctct

SEQ ID NO: 679337 - DNA, 928 bp, Homo sapiens
ccaatatcatcaatccacaactcatcactcttctatgtcgatccaacacacacaccacttcgaggaaaacaggaatgtcaagtttttcattgataaactcctacctccaattgattgacgtcactaagaggccttgtgtagaagtacaccatcatcattgtagtagagtgtgaaccttttcccatgcccagtcttgaaatttctaatgttttgcagtgataaaatgttttgcaaatacatgccattaacacatatcaaataatatcctcctcctgacaaatttatgatcttttaagttcctatacatgcattcttataatatgacccaggatctactatattaaaatacatgaaccaggtacattcttttcttctaaaatgcaattcactccactaatacagtcctgacaccagattgtctattacatcattccaacattatcaactctgctacactgaaagccccgtttacgtttaatataatcagtccacatgtactcacctcactacttggctgtgacttcagcatatgcgctatacttccaccattagttgaaagtcccatcgctgccatctagcatctcctatacatggtcgatcacctcctacaagcactcctactaatcacctgaacgctgaattaacgctcgacacatcattaactccctaccactcaacgcttcatcacatcacttttccaactcctcaactcaccaccccaccaccgaatccatattcatgctcgccctccaagtaaaacataccaaaacttttccgtgtgggctgtgcaatctctacagtagtcgcatagcccgctctatcctccacacacgaccatacatctgcctcttccaacacttctatcctgaccactctcatcacacaagtctcttcctcaccctctctatctgactagatcctactctcc

SEQ ID NO: 679338 - DNA, 277 bp, Homo sapiens
ggctcgcgagcagatactcagatggtttgggctcaaagcatctcagtgccttgccccaggccttcaggcctgggtgtttggatgccagagcttgagtccgtccacgtgtgacttcagacactgccctgtccacaccgcctccccatccagcctctgcagtggattcaagggcagcccaggaggctgggagcccagtcagacacagcggagccaggctgtatctgttgtctggccatgggcatccactgaggaggcagaacggagcagggggctgctg

SEQ ID NO: 679339 - DNA, 1741 bp, Homo sapiens
  misc_feature (1741)..(1741): n is a, c, g, or t
cacaacagcagttcccactacggaccatgcgcatctgacagcaatctagacatgcatgtgtctaagatcctatgcataaaatgaaagggatgcttcatctctcagcctaagcacatcgatgctcttagttgtgtgcttagtcgactcccacgtcgataggcttgacatccgttcgtgtcatacaaatagagactaggaagtgattatcagttgcctaacgcggataagagataatacatcagatgacattcttcgttctggtcgctattagatgaattcctattatatgtaccaatacacattcgctatgaataaatgtgtataaaatttgcaataacgttatatatgaatatacctgacacgcaacacattatataacattaattcatgacaatcatcttatgtacatatataagatttgtaagtaatcttctaacacgtatgttccgagactttcgtcatcctctctcctcgtactctgaataaggggtaaggcatttaaaataggaagatatgaagaatagagtgtttagcatctaggagggatagatgccatagggtagtaagcgctaaagatgaattggtatagaacaggcattataccagattgtctactagcaagtatttctgcttcgcgattacctcataaaggcgttggagaaaagtagattattatatcttagggtgactccctcttcctgtctactctcaacggataataagatgagagacgtaatacgtcatttatcatcttaagattgacaaagaatcattgcacttgctgttcattgaatcttaagttcctacatcaatgggggagccatccccaacaattacaaagcggttgcgcccccattatccctcgtaatactttctttcattccatttataacgtccattttttacatatccgcccaacatagactaagagaaggaaccacattacacgacacaaagggcgaaggagcccacccgaggccccaggattgatggggcacttcctttacatgcgaagggtggcctaaacattaagttaaatatagcgaggcacccattaaccaacaagtttacagaccacagcacacttcagaggggcgaaccgagattaaataagaaggagaaacgccccatgtgttaaaaggggttccccacactttgagcccaagcaagctgtggcccgttgttcttaactttggggactttaagactccggttataaacagcccttgtaaagaagatagagcgatattcccttgggtgacgccaagggagcaccacaacatagggtccgccggcagtagttagtgtaacacttaaatgaaggaacgaacaggttcgcaccaattgaaagaactatcatatgtctacaagagacgcacggataatgcaggaacgcggaccactacaaggagaaggaaacaacttccagacatgtggggggatgattggggaaattaaatcagcaagggaacaatcatggatgcaaagttctgacgcatatacaaggaagtgagcagaactattcataagtagaaaagaagaaggaaaggacgaaaatagacgaatgcgaagacataacgaaggaaggagcaagaaaaaaaaagaagaagagagaagagaaaaaagagaaagaagaatcaaaaataacaatatgaaatcgagtcaggtaagatgagcaacataggaataaaagaaataacaaggagcacgacctcccatccactccgcccgacgacaggan

SEQ ID NO: 679340 - DNA, 100 bp, Homo sapiens
caagatccaactacgagctttttaactgctgcaggtctccaaggtgaacagcctctggcatgttggaactcggtcagaggtgggaactcggtcagaggtg

SEQ ID NO: 679341 - DNA, 650 bp, Homo sapiens
tggtgctcaaccccaacgccggatcaagcgtgggcggtccgcaaccctcttggagcctggcacttggcttggaggctgcccctgccctccccccccccgttgtgccttggtgccttgtccgcctcagctgtggccttaaggacttattctggcacccccttccacgggggttccctgaaagcccttttctctgagtgcctttttctccttaaggaggcctgccgagaaaggggctttgggctctgcccccctctgcttgggaccctgggtattctcatgagctcatcccagcccaggttggacccctcccccagaggcccaccccgtgccccctccccttttccgctactgagcccgtgtcatcccgctttccaccacccggtgttgctgcctattgtggtgccgcctcacggttaggggctctcacgccactctctaacctctgccctcgctgctcttggagattgcgccccccagatgctctctcccttttcccatgagggaggccccacgaatcctgagaaggtgaatgtgccctaacctgctcctctgtgcctaggccttacgcctttgctgactgactcagcccccctgctttctggggacctttcctacccccctcagcatccattaaacctcctgtctcccgt

SEQ ID NO: 679342 - DNA, 962 bp, Homo sapiens
  misc_feature (15)..(15): n is a, c, g, or t
  misc_feature (129)..(129): n is a, c, g, or t
  misc_feature (189)..(189): n is a, c, g, or t
  misc_feature (225)..(225): n is a, c, g, or t
  misc_feature (349)..(349): n is a, c, g, or t
  misc_feature (358)..(358): n is a, c, g, or t
  misc_feature (366)..(366): n is a, c, g, or t
  misc_feature (368)..(368): n is a, c, g, or t
  misc_feature (370)..(370): n is a, c, g, or t
  misc_feature (378)..(378): n is a, c, g, or t
  misc_feature (382)..(382): n is a, c, g, or t
  misc_feature (384)..(384): n is a, c, g, or t
  misc_feature (391)..(391): n is a, c, g, or t
  misc_feature (393)..(393): n is a, c, g, or t
  misc_feature (396)..(396): n is a, c, g, or t
  misc_feature (403)..(404): n is a, c, g, or t
  misc_feature (408)..(408): n is a, c, g, or t
  misc_feature (412)..(412): n is a, c, g, or t
  misc_feature (414)..(414): n is a, c, g, or t
  misc_feature (418)..(419): n is a, c, g, or t
  misc_feature (422)..(422): n is a, c, g, or t
  misc_feature (433)..(433): n is a, c, g, or t
  misc_feature (436)..(436): n is a, c, g, or t
  misc_feature (441)..(441): n is a, c, g, or t
  misc_feature (445)..(445): n is a, c, g, or t
  misc_feature (496)..(496): n is a, c, g, or t
  misc_feature (503)..(503): n is a, c, g, or t
  misc_feature (522)..(522): n is a, c, g, or t
  misc_feature (531)..(531): n is a, c, g, or t
  misc_feature (563)..(563): n is a, c, g, or t
  misc_feature (568)..(568): n is a, c, g, or t
  misc_feature (581)..(581): n is a, c, g, or t
  misc_feature (630)..(630): n is a, c, g, or t
  misc_feature (669)..(669): n is a, c, g, or t
  misc_feature (828)..(828): n is a, c, g, or t
  misc_feature (898)..(898): n is a, c, g, or t
  misc_feature (953)..(953): n is a, c, g, or t
tccggaattcccggngatgaggtagcccagccccgcgttcggctgctctcgaggaggccggagcccccggagacgatgcgccccgcgcagccgcctgcgcctgcgggagccggctgcccttgagatggngttgctgcctctttggctctgcctgggttttcacttcctgaccgtgggctggaggaacanaagcggaacagccacagcagcctcccaaggagtctncaagttggtgggtggagccgctgactgccgagggcagagcctcgcttcggtgcccagcagcctcccgccccacgcccggatgctcaccctggatgccaaccctctcaagaccctgtggaatcantccctccanccttaccntntnctggagancctnancctgcananctnccacctnnagcncatnanccgnngcnccttccagganaangtcanctgntcacttggtcctgggggacaactgcctctcagagaactacgaagagacggnagccgcnctccacgccctgccgggcntgcggaggntggacttgtcaggaaacgccctgacggagganatggnagcgctcatgctncagaacctctcctcgctgcggtccgtgtccctggcggggaacaccatcntgcggctggacgactccgtcttcgagggcctggagcgtntccgggagctggatctgcagaggaactacatcttcgagatcgagggcggcgctttcgacggcctggctgagctgaggcacctcaacctggccttcaacaacctcccctgcatcgtggacttcgggctcacgcggctgcgggtcctcaacgtcagctacnacgtcctggagtggttcctcgcgaccgggggagaggctgccttcgagctggagacgctggactgtctcanaacagctgctgttcttccgctgctgcccagtacagaagtgcggaccttctgctgngcgacaaaa

SEQ ID NO: 679343 - DNA, 425 bp, Homo sapiens
catctatggtataataaatgaaatattcattttacgctggaatagagattataatagcctcacattagttcaggccatgtggcaccatttctattaaaaaacattccattttcagagtgctctggtgttcagcactgttggctgaggaactgtgggcctgctccatcgcactcactttatgtgctacggtcctgtttcacaaaggccaaatatccttggctcaagttcatgcagctggtgaaagaagatagcgcaaggtatgaaccccgactctctcacccaaagcctgcacggtgcttcttctacacttaatatgaacgcaatgatcacctttacagcctctctgatagctgactgtgagtcggcaggtctgaggcagggcctgggaaactgcattcctaaagcactggggctcctggaaggac

SEQ ID NO: 679344 - DNA, 415 bp, Homo sapiens
ctctcacagccccgtggatgcagggtgctactactcttatcccgggtaggagacagagcgccgagagaggttacgtgtcgtgcccaagtcacacatgctcggctgtggccgggcttgagcatcagctacgtctgtttgcagaccccatcactgtcaccccctcgagcccgtgcgccttgggccctgccggtcaggatgtctcaaagcgtgcaggcactcaccgagcttcgtggcagtctctggaaggtcactgagctctgtgcccagaatcgagtcgggggagtctgtgcagaggtggccctatgtgtggggacagtgtgtgacacaaacactgctttggatagacacctctcccgtgacctcctagcatccaatcccaaaggaacaactgttgcagtgcatgagacgtagaaag

SEQ ID NO: 679345 - DNA, 379 bp, Homo sapiens
tgaaataggacttgctatttataaatgttgagagagaatctcactttctatctgcattgcccctcccaggaatctgcccaggaccacactttcccaccaactgatggttactacaacacgggaaaaagtaagatcaaggtggacaaccagcttccctaccacctggggttcgctggcaggagatctatccctgcctcaactgacaggaagcatcaggaacacccaaagggagaaatatccctgaggacagccagaaacaaaggaagcagagaaggactaccatccccagtcctggaaactctgctccataaattagacaaaggagatgccatatcagagtggcagttcagcagcaccatgctgtggagattagttccac

SEQ ID NO: 679346 - DNA, 383 bp, Homo sapiens
agatccccggcgcttgttaggtacaggcatacgcgtccttgcgcctggctgtcccctgtgtagcttacagctcctgttcgtggagcatggctcagcgctggaccccccaacgcacgtagttcagcctttgtccaccgaggtggctatggcgaggccaggatgtccatggtgcgcattgctggctggatgtagaaccagagcttctgctgcgaaaggagggcctgcctgtgcagttgatccagctctgactcccgaatcaggtgctccgtcaccatggggtgcgcagttgaggccgccacgggcgtgattcacctgacccgtactcgaaaggaagacttctcttcgaatcgaacctggtcacagaggataagctgtggcggccg

SEQ ID NO: 679347 - DNA, 2117 bp, Homo sapiens
ccacctccagagtccaagggtctatgtggtgggcagtttgagctggctggatactagagggaggctgcacctgaagcatttggtgggtgagcagcatgggctttgaggagctgctggagcaggtgggcggctttgggcccttccaactgcggaatgtggcactgctggccctgccccgagtgctgctaccactgcacttcctcctgcccatcttcctggctgccgtgcctgcccaccgatgtgccctgccgggtgcccctgccaacttcagccatcaggatgtgtggctggaggcccatcttccccgggagcctgatggcacgctcagctcctgcctccgctttgcctatccccaggctctccccaacaccacgttgggggaagaaaggcagagccgtggggagctggaggatgaacctgccacagtgccctgctctcagggctgggagtacgaccactcagaattctcctctaccattgcaactgagtcccagtgggatctggtgtgtgagcagaaaggtctgaacagagctgcgtccactttcttcttcgccggtgtgctggtgggggctgtggcctttggatatctgtccgacaggtttgggcggcggcgtctgctgctggtagcctacgtgagtaccctggtgctgggcctggcatctgcagcctccgtcagctatgtaatgtttgccatcacccgcacccttactggctcagccctggctggttttaccatcatcgtgatgccactggagctggagtggctggatgtggagcaccgcaccgtggctggagtcctgagcagcaccttctggacagggggcgtgatgctgctggcactggttgggtacctgatacgggactggcgatggcttctgctagctgtcaccctgccttgtgccccaggcatcctcagcctctggtgggtgcctgagtctgcacgctggcttctgacccaaggccatgtgaaagaggcccacaggtacttgctccactgtgccaggctcaatgggcggccagtgtgtgaggacagcttcagccaggaggctgtgagcaaagtggccgccggggaacgggtggtccgaagaccttcatacctagacctgttccgcacaccacggctccgacacatctcactgtgctgcgtggtggtgtggttcggagtgaacttctcctattacggcctgagtctggatgtgtcggggctggggctgaacgtgtaccagacacagctgttgttcggggctgtggaactgccctccaagctgctggtctacttgtcggtgcgctacgcaggacgccgcctcacgcaagccgggacactgctgggcacggccctggcgttcggcactagactgctagtgtcctccgatatgaagtcctggagcactgtcctggcagtgatggggaaagctttttctgaagctgccttcaccactgcttacctgttcacttcagagttgtaccctacggtgctcagacagacagggatggggctgactgcactggtgggccggctggggggctctttggccccactggcggccttgctagatggagtgtggctgtcactgcccaagcttacttatggggggatcgccctgctggctgccggcaccgccctcctgctgccagagacgaggcaggcacagctgccagagaccatccaggacgtggagagaaagagtgccccaaccagtcttcaggaggaagagatgcccatgaagcaggtccagaactaagtgggagtggaggcaggccctccacagaagctctgcagcaggggctgggagagcagaagggcaggcccttcaactcaggctgggagagcagaagggcaggccctgcaactcaggctgggagtatcgaaccctctgcctagggccggagttgctgccagtacccgctccctctgctcatccatccttgattatttggcttctaggaacagttgacttcccagaatgcagtgggctgctgggcacccctctcacggttggggaggattctgtaaataaaggtgccccttgggttggggcagtggtgacgagctgtgggaagagccctggataggaagccactgagtctgccctgggctctgataaaacttcaccatt

SEQ ID NO: 679348 - DNA, 378 bp, Homo sapiens
ccctcagattacctcaacaacatcagttattttttgtctttttgataaaaagcaattgtaacttgggtgagataatattttattgtggttatcatgcacatttccctgatgattagtgatgtcatgggttttttttatatacccattagacacttccgtgtcttcttttgagaaatgtctattgagagcttttgcccattttaattctttttttttttggctatggagttgtttaaattttctatttttccgggttattatctctctttgcagatggattgttggtgaaagagtcctctcattctgtaggttattcagaggttattcattctcttcattttgtggattgtttccttggtggtgcagaggctttttagc

SEQ ID NO: 679349 - DNA, 219 bp, Homo sapiens
tgagtcggccccttgtagactaaccaggaagcgagaatgcagttttcctctgtgatatcaagcacttgcagtgcttgtagatgctgccattgtcgaacacctgctggatgaccagcactaaaggagaagggggagatgatgagcatgttcacgcagcgtggcttcgctggctcccactttgtctccagctcttgatcgagctgcagcatcgttagggtc

SEQ ID NO: 679350 - DNA, 708 bp, Homo sapiens
taggtttgagggggaatgctggaaattgtaatggggtatggagactatgtcatataagtaatgctagggtgagtggtaggaatgtttttccataggaggtgtcatgacgtgggccgtaccggaatcgggggtatgctgtccgaattcataaaaacagggaggttaacaagtagggtctgtggtcgacaacaatattgttcgtggtagatgtccacggggagagtgcgtcactatgttggtccctaggaacgattcgtagtgggtgacggcgtgttctattattaactaactgtctcggggttctctccgggctttgacaagaactcaggcgccgcaagggcgccctgcggcgatatcccgactgttgacacgccctgagcactagctctcggacctcccctttcgggcaaggctccgaagggggtcccggttggccctcgtgctaggctgtggacgcactacacactccatatttatggccccaggggccctggatgcgccaggacgtaactccagagggtgtctcctgtggtgtcgggtcgcacaccggggtgggaacagcgtttaaaggggccccccttacttagctcactgtccgactcgttcaccacttgcttggcctagggtggactctccttttgccgcattgcttgggggctacttgctcccaggtgccccgatcagggccgtaccttcgacaattctgac

SEQ ID NO: 679351 - DNA, 503 bp, Homo sapiens
acccaatatgtattttatttttactattgtttagtatttagtatactttagtatcagaattaaatttgtcagtgaagtgtattgggaagtttttcatagtttgtactggccgcatgtttaaataatccaggaattatctgttctttatgatgtattagaacttactgataaaacaaactggaactggtgctttttttgaagttagagcttttgctgcattttcaagtttttctttgattattgggataatttcctctcttcatgagctaatattagtaatctgcattttgctaaaaatttgtctatttcatgtagattttctaatttactggtgggtatttggaattttagaattttaaaaatctcttaatgctgaattatttttctttccttgttgtagatatttgcattttctttctctttttttcttgttcacacttattaatggtttgtatgttgtattctaaaaacaaaaacaaaataaaacaattgctttatttaaa

SEQ ID NO: 679352 - DNA, 773 bp, Homo sapiens
  misc_feature (307)..(307): n is a, c, g, or t
taaagaaccctccatcaataaatggaaacttacaaaaatagtcaaaccacttctacaaaaggtcagtatcaggcgggggtcttcaaacccaaagggatgttgggtatgtaaaggtgaaaatatttagttgtggcggattgaagcagaatagtgtgaggaaagttgtgacccaattaatgtgacggtgaagctccggtggaacccgtggtggctacaaacaaatgtgttgacccgataaagtcccgctcggaaagtgggtgagagggagacctcgaagttacctcgtgaggcttgtgtatagagcagnggataaaaatataaaacacccagtataaaaattgtgggttaatgtgagccagtgtgctgtgtgaattataatgtgtgggttccggggtgtgggtttctctatattatagaaacttatgtgtgtttgacgcctcagggggtgattgtgcaatcaccctccctgtgatgtgccgagtataatatacgggatgtgtgtgtttacagagagtgtggagcacttctctataggagcgatttattacggcgggggggagacgtcgcctgtgtttggggggcgccatgtggccctctccctaaatgggggggagtacggggcgcaccaggctggagaagtggggtcaaaaagggctccaaaaaaattctcggcggaaagaaaaaaaatcttcctggaaggtatatcaaataacggaataaccccgtaatcgaaggcccttttgggacaggtggtttgtgtgggtggccttgaa

SEQ ID NO: 679353 - DNA, 387 bp, Homo sapiens
  misc_feature (137)..(137): n is a, c, g, or t
  misc_feature (155)..(155): n is a, c, g, or t
  misc_feature (258)..(258): n is a, c, g, or t
  misc_feature (344)..(344): n is a, c, g, or t
gctcggacagacagggtttcaaccatgttgcccaggttggtctcaaactcctgagctcaggcaatccacccgccttggcctcccaaagtgctaggattacaggtaacagccaccacacccagctattttttctttcnttttttaattttaaagtnggggggggtctcaatttgttaccctggctggtctcgaactcccggacttaagcgatcctctgctccaagcccactaccagtctcaggtttctttactaaaagntcactacctttttttctcttatctgctgccatgtgagatgtggctttcaccttccgccatgattgtgaggccttcccagccacgtngaactgtaagtccaataaacctcttttgtaaattaaaaaaaaa

SEQ ID NO: 679354 - DNA, 498 bp, Homo sapiens
  misc_feature (495)..(495): n is a, c, g, or t
  misc_feature (498)..(498): n is a, c, g, or t
ggcgtggtggcaggcgcctgcaatcccagctactcgggaggctgaggcagaactgtttgaacctgggaggcggagcttgcagtgagccaagatcgcaccactgcactccagcctgggcgacagagcaagactccgtcccaaaaaaaaaaaaaaaaaaaaaaaaaaaaattgtgtgtggggggcccgggccccggaaaaagtttttaaaacccttgcgttgggggcgcgcgcggggccccagaaaggttaggttaacaacgcgtccagaagtggtttcccaaggaagaactcgcgggtcaggaacatagggctggtggcttccttccccactaaaaaaaagcgcgcgcgggggcaaccacagcgtgtgttctggaaaccaaaatcccgagttggggagttccggaagggccacaataagcggcttcctaatcaacaaggaggagttccacaggggagccgcgaatttaaaagttacgccccgcgcgcagcgggganagn

SEQ ID NO: 679355 - DNA, 126 bp, Homo sapiens
ccccttttttttaaagggggggggggggggggccctttttttccccctaaaattttgggggccccctgttttttgttttttggttggcccaggccttttttttttaaggggggggccccgggttta

SEQ ID NO: 679356 - DNA, 1736 bp, Homo sapiens
  misc_feature (1211)..(1211): n is a, c, g, or t
  misc_feature (1411)..(1411): n is a, c, g, or t
cgctgtgtgtcgacaacagcgtgttgagcgttcactttatgtgttctgtggtttctcctgtgtgtttgactaataccgtcggtggtttttatctctgcgctcgtctagtttcatgtttctcccgttctttatgggttggcgtggcgcctcgtggtggagtaccagtatttccgcgcctcgaccgagggggggttgtgctcttggtggtgactgacatccttggggactgatcattagggtcgggccatgatgtagctcaggtggtgctgtcccaccgccacacgtcgcccgtggtgtgtacccttggtgtgtgtgtttttctggtgggcgaactgctgtggctttcctcttagtgatttgtgtgcgcgctcacctcattatttaatttgtgagattagtctccgttggtgggtgttttccacgcccgccgtgtcgccccgtgcgctctactgctcttaatggaaagccccacgaaatgggggcgttcttttagaaaattctgtgcggcccacctgtgtgtcactgccatatgttgtcccggttggtggagataaaagattgtggtgtaactttatatgtccaaggaaacctgttggttcctaggggacaactccttgttctcggatgttggacgcctcacttttagagaggggacctgtgtccacagacttcgtttgcttataaggagtgttttttcgctcgcccccaaaccacacaatgatatttgggggggggcacacacaccacacatggggcgacatgtggtgtgctcccccacataagatgcccatccaaaggggtttctctcaacaccccagatgttataataatatggggggggagtatatctcttttagaagcgcgttttaaaagagcgttttttttggagctttttggtgacacagccctcttcggctcgttgttggtcgacacacaggagatagtaaaatgatttctccttcctcaagggttacaccccagcagggtccccccaagaatcttgggtctcgataatagggggggacacacaagattttgtggggccgcccgcgcgccgcgcgcacgaccagaggacgacctggtgggtacaagagagggcccctcctctccccacacgagttgttatagtcgcacagaggcgcaccagagggtgggccctcggggcccaccccacggccgcggagatagtgtggctttgagatagtgtttgngtgtcacaccacgcgccgctgcactatcctgcgggctcttgttcgctcaatggtgggttctctggtgtacacacagaggctctctcagccacattctcacccgaaatctctttctgcttctctgtccgtgtgccaccctcgtgtcacggctgtgtcttcgtgcgttgtctgagagactataagagaccacacatgtgtgnggggaaccacaccacaccacacttataacttcacgagaaagaacacatgcacattaatgtggggtggataatcaaaacccgagtgctttcacgatgagcctactgtacagtcttcacaatgtggaataaagaatataagagacccacaacaccacatgcactttataactgcgtgggcacaatccacggtgaacttttataaatgtaagaaatggaaattcccaaccacttaaccaccttcagctatatgacagaaagtttaatctatggatatggtattttgtgaatgatcttttataatataaaggaaacccttacgtaatta

SEQ ID NO: 679357 - DNA, 186 bp, Homo sapiens
  misc_feature (98)..(98): n is a, c, g, or t
ggtggtatatgtggtatggtttgggtctgatagatttggagagactcaatactgtttttcaggaatgtctgatcatagatacgggatggtgggtccanttccagagcaccacagggcactgtgtacacatgagggggtaccttacagagccactgagatgatatttatatttcttctcacctctta

SEQ ID NO: 679358 - DNA, 421 bp, Homo sapiens
agatagaaagaaaaggcattgggggaaacaatagaaggagaagggaaatgtgggaagtgaaaaagaaaagggccagaagaggggaaggggagaaaaagaaaagagacgacaggaaaaggagagaagagactaagagaaaagtcagagaaggaaagacagacaaaatgagggatggaaagaaagaaaagcgagaagtagaaagaaaggagtacagagagtaaaggaaaggaggagaggagaaatatgaaaagagaaagagaaagagaaggaacagaagtgaaagagagatataaaaggagaacctctctctctctctctctctctctctctctctctctctctctctctctctctctctctctctctctctctctctctctctctctctctctctctctctctccgcgtggagaattcgcac

SEQ ID NO: 679359 - DNA, 1645 bp, Homo sapiens
agtgaccagagccctggcggcaggagaggccctttgccaggagcacagcagtcagctcgcctacctctgagcccaggcccacataaatacaacaatcacaccccaactcacatcaccatcacaatcctacaccaatacacaaaaacaacaatctcacaaagaccttctattcaacacaaaacacacaacacacacacatcacacacaacaatcaacaccaccaccacacacaaccagacacacccacaagccaacaacacaccacaaacaccacctcacaaatctcataccaaaccaacacacccacacaccacacacaaaacaaccaacaaccctcatcacacaacacacaaacaaacccaccaacccacaaccaacacagaaaacacaacacaccaacaaacatacacaacatcccacctacacaccccacccacccaaaaaaaaacaaacaacacaacatagcaaaaccatacaacaacaccacaaaacacccaaacaaacacccaccaacaacgactaacccaccaaaccaaataaacaacacacaaaaccaccatagaaaacaacaaactacacacaaccccacctccaccgtcaaaccacccacaaccacccacccccatccacccaccaacacctcaacaaacaaaaaaacaaaacccaacaaacaaccccaacagaaaccaaccgaccaccccaccccacacccacacaacacaacaaacaccaacacccacacataccacaaccacaaacaacacacaaaccacgaaccaacgacaacggaaaccagaagacacacacacccagaacaaacaccaaccacgaaacacacaacacaacacacaaccgcagcacaccccaacccccccacaacccccccccaatacccccccgcacaacacaagccaacccacaacaccacccgcacaaacacaacaccccacaccccgccacacgcagctgaccacacgaccagccaagccgcgaacaccaccccaccagcccaccgaaccaccacgaggcaccacaacaccaacactcaccacgaccacgccagcgcacgacacagaccacaacacaccagcacgcagcccccaccacccacacaagcaacacaccccaccaccacacacacacgacagccaccagaccacaccccaccaacccgaaacacaagcaccaacagcaacacaacaccgccgcagccgaaccgaaccaagccaccgacagaccccgcggctccccccccccccccacctccgccaaccccaccgcacacacacaccccaccgcagccgcgccccaccagacccacagccgacacacccagcaacagcaccaacgcgcgaacacaacacactacgacagagcacacaacgagagacagaacacagccaaagacaacgacaagacacacacaacccagacaccgcaacgacccgaccacaaccaacaaaaacacaaccacagaccacaccagcaaccagcagcgcccgcgcgggccggcaccgcagagacaaccgagcccagcacaggcactccgccgcgccccagagaaacccgaacccgcacagcagaccaccgagcagagacgaagaaccgaccaacagcacaagcacacacgcaccaccaccacacc

SEQ ID NO: 679360 - DNA, 1227 bp, Homo sapiens
gattcgcttatatctactatcagtttctagaatgtcttggtcttgctactgccttgaaagaatgacaatgtgaacatgatagttaaactcaccacgcatattataaccattattatgcaaaattgagaagaacagttcttggcatggtcgtggcatatagtgtaaactcgagagtacacttcactctgctgccatctgcttataattacctggtgagtcccttagaagaagtggtgtaacacttgttgcagtaggcattgttgtagaactatgccttaatgtaagaaactagtagacagacatgatccggtctaatatctatgtctagggtcgtgtatctctaactagacaccaggggtccgcttgccccatgtgtcctggtgagaaaataatatagcctcggcatcgagcattgtgcgtatgggagaatgctatgagaagtaactgtccgctgagaaggtctggtccggatgtctagaaagtgtgtgccgaatagttcgtaggaattctctgtactaatagaggattccaggagctctttgtgactcgcgtatattacgtaacacctgaaagatgacatccttgacagtgaaagggccagcactatataacgtagcaagaagtccctgtcttgcaagtctgccgacgggtatttcaggcgactcaagttatactgttatgagatttggcaaccactccttgtgtactcgtgacggatttctggatcccgtggcaagatcccttttacttgccatagattgggatgaggcattggtacacggtgctttaaaggtagtgggaactcctgggggaagccagaggggccatacgagacacgacacaatagtcaagtacgattgctaaatggcacttctacgtcccacttacgcacacggcatatgcgagcgaaacacatgattccattgccttgaccatacctggtaacccaacaggccgtaaacagctcagaagctaattacagtacacaaggtgaacacccagcgcggcggcaaacccacgcgggaaattcacacctgcagggacagggctaaacaagacaacacaacggacaacccatggagcacatataacgggaaagaaaacacacctggacagagcacaccagctagccccaacgaacaagcgatacacactccgaagacgccatgcaaaacacaggaggccatcatgcgtggcacgaaacaaaccggctgggaaacaacaccc

SEQ ID NO: 679361 - DNA, 160 bp, Homo sapiens
aacgggggcccctaaattttttttggggagggggggattttttttccgggcccggggtttttcccttttttttggtgttttgggggccccgggccccttgcccccaagccgcctttcccccagggttttttttccaaaaacccggggtttttttgccaga

SEQ ID NO: 679362 - DNA, 271 bp, Homo sapiens
  misc_feature (22)..(22): n is a, c, g, or t
gagagaccttgtctcaattttnaaaaaaatataaaaaaagaaaaccgtcactaaaaacacaaaattaatcaaggaagaggggagggggaaatggaataaccgagcttgcagcacacgcagcaccagtcatgcggtgagcccctctgagctggcgcctcgtgcctcagaatcaggtagactcttgttataagattacagttacccttaactgctccagagataacaacttgaacattatgaaaccttaacttttccctttgagatttttttt

SEQ ID NO: 679363 - DNA, 1245 bp, Homo sapiens
  misc_feature (7)..(7): n is a, c, g, or t
  misc_feature (10)..(10): n is a, c, g, or t
  misc_feature (16)..(16): n is a, c, g, or t
  misc_feature (18)..(18): n is a, c, g, or t
  misc_feature (268)..(268): n is a, c, g, or t
agcgggnatnacaggnangagccaccgcgcccagctatattatacttatacttttatgtgcaaaaggaaaaattgaccattattaacagtgaagtatattcttatattacacattatactggttgagtatcccttatccgaaatgcttgggaccagaggtgtttggattttttgcattttggaatatttgcattatacttactggtttaacatccctaatctgaaaatacaaaatgctccaaagagcatttcctttgatcatcatgtnggtgctcaaaaaatttcagattttgaagcattttgggtttcagattagggatactcaacctgtaacattttattgttttaaaatactcttgtatgtcagttaataaaggtacgtacaaacatttgctcaaatatttaagttgtcaataactaataagcaggttttctgcttgcttagtgttgctacatatagtgatcagaaatgtgtttcttgagtcactacgcaggccctggaatatattcttattttaaaaaaactagttaacttaaaaccgactgaggcatgtccttcaggtggcattccaggaaaaaaagcttcgttatcctgggaggtgatggctccatgcatgttactgcccctgtaagaccttccagtgaagatgtggaggcggaatatagtgttactgatgatcctgactctgtaggcctaggctaatgtgtgtgtatatggcttagtttttaacaaaagtttaaaaagtgaaaaatatttttaaaaataggaaaaggcttaataggataaggatataaagaaaatattgttcagctgtatgatatgcttttgttttaagctaatcgttactagaaaattcaaaatgtttaaaaatttttttaagtttccaaagtaaaaaatgttaagtaagcaaaggttaatttattcttgaacgaaagacaaatatttttatctttattactgtatatacattgtgccttttctgtgtttagatatgtttagatatacaagcacattgtgttacagtagcctgcagtattcagtacagtaacatactgtgcatcatgctttgtagcctaagagcaatagactataaccatctaggttgtgtaagtccactctgtgatgttgcacaacacaaaatcagctcagtgtgcatctctcaggaagtttcctttggtcaatgatgcataactggactgtctgacaccatttagcttccccgctagtcctactctcattctcaa

SEQ ID NO: 679364 - DNA, 338 bp, Homo sapiens
ctaatatgcgttcaacaaactgtgtgttaggtttctcctatatattaaaagtattattcattcatttaacaaacatcaacaagggcctattaatggtccccgcaatataggaggcattgagggcaaaaagataaaatattaactctgttaatattacttagtcttgggaggtggtatatcattttcagaatgaagttattctgcaaatgagtgaaactccaggataataacgatgaatgttttcataattatttcaaaggtcaaaaattcaaataatagcccacatactcaaagtgaactttacatgaaaactgcttgagccatgtaacagcatatca

SEQ ID NO: 679365 - DNA, 593 bp, Homo sapiens
  misc_feature (7)..(7): n is a, c, g, or t
  misc_feature (10)..(10): n is a, c, g, or t
  misc_feature (16)..(16): n is a, c, g, or t
  misc_feature (18)..(18): n is a, c, g, or t
  misc_feature (268)..(268): n is a, c, g, or t
agcgggnatnacaggnangagccaccgcgcccagctatattatacttatacttttatgtgcaaaaggaaaaattgaccattattaacagtgaagtatattcttatattacacattatactggttgagtatcccttatccgaaatgcttgggaccagaggtgtttggattttttgcattttggaatatttgcattatacttactggtttaacatccctaatctgaaaatacaaaatgctccaaagagcatttcctttgatcatcatgtnggtgctcaaaaaatttcagattttgaagcattttgggtttcagattagggatactcaacctgtaacattttattgttttaaaatactcttgtatgtcagttaataaaggtacgtacaaacatttgctcaaatatttaagttgtcaataactaataagcaggttttctgcttgcttagtgttgctacatatagtgatcagaaatgtgtttcttcgtgaatgactgtactttttcagagctcagcatgcactaggacttgtgatccttaagaatgcctcacaaggaacggacataccataagaacttctacattaacatcagactca

SEQ ID NO: 679366 - DNA, 105 bp, Homo sapiens
taaatcggctcgcacctgttaatcgtgtcatagcctgtcaggacagttgatgagtcattcaaaactttgtcagagaaaagtgagaggacctgctttataattgta

SEQ ID NO: 679367 - DNA, 853 bp, Homo sapiens
  misc_feature (301)..(301): n is a, c, g, or t
gcggagacggaggccggagcgggtagtgccagctacggtccgcggctggggttccctcctcgcgttatttgtatccccacgagatcctatagcaatggaactcagtcgatgcaaatctgcaaatcactaacagaatattctaaagagaaacacttgatcctgatcctgcgcatccgacgtgccaggctgagaaactttcttgaattctgttgaacggaacatcatgaacttactccaactgttgtctttatgacattatactgtgacgaacgtccgcatggatacattgtcatcaacaggntaatgttgcattctagctaacccattgcaacaataactattatttcaaaagggaaactggtgacgaacgtagttcgaacggactgaacaccaacgacaaaactatcgttgaaaggccgattcgacgctggtccactaaataaggccaaagcaataagtgaacctatgatgcctataagcagcctcgtagagcccaaattctagacacgccagggttacagctgaatgccaattcagccatctccattcggccagcagcaagcatttgtcctacatgcaacatggcctagaactatgcgtgaaccagaacagtggctgaaatcgcgtttcaagcagctggaagcatttccagttgttatcaaatggcagtcctccgttactagccacatttcagttacttctcaaaagaatacccggtcaatggaaattgtcaacgtcaaaatcgcagcttactggactgacaaattaagtctatgatcctgggaatggcctttaggcctttgggcctttttgaactaaactcgtattgcatagagggccaacttacttgcac

SEQ ID NO: 679368 - DNA, 782 bp, Homo sapiens
agcatcatccctctactattttattaaccaaatcagcaactccctatcagctgttccccaatcttttcctccgaccccctaacaaccccctcctaatactaactacctgactcctacccctcttttatcatggcaagccaacgccacgttatccagtgaaccacgtatcacgaagaaacgactctacctctctatactaatctccctacaagatctccttagttataacatgcacagccacagaactaatcatatgtttatagtcgttcttcgaaaccacgacttatccccacctgggctatcatcacccgatgaggacacccgagccagaacgcctgagaccgcaggcagcagtactggtccgtattctacacgcctaggtgaggctcccttccccttactcgagtcgcagctaaagtttagcagctcacaaggaccctagggcgtcactaaagtattctacgtacatccactctgcacatgtcccaaagaagctatcaaacgtcccttgaggccatacgagtttcattattgacgtaaagcattacgaacaaattaggcatgttacttctgttcaacggccttagcctccatttacaggacctccacactgtaggcacgccccctaaacgccgcaggtgtcgaaagcccccccatccggctgggtaccacgatagtgctatgacagcatagtactactggcaagactaagcggaattggggacatagaaagcccatacaagtcactagttcaagcccctgagaaaacagatgccttacac

SEQ ID NO: 679369 - DNA, 432 bp, Homo sapiens
gtcgacacgctagaaatctgcatgatcatggctaaatgtttataggaggctagagttggtatacatgcaaaaaagatctgacagagtacttgtctcgatataggggaagttgttgactgcacaattcaaacagatccagtcactgggagatcaagaggatttggatttgtgcttttcaacgatgctgctagtgttgataaggtttaggaactgaaagaacacaaactggatggcaaattgatagatcccaaaagggccaaagctttaaaagggaaagaacctcccaaaaaggtttctgtgggtggattgcgcccggatacttctgaagaacaaattaaagaatattttggcagcctttggagagattgacaatattgaacttcccatggatacaaaaacaacatagtcagcagcagggtaccgcagctcgca

SEQ ID NO: 679370 - DNA, 425 bp, Homo sapiens
  misc_feature (351)..(351): n is a, c, g, or t
  misc_feature (376)..(376): n is a, c, g, or t
  misc_feature (390)..(390): n is a, c, g, or t
  misc_feature (418)..(418): n is a, c, g, or t
agtgatcttgagtattttttaatgtttgttggcaacctgcatgtcttcttttgataaatgtctgtttatgtcatttgcctactttgtaatgacataatgtgtttatttatttatttactgggttccatgtagattctggatattagtacttcgttagatacataatttgtgaatattttctcctgttctgtaggttgcctgtttactctgttgattatttcctttgctgtgcagaagatttttagtttacttaggtcccatttgcctattattatttttgtttcatttgcttctgatgacttagtcataaattctttgtcagggctgatattcagtaaagttttcctaggntttcttctaaggaatttataggttnttacatttgagtanttaatcaatcttaatttttatatatggngagatat

SEQ ID NO: 679371 - DNA, 716 bp, Homo sapiens
  misc_feature (476)..(476): n is a, c, g, or t
gattatggttcccataccaactgtgcgtcccctactaaccaagggttatattttcttataaaactcacccatccccccgggttccagctttaataaaagtcccatacttttaaaaagtttttataacttattcttttataccaaatgtcccgctttcggtcgcgttgtctttttatagttcacccaccttcttgaccacttgttatacctacatttcaccacggcttacacactccatcttccaccacagtgttcgagtgcctcaacaccactaagggcgggtcaaactataaagcaccccgtctaattacatttctctcccattctataatcccaataactctttcccagacaaataatatttctcaacaccaccacgagtttgtaatatttcaaatggtttaaaatatcaaaccttcttagttatgtacactttcgtctcttcaaaataatgttggtctcctacacaattggtnccgactcaccgcagtaagtgccccaatatagaaaataatttgtcgcccaaccgctagtgctcaccacatctaagattgctaccaaagtaaagaagacgcggtactaggtggggtcccacggttccctatagtctgttcgtctggggggtggttctaaatggattcttctactgggtagttcgctgtgctacagtgggggctcgcccaatatcaacacatcttccttcggcccacaaaaca

SEQ ID NO: 679372 - DNA, 144 bp, Homo sapiens
ccacacacccgacaccagacatacacagaccacacacaacacagacaccacaacacacatagcccacacacatacacaacccataaacacacaccacataccatacacacatacacacacatgcacatacacttgcacacgggg

SEQ ID NO: 679373 - DNA, 557 bp, Homo sapiens
aagatccttgcaggctctctacctttgtgagcgtgcttccacggagctaacgagtcaggaagcagttgggttgaagaggaaatgggaggtgaggaaggaagacagcaagtgtagacatgtgccttacaagaaagcttgtgctgtgaaaggaaagacagagactgtagtggctagaaaagatgacagcaggaacctgggaggctccaggctgccggcacagcaaagtcagaaatgcagagggaggccttcgggaggtggccgggactgagacaggtacaattcttcctctagaactcagggaacaggggtccaatgatccaggggggcccaatctgtggagcctcttgacagcctctgtttccctgggagtggcagtggccggtcctggctcaggacagggagtggtgaggatcaaatgaatggagggttgcaaaaagtgacagaaacattcactaccattactcatggggagcaggactctcgattttacagcccactcgaatcgcaggggggccgggatttgcacgtgaccataaattattcggcctgaacattag

SEQ ID NO: 679374 - DNA, 701 bp, Homo sapiens
  misc_feature (1)..(1): n is a, c, g, or t
  misc_feature (62)..(62): n is a, c, g, or t
  misc_feature (112)..(115): n is a, c, g, or t
  misc_feature (136)..(136): n is a, c, g, or t
  misc_feature (170)..(170): n is a, c, g, or t
  misc_feature (172)..(172): n is a, c, g, or t
  misc_feature (175)..(176): n is a, c, g, or t
  misc_feature (179)..(179): n is a, c, g, or t
  misc_feature (181)..(181): n is a, c, g, or t
  misc_feature (187)..(187): n is a, c, g, or t
  misc_feature (206)..(207): n is a, c, g, or t
  misc_feature (209)..(209): n is a, c, g, or t
  misc_feature (214)..(214): n is a, c, g, or t
  misc_feature (221)..(221): n is a, c, g, or t
  misc_feature (224)..(224): n is a, c, g, or t
  misc_feature (236)..(238): n is a, c, g, or t
  misc_feature (240)..(240): n is a, c, g, or t
  misc_feature (242)..(245): n is a, c, g, or t
  misc_feature (253)..(253): n is a, c, g, or t
  misc_feature (257)..(259): n is a, c, g, or t
  misc_feature (263)..(263): n is a, c, g, or t
  misc_feature (277)..(277): n is a, c, g, or t
  misc_feature (279)..(279): n is a, c, g, or t
  misc_feature (288)..(288): n is a, c, g, or t
  misc_feature (290)..(290): n is a, c, g, or t
  misc_feature (307)..(307): n is a, c, g, or t
  misc_feature (310)..(310): n is a, c, g, or t
  misc_feature (312)..(312): n is a, c, g, or t
  misc_feature (314)..(314): n is a, c, g, or t
  misc_feature (317)..(317): n is a, c, g, or t
  misc_feature (319)..(319): n is a, c, g, or t
  misc_feature (323)..(323): n is a, c, g, or t
  misc_feature (339)..(339): n is a, c, g, or t
  misc_feature (391)..(391): n is a, c, g, or t
  misc_feature (403)..(403): n is a, c, g, or t
  misc_feature (408)..(408): n is a, c, g, or t
  misc_feature (459)..(459): n is a, c, g, or t
nttaatatgttgctgctttttcatgttattcttggaggtgaacgagttctcagcctgtgtgntccgaccatcccattaactttgaagtttctcttgattaatagaagaaaannnnggggggtggggaaaaggaggnacatgctaaaaaccttatgacaatcatccaaatntnagnnccngnccgccncttccccacctcccctttnncnttttnccccctntcnccctctccctcnnncntnnnnccttcctngctnnncctncctggccgtccctngnccccctgcncngccccctggttctcccnttntntnttntngtgntgccctgctggttgcnctgaccacttcccagatatctgacagttcgtgctcccaattttttgttccancagccttttgtnaaatnttactgcactgaaaggtaatgttggaaatggtgatgatctgggcttatgtnagattgtttattttttcataacacagccccagattctttctctcagttacagcctcaggcaaaccacgttctggttggtgggttctgcagggatctctcccaccactgagcctctagtcccaaaaccatccttgacaacatcgtgtgtttgttacttccctttgcccacctccaggccacctggggaagcccacaggcagccaagaccctgaaatgaaatgaacacaaagtctgactcggta

SEQ ID NO: 679375 - DNA, 411 bp, Homo sapiens
ggtcgactgccagaagacgttattcttatatgcgtggccagattctacatggcgtaacccggtttgtccgtatcccttttttatttcgacccgggcagccgcaaagccactcggttgcacaggtagatccccgccagggtcagcccgccgcccaggcacatgatcagcgtcaactgctcgcccagcaatagcgcgccgaggatcaccgcggtcaacggattgaggccgataaacacgccagcacgcgttgcaccgatatgctggatgccgtcgtaataccagatataggccagcgccgaacccaggccgccgaggtagaccaggctcatcatctgttgcggactcaaggtttcgatgaccgcaagactcgcctccccgcgcagccaggtggccagccagagcatggccgta

SEQ ID NO: 679376 - DNA, 677 bp, Homo sapiens
cagcgtgactcggtatcgagtactgcgcgacgatcctcagagacaacgtgacaagagcgcctgtaacggggcttgtgaggtgacgcgaagtccccgaacgatgacgggtgcaacaattagcggccttcgcgcgtgtgggtctcagtctcataacatgagcttgctgtcggaaatgatgagaaagtggtgccagagtgagcaagcgacgtctggcctcttggaagatgccacaacgcagccttgtgagtaacgatttaacttgggccggttcattgaaaagccgtgtgtattgatatgaaacagctgttctcaacactacccaaatcgttttaatagaaaacattttgcaacgatctagcccttctatgagctagatggaaagaggttgctgatgtatgataaagttagaaaatcacacatcttgtaaattctcatttgcttaaaagaaatcagtagaaaataaatgtcttctggagacgacttttggaaatggagttgttaacacggcctctggaagcgagacgtccacgtttgttaagtggtttagaggacatggagctggaagacctgagaaggatgagaagaagcttctgtgccagactggtcatatttagaggacattttcatattctctccattgttttgtgtgcatttcattcctcactactgtgtatatg

SEQ ID NO: 679377 - DNA, 301 bp, Homo sapiens
ggtcaagagactgccagtcagtacgagccagatgtatccagatgaggtacacatgttagggataggcgacggaacgcgggccatgccacaatctgagataggcgccttgagtacttactgtggcctttaacactgcttagaatctattggtggaaccggtatacgacatgggtcatgcatgaactctatgtatctcatgaaggctatccgaagctgaaatccttgcgacccgacgagctacctgtgtatactgatgctccacggatatgtatgaccacagtgatatgatgcttagggaggg

SEQ ID NO: 679378 - DNA, 880 bp, Homo sapiens
  misc_feature (6)..(6): n is a, c, g, or t
  misc_feature (68)..(72): n is a, c, g, or t
  misc_feature (106)..(106): n is a, c, g, or t
  misc_feature (108)..(108): n is a, c, g, or t
  misc_feature (110)..(110): n is a, c, g, or t
  misc_feature (124)..(124): n is a, c, g, or t
  misc_feature (150)..(150): n is a, c, g, or t
  misc_feature (164)..(164): n is a, c, g, or t
  misc_feature (179)..(179): n is a, c, g, or t
  misc_feature (181)..(181): n is a, c, g, or t
  misc_feature (188)..(188): n is a, c, g, or t
  misc_feature (199)..(199): n is a, c, g, or t
  misc_feature (219)..(219): n is a, c, g, or t
  misc_feature (222)..(222): n is a, c, g, or t
  misc_feature (226)..(226): n is a, c, g, or t
  misc_feature (238)..(238): n is a, c, g, or t
  misc_feature (250)..(250): n is a, c, g, or t
  misc_feature (262)..(263): n is a, c, g, or t
  misc_feature (268)..(268): n is a, c, g, or t
  misc_feature (272)..(272): n is a, c, g, or t
  misc_feature (318)..(318): n is a, c, g, or t
  misc_feature (324)..(325): n is a, c, g, or t
  misc_feature (336)..(336): n is a, c, g, or t
  misc_feature (344)..(344): n is a, c, g, or t
  misc_feature (348)..(348): n is a, c, g, or t
  misc_feature (355)..(356): n is a, c, g, or t
  misc_feature (372)..(372): n is a, c, g, or t
  misc_feature (380)..(380): n is a, c, g, or t
  misc_feature (382)..(382): n is a, c, g, or t
  misc_feature (388)..(388): n is a, c, g, or t
  misc_feature (391)..(391): n is a, c, g, or t
  misc_feature (402)..(403): n is a, c, g, or t
  misc_feature (411)..(411): n is a, c, g, or t
  misc_feature (442)..(442): n is a, c, g, or t
  misc_feature (474)..(474): n is a, c, g, or t
  misc_feature (486)..(486): n is a, c, g, or t
  misc_feature (528)..(528): n is a, c, g, or t
  misc_feature (732)..(732): n is a, c, g, or t
  misc_feature (754)..(754): n is a, c, g, or t
  misc_feature (757)..(757): n is a, c, g, or t
  misc_feature (760)..(760): n is a, c, g, or t
  misc_feature (766)..(766): n is a, c, g, or t
  misc_feature (772)..(772): n is a, c, g, or t
atttcntgaaaattacagtattttgtaaacataagatttacagtttaaccatacacaaagcctatttnnnnntttcttgacagaataaattacttttcttcaaaanantngtcaagtgcaattntgcccaatatttaatgcatactaganttaaagcctatganactaagtagtaacanangcaattntcaaacctttnatttgaaaacattcactttnaantttnatttcttatttngccccatttaanaacattactttnnttganaatnacccaattaagcagttaacagtgttggataataggggacaggggangggggnnggggggggggnggcgaagnggtnaagaggnntgcgatcgaacgagancgagagancnacagangcncacagcaaacnntgcaaacntccagggtgacctgtgtttcagtggaaagcnttgcgacagttcctcttatctcattgtttgcnctctgtataggntggggctctctttagcgatgcacacaactttgcagcactgtnagagtatgaggacaaagtcctaatctggcttgcgcggcctctcacctctgtggtgctctgcatcgtggtgcttcttgtcatcttttattgccaagtgagactgcccactcagagcactagacagcgcaagaaggccggcactgcccccgaggggcgggattccaggaggctgaagtcccgaagttgagggcgtaaggggaactnggggtccgtggccatgagaaanatnctnagcttncaactnctgctgtgtaggaggtagacctggtaggccacgtaccccgatgatggcattcaactctgccatggtcacctgtttggcacgttcaacagcctgggccacctgttgttg

SEQ ID NO: 679379 - DNA, 339 bp, Homo sapiens
aagctcgggaccgactactgcaccactgtcacaccttttaggatggctaaaacttaaaaaacaacaatattaaaactgctggtgaagatgccaagtaactgaaaccctcatactgttggtgaaagatgcaacaagtggtagatccactttggaaaacagtattactctgcaaaaaaaaagagaagaaaaaagaataagaattgatacccactacaacatgaattaatcaactgcattaggctaagcgttagaagccagactcaaaaggttatacacaatttctaaacacgacttctgaaaaggcaaaactataggttgggaggacagttcaggggtttg

SEQ ID NO: 679380 - DNA, 564 bp, Homo sapiens
attaggcttctgagtgggctatgtcaaatattgggctattgagtggtcagcgttctccatggtagccctcaggcagccggatgtcagctgtgtagtgataggcgcttgttgatttcctctgtggagatcctgctgtgagggatgtatgcgcatacgcactctcactgtagactgcacctcatcctgatggacgtggctgaagcctgtgtcactctccccatcagacactatcttcaagtcctcgtgcacaatctctggtgcagagctgatgtgggccccgtgcagaacgaagttccccagtgagcagcacgtgtgggggcctctccagggtcactgccgtcatcaccaccattctcatccaggcctatctgctcaggggcaccattggtcttgtggcttagaactcggttgtccaccacgcggaaagctggcctgcctgagtcaggcatcgacgaagaccgaaggcttgcctcctttttgtagcttaatctcctttagtgccaatattgcagtagtgtcaggcacgttttgtggatccgctccccagactgaggaagactggtg

SEQ ID NO: 679381 - DNA, 1636 bp, Homo sapiens
  misc_feature (15)..(15): n is a, c, g, or t
  misc_feature (117)..(117): n is a, c, g, or t
  misc_feature (131)..(131): n is a, c, g, or t
  misc_feature (134)..(134): n is a, c, g, or t
  misc_feature (138)..(138): n is a, c, g, or t
  misc_feature (585)..(585): n is a, c, g, or t
tggctggattcagcnactctcttactacaacaaggctgtttcgtttcggtcgtctcacccagaccgctaggtgtgggttggtagaataatgttcccgcgcctgctctcctctctctngcggcggtctatcnttnttgncggggtagagattaccgcctgccgctccccactccccctcgccgcgctgaataatagttgatgtggtgtggcgtcgacaacgcccaccctccgccttgttcgcctcgctcgctgttctacagaataagttgtgttgtccttcctcctttatgtacacctagggcgttctcccaccacaggagagtcttggggttgtcggtctgtttttgccacaaacagggcgccacccaaacagagaattggggcggcccccattaacaggggggggggtagaaccacaccccccccacacgactttttttttgtagcccgccttgtgttgggtggaaaccccccgcttattagggcggccccctcctctctcttgtggtcaataaagacgtgttggaaaaaattggtgagcccgcccacaacaaaaaatgtgggttgataaaagggccccttttnttatataagtgtctcccccaccgcgccgggaacaccaccttgttaatagtccaccaaagggggcgcttttctcctaataaattttagagtggccgccgccctcctcccccaggaggacacaccggggtttttgttgtgcgcgttggttgtgaccgcccaaccggcggcgcagctcttcttggggggaaaaggacaccacaacatttgggcggggaaaaatttttttgggggaaaatattattctctttggggtggtttataataggtgtggcccccccaccaaaagattatacgaggtctccttgggagagtgtgggccttttttatcgccgtccgctgtgtcgtttgccaacagacaacaactctcaaaacccgctcgcacaattcccccctcttagagccccgctgcgagttatgagatttaaaagagagagaggggtgtcctcccgcctcccacagagagaaacacccaccctgcggtggttttaggaagacgcacactctggagagggcactctttatagagacctcgaccacatgtggggtttacacatgttcacggggagcgcgcaccttatggctgcacacacatatatgagacatatattttatacagatgtctatacaggttagtaaattggatatatgtgaaaatattcacatttcttctcacacatgtgcacatgaaggccaccacattttttgaggtatatttcacatgctgggctggtaagagatttctgtatattatgcacccaaagaatattggagaacactttctcactcacccaccacgagaaaggtttctcgtttggaacacaccacctgcacattatgagaataattttcacatactgctttttccctcacaattaaatttttgttgtttaaatgttgaatgtcttcacattggagatgggtcaataaatggttccactggaacctttcaaggacaccacactgtgtaatggttttttgtatcccctacccccaatatttcgctttgctcattttttttgcagcttcctataaagtttgttttcctcatcca

SEQ ID NO: 679382 - DNA, 422 bp, Homo sapiens
  misc_feature (153)..(154): n is a, c, g, or t
  misc_feature (191)..(191): n is a, c, g, or t
tagcactgctgctctccagaactctcgcagcagagctgaccaagtatgcaccataaccagtggccagcgaggggctcaatagctacaccaagcattccacataaccgagaagctctctccatcagcatagcctccgatgaccatggtgttcanncaaagggttcatcttcgagcgccggctgtacatggcnctggtcagccatgaatgaatagctctaggactatagctgtgtccatctcccagaagctcctcatcaatcaccatctggccgagaacttgcttcaaatactggaaatcagcgtagtccgcagaggcacccagcatggtactgttgtgactcgcataatgcgagagatttttgggaaaccgagccaaagagccgttggatcccagcatgtttgcggcaaacaccaacccgccc

SEQ ID NO: 679383 - DNA, 117 bp, Homo sapiens
ctttctgcggctgttctagaggatcccggtaaagcctcaggcctgcctcacaccaggaggcagccagagccacgtacaggtggtgcccccagatcatacagcagtgggcacagtgga

SEQ ID NO: 679384 - DNA, 255 bp, Homo sapiens
ctgtgcaattactctgcattaatgtaagcaagctgaacattttgcagcttgctctctggtgggcatgtgggactgtttctgcatttgtgactgaaagtgctttcctggaagttagatgaattgtacggcacttgtgctgtaaatgccgcttccctcaagagtaactacaatcttcccatgcacaagatgattaatacatgctacttagcagaatctatgacatgcccagagatccaaaattttttccttcgcgca

SEQ ID NO: 679385 - DNA, 318 bp, Homo sapiens
ctgtttggtcagatactgatctcgatggtgtcagctgatccattgagttcagggtctgcaacatatctggagcacagatcttaggttttacaatagtgatgttgtccccaggagcaatttggggaggttcagactcttggagccagaggctgtatggcccctaaactgtaatttctaatcttgtagctaatttgtcagtcctgcaaaggcagactggtccccaggccaaaagggggtcttttcaggaaagggctgttaccaattttgtttcagagccaaagcatgaactgaattccttcccaaagttagttcgggcta

SEQ ID NO: 679386 - DNA, 209 bp, Homo sapiens
gtttaaccggtgtagccaggatggtcgcgatcttctgacctcatgatccgcccacctcggctcccaaagtgctgggattacaggtatgagccaccacacccggcctttttttttttttttttggaaagggattttcttttttgtggcccaggttggagtgcaagggtacaatctgggttcattggaaaccttctgtcctccgtgggttc

SEQ ID NO: 679387 - DNA, 931 bp, Homo sapiens
  misc_feature (17)..(17): n is a, c, g, or t
  misc_feature (28)..(28): n is a, c, g, or t
  misc_feature (37)..(37): n is a, c, g, or t
  misc_feature (43)..(43): n is a, c, g, or t
  misc_feature (53)..(53): n is a, c, g, or t
  misc_feature (58)..(58): n is a, c, g, or t
  misc_feature (272)..(272): n is a, c, g, or t
  misc_feature (312)..(312): n is a, c, g, or t
  misc_feature (343)..(343): n is a, c, g, or t
  misc_feature (355)..(355): n is a, c, g, or t
cacctttagttacctcncgcggcgacangcctggaanagttanctatctagcngagcngacacacggcaatggcaagcctcactggcaggctcagcacttaagcccagccttcccaccatgcatctaagcttgcgatctcatcagacccaacttcaatcataaataactgagacgatgccagaggccagaatctttgagaacccaatgtgctgtcatcaccatggctgaaacaaggcgctaggcatctcgctccgctgagcagcgagaaacnaccaacagagcccaatgatgctaagccaaaaaggcacaanagcatcaaggacagacactcgagataaaacnaggctgggaccnaaaaacaacaaaaagacgagaagaatagcaggagtggtgactactttgacacaggaatgctataaacaaatggcttttttctggtgcctttcaacaacttctgggtctaaccaccagccaaagatgacagcagaacaaccataattaccactgcgatccatcttttcggctgacgggcgaaaaaatgaaaatgccctgacaatcccactgctggcttctgaggaaaccgtctcagcccaaggcttttggtaggggggaatacgggaattccaaaaaaaaaacccacgctgcccctgggtctccatttcaaccatctgatggagttcaaccacggggcgagcagaactgggtcccattggaagggaaccggccaaagaatctcgacatacaaatcgtaccaaagaacccacctttacccaaagaaccccctttaatgcgcttcacaagccccaccccataaaacaaacgaaaaacaaaaacggagaggaagtgccacaccaagggggacccttgtcgacatgacgggccaaatcctaccgttataaataaaatttctgtaaaccaaaaaagacataa

SEQ ID NO: 679388 - DNA, 1106 bp, Homo sapiens
acttgaaaagagacaagttctggccaggcgtggtggctcgcgcctgtaatcccagcactttgggaggccgaggtgggtggatcacgaggtcaggagatcgagaccatcctggctaacacagtgaaaccccgtctctactaaaaatagaaaaaattagctgggcatggtggcaggcgcctgtagtcccagctactcgggaggctgaggcaagagaatcgctggaacccaggaggcggggcttgcagtgagccaagatggcaccactgcactccagcttgggcgacagagcaagactccggctcaaaagaaaaaaaagaagaagagacaagtgctggacttaattaagtgggagacctcgggtgggtcaaaaaagcctgtagtggtggcaagggtggatgcagagagaccagttgggctacggaatggaatataggtgagaatcggatgtcggtttggattcagagtgctaacgggtagacacatgaagcagtggggtaatgggaaatatgtggaaaggcaaactggagcatggggatgcggggaatgagagggtaatcagaagaggatcccgggcctgtgtgcaggggcgtcatgcctgtgatcccagcatctggggaaggcaaggtgggaggactggtggacatccaggacgttggaagacccgccggggcaacagtgaagaccccggtctaacacaaaactacaggaaatagggtgtggggcatgccctggaagcctaagctccacacagggctgaggccaaagggtccccaactagcaaagacggtacacacctttacacgaacaaaaacaaaagatcgtccacacaaaggagaggaccccagagtctgggagaacgtgcacaccaatcacaagcggcctgacacaaagaaagcgccgacgcggggcgggccaccactgagggaggagagcaaacggagaagggaggacgcgcagatacggagcacgtacaaaacaacagcacgagcgaacaagagaggccgatacacaaggcgggggccagagcaacacaacaaggcgggctgaccaccaacgcgtcataagcaacaacaactagtccgagcaaagagaagggcgcaaggaga

SEQ ID NO: 679389 - DNA, 854 bp, Homo sapiens
cccggccaggtgccccttccgagagccccgggacgggttagcagcccacgtcttgtgaaagccgacccctcagcggtgatcaaagactccccaaccggtggctccgaatgcgcctaaagcccagacacatgggtgctggcctaggacaggggacctcacagggacatccggggcctcggctagctagaggtccgccggacctaacgtttcctctttaggtcccctattttcaggaccctagtccgccaagggaacacctcgttcctgtcttgacccatacggtgaatccttcccctataatcaacgtacgggcccccccccccttcaagctttctgagatcaccggtcccgaaaatgttcctcttgaaacgtctttgtaacaactacaacctgagaatttttctctttaagcttaccccagaattcctccattattccaatcgaccttatacccgtgctaaaactccccccagtgataatgtttaaatctgcaccatgtaaaccacaaggcgtagatatcccatttatatttcgaaaaccttgccgaggtgagcctcaactggtagtccacacgcacctgatcccctccacttccccgaaatattgaagtttaaaatgtacagtgcacattcctagcatcattctttaattcacttataccataaaaccttttttacacacaaaatctttctaaacaatgtgagtttatgcatatactcccagattattacacggcagaaggattattccaaatcaccagcggtctgccttttgaacaattactaaatcaatttttcctgctgcaacattcctttgtcaaacaaaccaaaaaacacacaactttaaacaaaaca

SEQ ID NO: 679390 - DNA, 216 bp, Homo sapiens
cttgtctatgtgaaataggagataccgtgtgtagctaggacgaaagggagtgagctctaaagtgcagcaaggacagtgcagaacaatggggcaattctctgatggtcttgacttgcagttatgactgcttattatgacctaatcaaaaagttggccagagaaggctgcaggccccactgacactgggcatctagaacagtgattgtctgcatggtg

SEQ ID NO: 679391 - DNA, 349 bp, Homo sapiens
  misc_feature (335)..(335): n is a, c, g, or t
tccactagtgtaggcccaccttatgaggccacccaggcatggcctgggcgcagcgacccgttctccagctatgtctatggttttgagctcaggacgcgacaactgtgtcggcaggtgctgatgttccactgctttcccgatgagccagacatggggtcggcgcccgtgctggtgcgccgactactgcttgaatatcggccatcgccactgggttatagcctgctgcatgctgcccatgaacaagccattgaccgggcggggaaggtacagagtcggccaccgttggagttcatctataacgcgttcgagctcgcaccggatccacggcgctatcnagccattgaaacaa

SEQ ID NO: 679392 - DNA, 103 bp, Homo sapiens
gactctagcaggatctcgcaggttaagggctacccagtgctggcacaggatctggacatcatagatgttcaataactctttgaaaaaattatttatatattga

SEQ ID NO: 679393 - DNA, 301 bp, Homo sapiens
ttgcccacccggtgccaggtctcttcccgcgtctatccagcgtcggcccgcttacatcccgcccctgttcctccggtgtggcctacaggagcccacacgccgctcacaattacccttaaacacctccgggtaagaagaggagaggaggatagccagccagaagagaagaagaacccggatgaactggaaacggattgcccgagaattggccagaagatgaccagccatattataagtgagtgaccctgcgaccccctctttggaccccccgccggatgaataaagcttcctgtgttgtgtg

SEQ ID NO: 679394 - DNA, 143 bp, Homo sapiens
caggcagatagcctgagctcacaagtttgagactagcctggggcaacatagtgaaactctgtttctacaaaaaacaacaacaaaaaacaacaacaaaaaaaacttgaaaattagcccagcatagagatgtgtgcctgtagtcc

SEQ ID NO: 679395 - DNA, 104 bp, Homo sapiens
ccatgtactgctaggggtgctcctggacttggacgtggggggctctgccttggcgctggctgtcagcacagctcagcccggccagttccataagttggtccatg

SEQ ID NO: 679396 - DNA, 122 bp, Homo sapiens
gccatccagactgaggagaccggaaacttaggggcacgtgagccacgccacggcccataaggaaagcaccggagcaccccgcgccgcgtaatactgtggtctgcatcacacagtcacttcgc

SEQ ID NO: 679397 - DNA, 152 bp, Homo sapiens
aacccagaacagcagtggggaagagggcaaaaggcatttagcacaaaatctcattaagaaatggacattcagggccaccggatagtgtatgaaacactcttataaaatctcaaggggctcccccaggttgggtcctggatacgggtttggag

SEQ ID NO: 679398 - DNA, 468 bp, Homo sapiens
gcggatgccgagcaggccccacaggcgccaggtcagcacgatcagctcggcgtcgatgtccggaccatcgaggttgaacacctcgaggccgatctggtggaactggcgataacggcctttctgcgggcgctcgtggcggaacatcgggccgatgtaccacaacttctgcggctggccaccaccggtgaggccatgctcgagcacggcacgcacgcaagcggcggtaccttccggacgcaaggtcagggagtcgccgttacggtcttcaaaggtgtacatctctttttcgacgatgtcggtcacttcaccgatggagcgcttgaacagctcggtgaattcgacgatcggcatgcggatctgcttgtaaccgtagttatccagcaggcgcgcgaccgtgttctcgaagtagcgccacagtggcgtctgctccggcaggatgtcgttcatgccacgaatggcttgcagaga

SEQ ID NO: 679399 - DNA, 478 bp, Homo sapiens
  misc_feature (343)..(343): n is a, c, g, or t
tttgggaatacatgtgaagagcgagggctctgccaatcattatcatcataatgaatattctaactaatattaatcagttactatgctccagggttgtgttcagtgcatcattcctattaccgcactaaattatcacagcgtcagaacaaggcctccgttttacggcttagggaattgaggcacagatgggctaagggagcacctgtagagcagggatgtggtttggtaacagagtgcatgctctttatactgctcttctgcgattattgtgaataaagcgcctacaagtgcctgtggaactgtaagtgccccatacaagatagcttttattaattttagggtnctcacggggcgcttacttagatttttgctgtgataattgataaagttcagctttcaacactccatatcaaattctgttactttagaagtctaggcaccaatcacgtctccgaaataaacgcaaggcattgcataa

SEQ ID NO: 679400 - DNA, 228 bp, Homo sapiens
ctgttctgctttggataggtctggcagtcagaccgggttgatgccatcgcaggcaagccagctcccacattgatttggttgagtcagggaaaccgggttatttccccggcaccagcgtcaaccgcgtcttcccatacaccccgtcaaagttctgcggctgcattgggaagctcaggtattgcgctttcaaccacgggtcgatgccattggcatagtccaaaggcagac

SEQ ID NO: 679401 - DNA, 824 bp, Homo sapiens
aaagaggcgggctgccggatcgaatgtagcccccggcgcctccccacattggtggtagtacacaatctgcggcgcaacccctgcaagcagaggcaaggcgaacatgccacaacgtgagggggggcgcacgcccacggccacacacaaccaaccgcatcgttgcggtagtgatcgcccaacactcacacatagccaaggtaggccggtccatacctcacctccccgggcggtcgttcgtagactccatgagacagttgattctcgccaatcatgccagccgccgacagcaccagggcaagctccatacaggaaccacgcctgggcgtaccgcccattctcaccacaccacacacaaggaacacacaactgtgcgcctcgccaagtaaacaacgtgcgcaagttgttgtgtcgccgcccgccctcacgagcacacccccctgggttttttttccgccccccctactccccttccccaccgccgctgtctttctatgaccacgcgcgtgcgtcaccacccgcgcctgggccttgcggcccctccacccatcctcggtaagggtcgcgccccgcggcggcttcttgtcctccccccccccatgctcacagcgcgacacgcgaatgtccgcaccctgcttctcctctctcttcctctcacggaaagaatatttctccaccaccccaagtgtgctctcgcccgtcgtcgcgggcgcaccttcccaccaccctccccgccccaccccctcttgtcctcatcccccccccaggagaggggggggggggggggcattttttttcctccccaaacattttttttttttcaaaca

SEQ ID NO: 679402 - DNA, 111 bp, Homo sapiens
cacgcgtcgactgagttaattacttctcaagtctgcatgagaggtgatgagttattaaggagaagattctataattgagagacaaataatggaacacatgagaacttccag

SEQ ID NO: 679403 - DNA, 1639 bp, Homo sapiens
  misc_feature (1639)..(1639): n is a, c, g, or t
gaagtaggtctactgagtacgctacttcccctatcatagcaagagacttatcacctttcatgatcacgcccgtcataatcagtcatccgttatcatgcattcctagttcctgtaatgcccgttttcctaacacatcatcacacaagaacgtaactacactactcaacattctcacgcacagtctcagcgcagacactcaggacaaccggtctagacactatccgtgcccgctcactcatgcctagctcctcaatcgtccctgcccactaccctaacgacataccttctacatacacacgaccgcaggtcaactgatcccatccccttcaccactcacaactcaactcgcgccacccacacctcggatcacactcgcaacccctcaccgcagatacacccagaactgtaccgcgacgcgacctaccattcgtctcccacatccctgaccactcagctctcccaccccactctgattctcccataccaacccacgacgcgcacccatagccgcaaactcacctatgcacccgcttcagacccacatccccgcacgctaacgtacctcacccccgactcccgacacgcccccccccgactcccgccacctaacaccgacactccaaccaatcccacccaaccgcacccgcccacagcgccaacctcccgaatcagcaagacctcggtcacacaccaccacatcccaccgcgcctcgtacgcccaacaccccagcactccgaccacgccctcccacccccgaagcaccccgctacattcaacacaccccccaaccaaccagcaaccgcacaaccccacacgccgccttcacccacaaccgagacccccgcgcaacgcgcctcactcaccctcacccgggccccaacaccacgccccccatgcacccctccccaccgaagcgcacgcccaacacaccacacccacgcacaacccactccgcacgccaacacacgcaccccgcaagcacaccttctaacctcaacaccacaccctcacccacacacaccaccccaccccgcacccacactcacaccagcggcccccccgcccaaatccccacaccaccctccaccaccgccacacaccccccgaccgtcactacaacccccaccaccaccgataacgcgaacggccacgcacaccccaacccaccacgcgcaacccacacccccacacaccaccacacccccccagacggcccccaccacacacacaccacccagcgagcgacacgcagcgcaacaccagccaaccgcccgcgccaccccgaccaaactcacgccccaacagcgcgacaacacacacacacaccagcacaacaccaccaccccacccgcacccccccgcgacacccccgccccgcaccaaaacacaccccacacgaaacccccccaccccaccccaccaccacacccacacccaccacccacccccggcccacccgctaaccaccccacggccccacccaccacacaccccaacccgcccacccaaccccccaccccccacaccaccccacccaccccccaccacaacccccccacacacccccccccccccccccacacaccacccaccgaccacaccacacccgcccacacccaccacccccacaccaccaan

SEQ ID NO: 679404 - DNA, 146 bp, Homo sapiens
tagaggatccccgtcgctgcccgctgaccgggcaatacacccactactcgctggacaagaaaacccacaaaccggattacgtgactgatctccgcgcgcttccgccaccgctctgggccaccggggtgaaaacctatgacggcgcg

SEQ ID NO: 679405 - DNA, 253 bp, Homo sapiens
ttctagcaatcatgacataaccccacactgacacagcacaatttgtctcttcaattctcacagatttccatagcattattttataagcgcaaaggtatgcatctttatcatacaggtaccagcagttataacgggcacaataattcaagtcacgacagttaccaactctactcaatacgattaccaaatgcacgcacagcaggattatcaagacgcacaatcgtccagagcaccacagaaggagtcggccatg

SEQ ID NO: 679406 - DNA, 514 bp, Homo sapiens
gggaggcctcaggaaactgacaatcacggcagaaggcgaaggggaagcaggcacgtctggccatgttggagcaggagagacagagagagtgaagtgggagggctgcacgcttttaaacaatcagatcccacaagcgctcactcaatatcacgagaacagcaagggggaagtcggcccccatgagccaatcacctcccaccaggtccctcccacaacactgggaattacaatttgacatgacatttgggtgtggatacagagctgaaccatgtcaggggtagttcaaccgctgagattgattgattgattgattgactgagatggagtcctgctctgttacctaggctggagtgcagtggcacaatctcggctcactgcaacctccgactcccgggttcaagcgattctcctaggttcaagcaattctcacacctcagactcccaaagtgctaggattataggcatgagccaccgcacccagcctgaccagctaattttaaaaattttttgagat

SEQ ID NO: 679407 - DNA, 479 bp, Homo sapiens
  misc_feature (6)..(6): n is a, c, g, or t
  misc_feature (9)..(9): n is a, c, g, or t
  misc_feature (12)..(12): n is a, c, g, or t
  misc_feature (65)..(65): n is a, c, g, or t
  misc_feature (73)..(73): n is a, c, g, or t
  misc_feature (82)..(82): n is a, c, g, or t
  misc_feature (130)..(130): n is a, c, g, or t
  misc_feature (138)..(138): n is a, c, g, or t
  misc_feature (334)..(334): n is a, c, g, or t
  misc_feature (352)..(352): n is a, c, g, or t
  misc_feature (410)..(410): n is a, c, g, or t
cctggngtnggntccgaggggtccgtccaccaaggagcccgcgtcccagtctatgccgtatagcntgctgggntgtgtcccntcaggcacaggttggtagacggtgacagcttgtgctgggcatatcganggagcaancggccgtgagtgtctggtgtgctgggaggggcgcttgctctgcagaggaaatagccacgtccagagaacgtcctccatggatgccctccgtcctccgtgtcacttggtgggcgctgtcggggccgcgtcctccatggctgtcctccgtcctccgtgtcactcaggtttgctggggctttcactctgcggcacgaantgctcaacttcgtccaanaatattcaatactacatgatgttcgaagtgatggaaccgacctggcacatcctggganaaaaacctgaaatccgcctccaacatttgacgacgtccttggccaccacacaggcttcctggacacctg

SEQ ID NO: 679408 - DNA, 120 bp, Homo sapiens
  misc_feature (29)..(29): n is a, c, g, or t
  misc_feature (47)..(47): n is a, c, g, or t
  misc_feature (73)..(73): n is a, c, g, or t
  misc_feature (110)..(110): n is a, c, g, or t
gatctacaatgggaagcttgtgagtggcnatctttgttggctacgtnctttggtttgatgcagtcatgtgcanatgagacctttgctgagatgcaaataaagtaagagantgttttcctg

SEQ ID NO: 679409 - DNA, 137 bp, Homo sapiens
tgccttgaactctgccaggatttacctgtcgcctttgacacggctctccaacctgttggtgcctcagtctactgctccagtcttgcctgcaccaaccacaacctgcttcaaccctgaggattcttccacctaccagt

SEQ ID NO: 679410 - DNA, 435 bp, Homo sapiens
  misc_feature (79)..(79): n is a, c, g, or t
aggtaggagaactgcttgagctcaagagttcaagatcagcctgggtgagatctcatttctactaaaaaattaaaaaaanacaaacaaacaaacaaacaaaaaactgggcatcgtggcacgtgcctgtagtctgaggtgggagaatcacttgagcccaggaactcaaggctgcagtgagctatgttcatgccactgcactccagcctgggcaacagagcaacacgctgtctcaaaaaaaataaaaataaaaataaaaataaaagccctgctggcgattctaatgtgcaaccaaagttgagaattgatgccttaaaatcattgctccaatggagggaaactgggagatgggtgctccaaaacagcaaaagactctgaaagtcacacatgatgtgaccacaggtgtatacatagaaaaaaacagggagaaccaaaaaa

SEQ ID NO: 679411 - DNA, 1184 bp, Homo sapiens
  misc_feature (31)..(31): n is a, c, g, or t
  misc_feature (35)..(36): n is a, c, g, or t
  misc_feature (39)..(39): n is a, c, g, or t
  misc_feature (44)..(44): n is a, c, g, or t
  misc_feature (115)..(115): n is a, c, g, or t
  misc_feature (125)..(125): n is a, c, g, or t
  misc_feature (143)..(144): n is a, c, g, or t
cctcggagcgggctgcgtcaggtggctggcnggcnnggngcggngctcccctgctctctggctccgggctgcggcgcggcggctggagcgagcccctgtcccggcgcggggcggnggcgggcggncggcaggcgctgccttgnntgtgagtgcacctcactcacatgtgctggagaatctggtaaaagcaccattgtgaagcagatgaggatcctgcatgttaatgggtttaatggagacagtgagaaggcaaccaaagtgcaggacatcaaaaacaacctgaaagaggcgattgaaaccattgtggccgccatgagcaacctggtgccccccgtggagctggccaaacccgagaaccaagtacagagtggactacatatctgagtgtagatgaacgtgcctagactatttgactataccctacccgaatactatgagcatgccaaggggtctgtgggaggatgaaggagtgcgatgccatgatacgaacgactccaacgagataccagctgatatgacttgtgcccagtactatcctggacacaagatcgacgatgaatcaagcatgctgactatgtgccgagcgatcaggaccatgactatctgctgccagtgtcctgacttctggaatctattgaggacaagtaccaggtggacaaagtacaactaccacaatgtatgacgtgggtggccaacagcgatgaactgccgacaagtggtatccaagatgcatatcaacgatgttgaatgccctcaataatactgaggatagacagcaagcagcatacaaaatggatcatccagggaaggacacaccaaaacaaccggcatgatagaaggatctaagcctcatcaagagcaatatggaaaaagcaggatggcatggacaccacaacaagtaggaaacaggatcctacacaaggaagagacagtagcgaggagaaaagcccatggcggggaaagcggaaacatgggacatacataaggcaaataggaccggaagaaaaacactgagaaagaacacccgaggacgatagcgacacgagtaacagatgccaacaaacacccagacaggaactgacggataccatcgccggtggacgggggaaaagtacacaacacagcagagacaggaaagccggcacaacgagacacacagagagaggcagaaagagcccgaaacg

SEQ ID NO: 679412 - DNA, 783 bp, Homo sapiens
ttcctggcctgtagaaatcattatacatgccttgacaacaaaggaagttcattaagataagccatgtcggctttttcctctactagatacagattggtaggtagatgaatatttgccattatggacatcttagacaagtgctagtcagaaaagactaactgttttccagcttctcaaaaagccatggagagtagatatacctaatacccacagggtaagatatataaccttgtaaagtctcactttctagttgtcccatgcaggggcttgaaatttgattccaagcggaaagtatattatgttttttcaggccttcacatctagagagatggataacttccaatcctgatttttcaggtaatataaagctgctagtggattttaacccctgcctaaagaagacatatacttcatttgggagcaaatacttattgccttgaacaagtagcactgtcatagcctatgataattagttgtagaataacctgttatccctttcaaaactatgcaaattaattaaataagtgtaaattaggattcaattaaagatgagattgattatattgcaatcagatggaccattcacatacttaactggagcatatacaaatatattagtctatagttttgtatgctaacagaaagatataatttagcatacgtattcataaaaatggtgaatattattaatattgatataataggagtgggaagactgcctccttttttgaagagagagattaaggatttttataattgtttttcactactctaaggtatatt

SEQ ID NO: 679413 - DNA, 515 bp, Homo sapiens
  misc_feature (246)..(246): n is a, c, g, or t
  misc_feature (257)..(257): n is a, c, g, or t
  misc_feature (266)..(266): n is a, c, g, or t
  misc_feature (269)..(269): n is a, c, g, or t
  misc_feature (274)..(274): n is a, c, g, or t
  misc_feature (279)..(279): n is a, c, g, or t
  misc_feature (290)..(290): n is a, c, g, or t
  misc_feature (293)..(293): n is a, c, g, or t
  misc_feature (295)..(295): n is a, c, g, or t
  misc_feature (302)..(302): n is a, c, g, or t
  misc_feature (306)..(306): n is a, c, g, or t
  misc_feature (308)..(308): n is a, c, g, or t
  misc_feature (318)..(318): n is a, c, g, or t
  misc_feature (323)..(323): n is a, c, g, or t
ctccgccacaacagtcgtagacgctaatgcagaaggacaagcaggtctaccgggccacgcaccgcctgctgctgctgggtgctggagaatctggtaaaagcaccattgtgaagcagatgaggatcctgcatgttaatgggtttaatggagacagtgagaaggcaaccaaagtgcaggacatcaaaaacaacctgaaagaggcgattgaaaccattgtggccgccatgagcaacctggtgccccccntggagctggcnaaccccaanaancattncagantggactacatnctnantgtgatnaacntncctaactttnacttncgctcccaattctatcagcataccaatgctctatgggacgattaacgacttcattcctactacgaacactccaacgattaccatcttattaactgtaccccatacttgcctaacaagatcgactttatcaaccaacctaactttatccctatctatccaaacctactttgcctaccatatcctcactttcta

SEQ ID NO: 679414 - DNA, 647 bp, Homo sapiens
  misc_feature (31)..(31): n is a, c, g, or t
  misc_feature (35)..(36): n is a, c, g, or t
  misc_feature (39)..(39): n is a, c, g, or t
  misc_feature (44)..(44): n is a, c, g, or t
  misc_feature (115)..(115): n is a, c, g, or t
  misc_feature (125)..(125): n is a, c, g, or t
  misc_feature (143)..(144): n is a, c, g, or t
  misc_feature (247)..(247): n is a, c, g, or t
  misc_feature (258)..(258): n is a, c, g, or t
  misc_feature (261)..(261): n is a, c, g, or t
  misc_feature (378)..(378): n is a, c, g, or t
  misc_feature (389)..(389): n is a, c, g, or t
  misc_feature (398)..(398): n is a, c, g, or t
  misc_feature (401)..(401): n is a, c, g, or t
  misc_feature (406)..(406): n is a, c, g, or t
  misc_feature (411)..(411): n is a, c, g, or t
  misc_feature (422)..(422): n is a, c, g, or t
  misc_feature (425)..(425): n is a, c, g, or t
  misc_feature (427)..(427): n is a, c, g, or t
  misc_feature (434)..(434): n is a, c, g, or t
  misc_feature (438)..(438): n is a, c, g, or t
  misc_feature (440)..(440): n is a, c, g, or t
  misc_feature (450)..(450): n is a, c, g, or t
  misc_feature (455)..(455): n is a, c, g, or t
cctcggagcgggctgcgtcaggtggctggcnggcnnggngcggngctcccctgctctctggctccgggctgcggcgcggcggctggagcgagcccctgtcccggcgcggggcggnggcgggcggncggcaggcgctgccttgnntgtgagtgcacctcactcacatgtgctggagaatctggtaaaagcaccattgtgaagcagatgaggatcctgcatgttaatgggtttaatggagagggcagcnaagaggacccncangctgcaaggagcaacagcgatgcagtgagaaggcaaccaaagtgcaggacatcaaaaacaacctgaaagaggcgattgaaaccattgtggccgccatgagcaacctggtgccccccntggagctggcnaaccccaanaancattncagantggactacatnctnantgtgatnaacntncctaactttnacttncgctcccaattctatcagcataccaatgctctatgggacgattaacgacttcattcctactacgaacactccaacgattaccatcttattaactgtaccccatacttgcctaacaagatcgactttatcaaccaacctaactttatccctatctatccaaacctactttgcctaccatatcctcactttcta

SEQ ID NO: 679415 - DNA, 315 bp, Homo sapiens
ctccgccacaacagtcgtagacgctaatgcagaaggacaagcaggtctaccgggccacgcaccgcctgctgctgctgggtgctggagaatctggtaaaagcaccattgtgaagcagatgaggatcctgcatgttaatgggtttaatggagacagtgagaaggcaaccaaagtgcaggacatcaaaaacaacctgaaagaggcgattgaaaccattgtggccgccatgagcaacctggtgccccctggctgtccacctcctctgtgctgtccacctcctctgtgctgtccaggcaggggacctcctgggctgtcca

SEQ ID NO: 679416 - DNA, 1070 bp, Homo sapiens
ggagagccccagccacgccggcccagtgtggcctcagcgagggatgcggagacgcccctgaacgaccatggcatcgtgccgacgagctgaccttccatgaattcgaggaggccactaatcttctggctgacaccccatgatgcagccaccaccagcagaagctgatcagctgaccccacaatgggcacgtggctgtggccgtgggctcatggtggcaagctatggagccgaggatgaggtggaggaggagagtgacaaggccgcgctcctgcaggatgcagcagcagcagcagcagacgggattctggaccttcagctactatcagagcttctttgacgtggacaacctcacaggtcctggaccggatcaaaggctcactgctgccccggcctggacaacaactttgtgcgggcaaccatctgcggaaatcggccggatctgtatggcccccttctggatctgtgccacgttggactttgtccatggccgtcaacttgggaactgacgcctggttgctgagccagaggagggacccctacatccactacaagaccccagttccaccaaggttgaaccgtggcaggcatcagcaatctactgctatagcgtggctggtgccccgtggaccctgtggaggcttcctgacggtggcgcaagggtgtccaggagcgcatggggccataaccatttcctgtagactgtgtgcatctacgggcgtactccctctttggcttcatccccatggtggtccttgttggtcgatccctgtgccttgggttgcagtgggtctttgggagcggctggccctggggcctgtcagcgccgggctggtattcacccttctgacgcgtggtccgtgaggaacaaccatggcttggtgggcaaaagtggttgaatgtacggggagcagtacattgatccacgcccctcctgggccatggtgctggtaagttgaactcctcagagtcgctacgcctgacacaggtggatcctagagccaaattcaatccttgcctcacaatcgggtgcccctatttcagaatcgtgcccttctagaagccggtccaag

SEQ ID NO: 679417 - DNA, 359 bp, Homo sapiens
  misc_feature (159)..(159): n is a, c, g, or t
  misc_feature (170)..(170): n is a, c, g, or t
  misc_feature (173)..(173): n is a, c, g, or t
ctccgccacaacagtcgtagacgctaatgcagaaggacaagcaggtctaccgggccacgcaccgcctgctgctgctgggtgctggagaatctggtaaaagcaccattgtgaagcagatgaggatcctgcatgttaatgggtttaatggagagggcagcnaagaggacccncangctgcaaggagcaacagcgatgcagtgagaaggcaaccaaagtgcaggacatcaaaaacaacctgaaagaggcgattgaaaccattgtggccgccatgagcaacctggtgccccctggctgtccacctcctctgtgctgtccacctcctctgtgctgtccaggcaggggacctcctgggctgtcca

SEQ ID NO: 679418 - DNA, 145 bp, Homo sapiens
cgcaaagtgagtgcacatatcataaaactgcaatcatgatataagcactgtatgatacatttctgcttttgtcacaccttcatgtagtcgttgtgtgaaatggtccaggtcatggttgtacattgagagacgaggcagtgaagag

SEQ ID NO: 679419 - DNA, 294 bp, Homo sapiens
gcgggacttgtcaaagatttctctgatattggtctcagactccccagaccacatggtaagaagttcagtacccttgatgtagatgaagttggccggggattcataagtaattgttttggtcaacaaagttatcccacagccaggaggtgcatagaacagtactcccttgcaaggtatcatgccaaacttcaggaatttgtctgggtgctccacaggatactggaccagctcctgtagctcacgtatgacatcctctaggccaccatgtcttcccaggttacctgtggtagctct

SEQ ID NO: 679420 - DNA, 455 bp, Homo sapiens
  misc_feature (423)..(423): n is a, c, g, or t
  misc_feature (445)..(445): n is a, c, g, or t
ctgacaatactgtcatgtttatgcagggaaagaggcagaaagaaatttggcacctccttaaaattgcctgtacacagagttctgcccagctctcttgtaggatacagtctagaaggcacagtaacccctccagtatcagcatggctgccccctacattagcagaccgtgaacatcctctgacatgtgtggtaactcctcaagatggagagaccgttagcacaaatgatagaagaaaatctgaactgtcttggccatttaagtactattattccgtgaagcaaatgaggaccagagcagtagtttgatgagtcttgattggagttggttagcagaatgactcgacactcgtttactgtcctggagcctacgaagctggtttgtcattttactccaaagtcatctttactttgctgaagccattnctcacttaccagtccgtgagangatgggctgt

SEQ ID NO: 679421 - DNA, 123 bp, Homo sapiens
  misc_feature (5)..(5): n is a, c, g, or t
gggtngtaagcctttccatttgtgtagtctggcaggttaggatttccggggtggattgaaggtggggccggagttttgggacgggacctaatggatatctgccagggagggcggtgaccaatg

SEQ ID NO: 679422 - DNA, 300 bp, Homo sapiens
tatggcgatctggtcgaacttgccagcgagctcattcagtcaccaccagcagctccttgggagaacagtcgctggccagctgcgtgaagcccactatgtccgcatagaggatgctgacattctggtagcctacttgacgtaaaggctagtgagaactagtatagtcaggcatgcagcgacggtcaccatgctccttgagccgtacgatgatagccagctacatgcccatagagatatgggccggaagcactcacagcggcatgtactcctgctggcgcgtctagatgcgcagctaccggc

SEQ ID NO: 679423 - DNA, 354 bp, Homo sapiens
  misc_feature (216)..(217): n is a, c, g, or t
  misc_feature (224)..(224): n is a, c, g, or t
  misc_feature (234)..(234): n is a, c, g, or t
  misc_feature (241)..(241): n is a, c, g, or t
  misc_feature (271)..(271): n is a, c, g, or t
  misc_feature (275)..(275): n is a, c, g, or t
  misc_feature (317)..(317): n is a, c, g, or t
  misc_feature (328)..(329): n is a, c, g, or t
gcacatggtaagcttggcaagggctccaggaacgctgacgaagggttttaggacccccacccccatgcctgtaccagggctggcctccagagcgggtgaggacagagcagctgtgggcttttcattctgaggtcttggcccccctggccaccgcaagggactctttgcttgtcagggcttgcaaaaaccaaccttcgagaaagaaaagggaacttnncacgtgnaatgtgactntgtgtgntgcgtgtgtgttgggtttgtgtgcccgccncgtntggcgtgtttacttcatggaatttttgtttgtggtgaaattnccctccaattnngtgtcaagaattttacctccatgcc

SEQ ID NO: 679424 - DNA, 132 bp, Homo sapiens
taagttccagcacttgggaggccgaggcaggcggatcacttgtggtcaggagtttgtcaagaccagcctggcctataagcctcttctgcaattcttctattcctagttcttgctcttgcctgtctctgcctg

SEQ ID NO: 679425 - DNA, 676 bp, Homo sapiens
  misc_feature (487)..(488): n is a, c, g, or t
  misc_feature (569)..(570): n is a, c, g, or t
  misc_feature (595)..(595): n is a, c, g, or t
  misc_feature (608)..(608): n is a, c, g, or t
  misc_feature (643)..(644): n is a, c, g, or t
  misc_feature (652)..(652): n is a, c, g, or t
  misc_feature (656)..(656): n is a, c, g, or t
  misc_feature (658)..(658): n is a, c, g, or t
tgttgggactgctgataggaagatgtcttcggaaatgctacaatggggcaccctgcccccacttcaaagccagagctgttatgccagatggtcagtttagagatatcagcctgtctgactacaaggagaatatgttgtgtgcttctttaccctcttgacttcagcgtttgatgtgccccacggaagtatcatcgctttcagttgatagggcagaagaatttaagaaactcaagctgccaggtgatgggtgctctctgtggacttcgtcactatcgtgtctatctagtcatgggtcaatatcagcctaacgacacaagggaggactgggacccatgaacatccctttggtatcagatccgaagcgcaccattgctcaggattatggggtcttaaaggctgatgaaggcatctcgttcagggcgccttttatatccattgagtgactacagggtattcttcggcagatcactgtaaatgacctcccgtnntggccgctctgtggatgagactttgagactagttcaggccttccagttcactgacaaacatggggaagtgtgcccagctgnntggaaacctggcagtgatacatcangcctgatgtccanaagagcaaagaatatttctccaagcagaagtgagnngctgggcntgtntnagtgccaggctgcaggtg

SEQ ID NO: 679426 - DNA, 134 bp, Homo sapiens
gcaacccaaaccacaaaagaaaaacccgcaacaaaaaaaaaacacaaacaaggaaaaaaacaaacaaaaaagaaaggaaccaggcaggaggaagaaaaaagaacaaggaaaaaaaaaaaacccacacaagacac

SEQ ID NO: 679427 - DNA, 362 bp, Homo sapiens
ctgctggagctctactacagcatgcgccgccctgcctggatgattacagtatccttagctgagccagccctggaccatgttagccaggctggtctcgaactcctgaccttgtgatctgcttgcctctgcctcccaaagtgttgggattacaggtgtgagccaccacgcccagccgaggttttcttttcacacaattctttgtttattatttttatttttggagagacagggtctcactctattgccgaggctggagtgcagttgcacaatcgtaactcactgcagcctcaaactccaggctcaagtgatctttctgcttcagcctgctgagtaactgggaccacaggcttgcaacaccacac

SEQ ID NO: 679428 - DNA, 762 bp, Homo sapiens
  misc_feature (750)..(750): n is a, c, g, or t
cgtggtgcgccgtttttcaagcctgtcggaaaagcgcagtatgcgggtgggagtgacccgattttccaggtgccgtccgtcacccctttctttgactcagaaagggaactccctgaccccttgcgcttcccgagtgaggcaatgcctcaccctgcttcggctcgcgcacggtgcgcgcacccactgacctgcgcccactgtctggcactccctagtgagatgaacccggtacctcagatggaaatgcagaaatcaccgtcttctgcgtcgctcgcgctgggagctgtagaccggagctgttcctattcggccatcttggctcctccacaaaacaattaaaattggcgtacaagggacatacctcaatgtaataaaagccatctatgacaaacccacagccaacataatactgactgaggaaaagttgaaagcattccctctgagcactggaacagacaaggatgcccactctcaccactcctcttcaacatagtactggaagtcacagccagagcaatcagacaaagaaaagaaataaaggtcatcagtaagaggaagtcaaactgtcactgtttgctgatgatatgaccatttaccttgaaaaccctaaagattcctccagaaagctcctagaattgataaaaggcattcagcaaagtttacagatagaagattaatatacacaaatctgtagctgttctatataccaacagtgatcaaatggagaataaaatcaagaactccaccccntttacaatagct

SEQ ID NO: 679429 - DNA, 468 bp, Homo sapiens
tgatgcgaggtgatctagaggatccctcgaagatggcggtgggatgagaagcaaaaaaagtacttccagaagcagtgccatgaatgcatagaacacatcaggaagcagaactggtttgaggcctttgaaatactggataaactactagatggcgacttaacaagtgatccttcttacttccagaatgttacaggatgtagtaattactataactttttgcggtgcacggaacctgaggatcagctttactatgtgaaatttttgtcactcccagaggtgagacaagccatccacgtggggaatcagacttttaatgaaaaaaaaaaaaacaaaaacaagaaaaaaaaaaaaaaaaaacaaaaaaaatggaactatagttgaaaagtacttgcgagaagatacagtacagtcagttaagccatggttaactgaaatcatgaataattataaggttctgatctacaatgg

SEQ ID NO: 679430 - DNA, 982 bp, Homo sapiens
gccgcacctacaccagccaacccagatccctgagtgtcctgacagctgccctggcccagatccccactgcctgccagtgagcaatgcctgagatgccagcctgtgcctggctgcactcctgactcctgagcatgtctctgtccttctgaccctgagcccctgctgcccatttcctgtggacccactgcccctgctgggcagctgctgccaacctgcctgtgccatggagacccctgtcccagctggctgctgccaccctgcagctgtgggctggcagtgccagctccactccgctgtctgcccaccctgcatcaccctggctgcagtgagaaggaggacctgcagtgagctcaatgatctgcttggcggtctacatcgaccgtgtgcgctcgctggaaactggagacacgcagggcttgcgccttcgcatcaccgagtctgaacgaggtggtacagccgcgaggtgtcctggcatcacaggccgcctacgaggccgagctcggggattgcccgcaaggaacctttgactcaggtaagccaaaggagcgcgccctgcctgcagctggagctgagcaaacgtgcgtgaggagtttaaggatgctgaaatgcgcgcaataccaaggcacggacgggtgagctgataggcttgcttcaggctccggcgttgaagggacccttggaccgctcctggcatggaactcccagatgaaggccgcacactgtaggccacctggtcctacaagtggacaaaagtgccacgtcgctggaagggccagaccgtcacttaacattcctcgggagcccactgatgtgtgccccaatgcatttcacaggcacgcgcccctaactagagtacaggccccaagaaaagccaccttcacgggtatggacacggtacatgtgccgcgggttgtgacatctcttcaaaaacaggtgcgtgaggaacccgttagatcgggtaccagtagacttagcgaagtaa

SEQ ID NO: 679431 - DNA, 352 bp, Homo sapiens
ggcctagacgatccccgtcagccacctggtgatgctctggtggatccgggcaagtaaactgattaccttctagaaaggattcacgcattctagatgccatttacaacatttgtgattctattgcaggaggtgaaaatatcaatcattatagcaagagttgggaataagtagactcctagcctcatgcatgatgttgaggggttcacgacttcagtggagtaagtcactgcagatgtagtgtaaacagcaagagaactagaattagaagtggaacctgaagatgtgactgaattgttgcaatctcataatcgaatgtgaacgaataaggagtttcttatgatgaacaagtttc

SEQ ID NO: 679432 - DNA, 162 bp, Homo sapiens
cccccaggtttcctgtctgtgagcattcttgaggcaacggaattctggcgttggtgcactgggcagtggtgtccaggggccgggtgtggttttgaaggggtggctcccttgtgatgattcaatatgctgtgtttgtccgttgtggttttctgtaaaaatgga

SEQ ID NO: 679433 - DNA, 323 bp, Homo sapiens
ccaaaaggtgattctttttaaagactgataagactgctgccgggtgtagtggttcacgcctgtaatcccagcgctttgggaagctgaggtgggtggatcacttgaggctaggaattcaagacctacctggccaacatgacgaaaccccgtctctactaaaaatacaaaaattagccaggcgtggtggtacatacctgcagtcccagctacttgggaggctgaggcacaagaattgcttgaacccaggaggtggaggttgcagcgagccaagattgcgccactgcattccagcctgggcgacacagagcggactctgtctccaa

SEQ ID NO: 679434 - DNA, 844 bp, Homo sapiens
  misc_feature (382)..(382): n is a, c, g, or t
gcgtttgcagatcgcaccgcggagaaaaccgtgtactattagccatggtcaaccccagcgtgttcttcgagattgccgtcgagggagcccttggaccggtctccttgtgagctgttggcagacaaggtcccaaagacagcagacaattttcgttgctctgagcactggcggagaaaggatttgttataagggttcctgctttcacagaattatcgcaggtttatgtgtcagggtgtgacttcacacgcataatgcactgctggtaaagtccactctatggggagaaattgtgaccgatgacgaacttcatcctagagcatacgggtcctggctatctgtgtacatggctaatgctggacccatgcacaaatggttcccagtntgttcatctgcactgcaagactgagtggtcgcatggcaagcatgtgtgtgtttgcaaagtgaaagacggcatgaatatgtggaggccatgtacgcgcttgtgggctccacggaatgccaagaccagcaagacgatcatcattgctgactggggccaattcgaataatttgcactgtgtgttttatcttaacagcagataattcctttgtgtagctcaggagaggcacccttcaacgcattgtgctcgagatcttagaatctgtgtgctctcgtgcaggtccctggggatccaggttaccttgtccctccatgctagtggattgaagagtaagttaggagtatgacatacacataattaccacagacttcgaacaaattttggcgcgcgcagaacttatacacttgggcggccaaatgaatgtacatgtacaatcgtccttgggttccaaaccgccgtcacac

SEQ ID NO: 679435 - DNA, 268 bp, Homo sapiens
tcatggtggctcacgctgtcatcccaatttgggcaggcgaactgggcagatcacttgaggtcaggagtcgagacagcctggacaaaatggaaaaccccatctctgtacctaaaaatacaaaaattagccaggcatgatactgtgtgcctgtaatcccagctccttgggcggctggggcacaagaatcacttgaacccaggaggcggacgttgcagtgagccgagatcagaccactgcactccagccggggtgacggagcgagatctgt

SEQ ID NO: 679436 - DNA, 286 bp, Homo sapiens
agtcactgatcgatgcattgtttcatgctgtgtggcctgctcggtatcccactgcagctcgttctctcatgaaggtccgggtgacactatatgttacgaccatcaaagtgatttgggggatgctcgatagtctcactgagtgcttcttcatatcggtatatgaccttgattctctcggtacccgattggcatgaacccacgccctctctggctggttgctaaaaaactggacatgatattctcgggcacctcttgtgttaattttagtatgaacctcaagctgggg

SEQ ID NO: 679437 - DNA, 129 bp, Homo sapiens
tcgctatctcggcacccgtattgaattcaagtatatattaagtatgcagtggacctctagagctatggtgccgatgaatatgcgccctcgagcagtactccccccggaacccaaagctctttgagtttc

SEQ ID NO: 679438 - DNA, 338 bp, Homo sapiens
  misc_feature (16)..(16): n is a, c, g, or t
  misc_feature (67)..(67): n is a, c, g, or t
gatattgaaagaaggnaagaagttgaaagcatcttgaagaaaaactcagattggatatgggattggncaagtcggccggaaaatattccccccaaggagttcctctttaaacacccgaagcgcacggccaccctcagcatgaggaacacgagcgtcatgaagaaagggggcatattctctgcagaatttctgaaagttttccttccatctctgctgctctctcatttgctggccatcggattggggatctatattggaaggcgtctgacaacctccaccagcaccttttgatgaagaactggagtctgacttggttcgttagtggattacttctgagc

SEQ ID NO: 679439 - DNA, 241 bp, Homo sapiens
atcacgctgttcagtgtgcttaagggggattaccttataattctctcactacacagtgacgggcctgggtagcgtaggggactcaggcgaccagctgcgcggttaggaagtatcccagggcatggggctgcctaggggcttacatggaagtcaaagcttctcacaggcagtcagagcagggagtgtgccagccaccacgaggctctgttggcactgaggctgaagcctgtgggtatgtccc

SEQ ID NO: 679440 - DNA, 245 bp, Homo sapiens
cacacgaagcacacaggaaggacttcccctgaggacaacaggcacgggagagtcctgagggcagcatgcactgtttccagaaggggggtgggcacctagagctggaaaccccagagaccattcccaaaagcctgatttccaggtgacacagccagctgacttcacaaggtatggcatcacacaggctcaggagagagaggcagagggaggccagaatccagtggctgtggtgccgatgaatagcg

SEQ ID NO: 679441 - DNA, 1305 bp, Homo sapiens
  misc_feature (333)..(333): n is a, c, g, or t
ccagaagtggtgcgaatgagacagagacacagaggtgtccagaagagctcaactccaaggaatgtgtctcccactctccctttgtgtagagcccgcacatgcttttttcttgtcccccactgtttgtgtccctccaaaacggccctttggtgggtacgcgcaacacctacttctatatcgagcggacatccctttttcatcgaggggtgccccccggagaattattgggacgaccttctcctatgagtttctttcatattatggctcctcatgtcaaaagcaaaaattgttttgtgacactcgcggggattttgtttgtagcctcccacgcancaggcaaccacacttgggggggcgggagatattcagcatctcaccccacccgctgggggggccctacaagaagcagtgtcattatttcctaacacatgggggagtcccgaggaaatgtttacccccacgttgatgagtgtgaaagcgctactagatttgtgcctcacaggaaatgttcctttatattcctcatgtcgcagaaaacccccactgttgtcccacatggcagctgttttccttttttgtctcggaaaaatggggggatctcccccccacacgcgaagaagtgcccaatggacaacacccccccgttatgttgtaaaaataagcgcgcgccttttaattggcgccatcgccacagaatgggacatattttccaccccgtgtcaaatagtgcctaatttaacacaccctgccgcattcctctgggggatactctttcacagggacccagtttttctgtgtatacacggtttgacacatgggcccccaagatgtctcataccgcgtaaagagccctttaccttcgccacattggggaacccaccgcgtcgtatgcgcgcccacttagagccataaagtggggattttcccacgatagagctgaggaggtctctctcactgaaacagatctctcgttctttatgagggatatccacaacctatggcaccgggagtttctccacacccacgagaacatgcgagaggacgcgctttctcgcgatgtgtggaagggcccacatataaggtaaaccctaaatgccaagacgcccctatcttcacttccgagagttttcaagactctccttaacccctgtaacatccttcatacaccgccattctcatcactccccactaagtcactttatttttcaaccctctataattgcttttttgttttttttttttggggggggttttagaacagtgcactggcaaatagtaggggctcaataaaaaagtgtttgttga

SEQ ID NO: 679442 - DNA, 165 bp, Homo sapiens
agcccaaacagggtgcaggtgctctggccctgaagaacctgagtggagtggaatggcactggctaggccactacagctacagcgggcgacgtagcccctaacaagtatggcagcaagtggctagccactagctagggtattgtagtacagacgaggctagcgagg

SEQ ID NO: 679443 - DNA, 330 bp, Homo sapiens
ttagttttcagcagttttgttttacaagaaacttagcctggtaaagtataagaatgcaaaatactggctgggcgtggtgactcatgcctttaatcccagcactttgggaggccaaggcgggcggatcacgaggtcaggagatcgagaccatcctggctaacatggtgaaaccccgtctctactaaaaatacaaaaattagcttgggcgtggtggtgtacgcttgtagtcccagctactcaggaggctgaggcaggagaatcacttgaacccaggaggcagaggttgcagtgagccgagattgcaccactgcactccagcgcaagtctcaa

SEQ ID NO: 679444 - DNA, 972 bp, Homo sapiens
  misc_feature (46)..(46): n is a, c, g, or t
  misc_feature (82)..(82): n is a, c, g, or t
  misc_feature (142)..(142): n is a, c, g, or t
  misc_feature (181)..(181): n is a, c, g, or t
  misc_feature (241)..(241): n is a, c, g, or t
  misc_feature (255)..(255): n is a, c, g, or t
  misc_feature (264)..(264): n is a, c, g, or t
  misc_feature (271)..(271): n is a, c, g, or t
  misc_feature (277)..(277): n is a, c, g, or t
  misc_feature (279)..(282): n is a, c, g, or t
  misc_feature (324)..(324): n is a, c, g, or t
  misc_feature (327)..(327): n is a, c, g, or t
  misc_feature (608)..(608): n is a, c, g, or t
  misc_feature (614)..(614): n is a, c, g, or t
  misc_feature (683)..(683): n is a, c, g, or t
  misc_feature (691)..(691): n is a, c, g, or t
  misc_feature (762)..(762): n is a, c, g, or t
  misc_feature (778)..(778): n is a, c, g, or t
  misc_feature (793)..(793): n is a, c, g, or t
  misc_feature (795)..(795): n is a, c, g, or t
  misc_feature (860)..(860): n is a, c, g, or t
  misc_feature (871)..(871): n is a, c, g, or t
  misc_feature (907)..(907): n is a, c, g, or t
  misc_feature (910)..(910): n is a, c, g, or t
  misc_feature (969)..(969): n is a, c, g, or t
caagctctactgggtagctgagttaatagcgtccagtgtttaaagnctgggcgaagcggggagaaagaggaaaggaggaagnagcacacacttcgaagagcgccacttttaagcacgcgtacatttatgaagtattaaaaanaaaggatgcgaacaaaaaaggcaattcaggcagttttcngaaagagggtttggcggtatggaacgcgtaaggagactgtgcttggggccgatccactcnctccagcttctcanggtgtttgngggcatngggggngnnnnggggggtggcgcgcagaagggatcgacggatcttgacatgancancatcacgtacgtatattgaggtgaagatgtcgatgaaagcagcgaagttggaattcctaacttccatgctctggaaggaagcggccaatttactgcagctcagcttgaactgtttgatgatgtcgctgatcttctcaaaccggtggacgtcgcgctgctctttgcactggtagtgggaaataaccaagaatgtagctctctcgaacagcagaacttcatcggcctcaatgatttgggcaaaattcctgaggttcatctccagctaaagaacgttgggaatnagctgntagacgatgctggaccaggctttgtagagcgtctcatcacagatggacgtgcgaaagcaagcacactcnagcgggcngagagagacgcctcatgtctgtctctcgctctttataaatcaggtcacgctgatcctcctgaaccagatcnattttgtgcacagggngaagattctggcgtnangagagttctggaggatggcctccagacacgactggtaataatgcatgtctttttccagtgcgcgnctctgcacgtnacacacgtgaattaaaactctcacgtgacggaaganatngtctcgctggctggtgaagtgattttcatgaaggtgtctgaccgcacagtacacaggtnagc

SEQ ID NO: 679445 - DNA, 520 bp, Homo sapiens
tctagaggatcacgtatgagtccaggcccaagcacaggtccaggtgtccgttcgtgcagggggcccttgagccttaagtctgagacacatgtaattccaggagcgggggactgcctttccctcgctgatagcattcccggggtggatttcagacctgtctgggctttctttcttttatttttttggagagagtttggctctggttttccaggctggagtacaagggcacaatctcagctcaccacaaccttcgcctcccaggttcaagcgattctcctgcctcagcctcccgagtagctgggattacaggcatgtgccaccacgcccggctaatttttttgtatttttagtagagatggggtttctccatgtgggtcaagctggtcttgaactgctgacctcaggtgatctgcctgcctcggcttcccaaagtgctgggattacaggcatgagccactgtacccggcttggctttcatttaattgtgatttcattggaagaagatgttagacttctgttc

SEQ ID NO: 679446 - DNA, 87 bp, Homo sapiens
gatcgcagatatcctaattaatcacccatgcgtatgaatatcttgatccactatactgcctactccaatctggacctatccttaacg

SEQ ID NO: 679447 - DNA, 834 bp, Homo sapiens
  misc_feature (743)..(743): n is a, c, g, or t
gactagttctaggttcggcatgcttacaggcatgatatagtactaggttgttagctattctgggtgtgcttggagcagctctaagaccggcaacatggcccggttgcccttgcgatcagagagaaaagggctgggcgctccatgagttcagcctgaggctcttcgaacatccattctgcattccatgcaatggtgttctgcccaatatggattctcttccccccgagtctacctctagaaactgacgatgaagactaagccaatgccgatatccaggataaacttcagagagagtcatatattgggacgcgtcgaccatgaggtgtcctccgacctcaggtacactctgacagatggagaacgtcgcgatgggatgctagaatactggtgtatttaacttactgtagcgactatttgccaatgagttcgcttgggttcaagtgtaccacgagagttatggcgtagtaaagcgtgtaagagtgatcaatgcactgtatgtagatcctgatagcagttattcataacataggcaaagtggtttagcccacgattgtgagcacggaacgcttgaagcaggatctagcccatgtccttgcagaaagcgtggcgcttggtccgcatctactgacgtagacaatggcatccctctcgaggaggctactggaatatcaccctcaaatgcatgcttctcctgacatggccatctctagtatcaaggcgtcttgtgctttatgccatgtggnctgtgaagccgtcatctatagagacccaaatcacagtcgcagctttgaaagtgatagagtcagacaactcacaggacaaataagaccaagg

SEQ ID NO: 679448 - DNA, 383 bp, Homo sapiens
tgagacagagtctcgctttgtcacgcaggctggagtgcagtggctcgatctatgctcactacaaccaccgcctcccaggttcaagcaactctcctgcctcagcctcctgagtagctgggtcgagggtcaccaagcccggctaatttctgtatttttttttttttttggtagagacggggtttcaccatgttggccaggctggtctcgaactcctgacctcaagtgatctacctgcctcggcctcccaaagtgctgggattacaggcatgagccaccatgcccgaccagagagttcttatatttttaaaaaattgggtaattccctgatactgcatgataactttgttataaggtgtgtgtattatggattgaactgggttccc

SEQ ID NO: 679449 - DNA, 440 bp, Homo sapiens
agacaggtacattcaaaaatccctactacccataggccctagacgacgagtatctatatatcctactaaccactgaagacatctaacagctcctttctctccatagcagctgctatatactggttcaggtccatatgcaccaccagacaggactactgcagtgattttcctcatgggtctccctgcttctaggatcgaaactcttttagtgtgatcatctttctggagcatagctctgattagaagcatcactgtgtcgcatatggataaatgctctagcatggcttaccagccctatctggcaccagtctgtctgcctgtctttctttgccttaaatcatcctatgtgccaacaaaactgaaccattcacggacgggcatggtgcctcacacctgtcatcccagcactttgggaggccgaggtgggcggctcagtcgac

SEQ ID NO: 679450 - DNA, 827 bp, Homo sapiens
aaggaatagaagtatacagttccatgactagatatccccagtaccatcggcgtctcgtttcatcagagctctatctccagactacccgtcacaagcatggggagcgagaacactgaacatgcaagtccagaccatatgacgctgcgtcacagcatctccgctgacttgctcactccgagtgcagatggcttgtgagccctggtgccagcttcctctagtgcagtagtctgtcggccgtaactagagcgtgggtagtcactggctgccctcatagacaagctaactgtctcatagatcgtacctcaacagtgatctcagcagcgagagggcgatcccaacacagcatcgtattggtgcgagatgcattgtgcaagcatagtgtcatgtccccgcagtggaccttgcggacaagacgtcgttcagagacacagaaccgtatcatgcataccgttcgaccaccaaaacgtcaccagcaatcgactgcatcggctagctacctcacacgaacctagcgtgggctgcctctaacgtgcgttcagtgaatggactagtggaactagggtcgaggacagttcgctgcggcatacgtgcgagtgcctgctcctgttggaagggtaatcatgtggacttctaagctgcgccggtgtgagaatcccttgtggagcccttccgccagtatgctcatcctggcgccatgggaagtttgcccactcacagtgggcccacacagccctatgttcctcaattaaaattaaagttggatctataaacaaacaaacaaaaacaggagtgaactataagtagtcagacgacggcacggacacggt

SEQ ID NO: 679451 - DNA, 689 bp, Homo sapiens
  misc_feature (8)..(8): n is a, c, g, or t
  misc_feature (120)..(120): n is a, c, g, or t
  misc_feature (126)..(126): n is a, c, g, or t
  misc_feature (150)..(150): n is a, c, g, or t
  misc_feature (155)..(155): n is a, c, g, or t
  misc_feature (206)..(206): n is a, c, g, or t
  misc_feature (294)..(294): n is a, c, g, or t
  misc_feature (324)..(324): n is a, c, g, or t
  misc_feature (362)..(363): n is a, c, g, or t
  misc_feature (369)..(369): n is a, c, g, or t
  misc_feature (689)..(689): n is a, c, g, or t
agcggganggaacgtgactggtctcctaaccaaggtgcactgagaagcaatcaacgggtcggtcgtggccagtcctggggaggtctgagtggtggtctttgggataaccttggccttatnggattnggactcgaaattagaagagcctancattntcagatgcaatcactttggacatgcttgcagacagtcctaagctgaaacanagagagggtatcaagaggcttctttaaaatagactttgtgacacactaatgtaagtatgcaaggtcattgcgtgtgtcataaagtganttcttatggtgaggtcacgaagtagtggtngttgatggaaatagctacagctggtcccttcctgcttnnactttnctttgcttctcggagggtatctccaccatcttctgcacaaagatgtcttcgtctcctgaacattaaaaaatgcagaattatgtgactggttagatggcctcagaagttatgctgtgaattttacagaaatttattggcttatgtggataatgtatagtaccaaagctgtttttatagcacatagatgtgtgtaacaagtaatgttagcagttcttgcactttgaccaccaaggtgtaactagaccattatttaaatgtcagttgaaaattatgggtgtactatgcttgaaacaaaattggaacgggagtggataccatan

SEQ ID NO: 679452 - DNA, 483 bp, Homo sapiens
  misc_feature (22)..(23): n is a, c, g, or t
  misc_feature (27)..(27): n is a, c, g, or t
  misc_feature (211)..(211): n is a, c, g, or t
  misc_feature (473)..(473): n is a, c, g, or t
catgtattgatacagatttgtnntggntttaattttttatttattccttttactggtttcgaagtgatgatccttttattattcttttagcgcttaccttcaaattttaaatggacattattgaggcttgtcaacgtctacaaaagtgtactggaattttgattgggattatgttgaatcactggatcaatttttggagaactgacaactncacaatattgagtgtgtaggtttatatatgtgatatagctctccatgtatttagatttttagttctcctacacaatcttttatagttttaattaaacaaattgcacacatattttaaaaaatgtatccctaggtattttatcttctgatgctattcgggagtgctattagtgctttttaaaaaatccttgcagttttttgatgttttagttatatataataatgcacataattttgttataaaaacaaaaaaaatggcctcngttggcctca

SEQ ID NO: 679453 - DNA, 519 bp, Homo sapiens
aaaaacttcttatcactatcaaaagtaatctcacttggggctaatttacccctatcccacccaagctgggtaggtcaaccccttctgctccctcttccctgggaatggccctatcaccccgcttagcttgagtgtgcactggatgcccctcactgagttggtctctgggggcaagatctggttctcaaccactcctgcactcttgcacacagcaggggtggtgtctgggtccggggctgcagcggcaggtggggaacgggctgtcagtcacagccacccaaaggggggctggaccccacgtcacccccacagggacaggcaccgccctgcctttcttcaccctccagctctgctcatctccttgcccttaactagaggtaccttcccagatggccgtcttctggaagatgccaggggtgccttcctttcgccactcttgaggcacatcatactgttccctgcagacagaaatgccttgagcagctgtaggcaagagcagagctgaggagggacttggtg

SEQ ID NO: 679454 - DNA, 167 bp, Homo sapiens
cagtacctcgaggagggtcgggggtgggcatgatgcgtgcccagctctggctccggcctcggctctctggcttctgatagccagaactggtatcttctcaggaaccttcactttgtccttgtccctttaccattccccatcaaagagtagtctgctatatcaatttg

SEQ ID NO: 679455 - DNA, 159 bp, Homo sapiens
cgggtagactaaatccagcggccaggaagaaggacgtggaaagattcttcaagggatatggacggatacagatattgactctgaaatagaggctttggttttgtcggatatttgatggatccaaggagatgctagataattgctgtgtattgagcttcg

SEQ ID NO: 679456 - DNA, 1009 bp, Homo sapiens
  misc_feature (583)..(583): n is a, c, g, or t
  misc_feature (698)..(698): n is a, c, g, or t
  misc_feature (711)..(711): n is a, c, g, or t
ctatgtatgtccttcgtgccttgcattagctaataaaggtgcttgacgcgatgcttcagctggaggaccaaaggttaaatatgcaaatatacgttaataacatgtgtaaccgttatgtaagcttgtgtcacgtcaagtagcaagctaatctatttgtgtgcactggactagggctttgtgctccctacttcagtatttggatgcttgccttggatcttttgttctcagcaaagatgtagttgaaattccgggatcgttcaaaacgaatgacattgattaggtgttcattttcgaaacgatgtacagactgaagtccgcccaacttagaaaccggttggttcttaaggtgtcttgcgtctagcccatagaagccgctacgtgacctccaccacagcccaaatggagggctgtgatagccagatctggttggctttgtgggctgacccagacatttaatcaccatctcttatgtggtcgccgtaagaaatgcattccaggttgggacttgggatcctgagagcacattcgccccctgtggtggccgttgccaccttgcaagatggaagcccagtctccttactancaaactgtagttgtaagcagagggaggggtgagatgttataggacattccctaagctggggagtgattttatcactattcatgtcaactgtacttggtatagactcctatcattnataatatgaaagnctaaataaaactatgcatgctattctatgtgctattttatatcagtaaataagctaatgcttgccagttgaatacacagttatgaggtgatagaactgacttggccagtatttttggcactgtttccaatctgttttaaaaagtcttattagaatggggcccgggtgatggtttcccgggccctgggcttgcaataaaaaggtttaatgggcctttaccaatgtaagatctttatcctaaccttttttgtaaaagatatctattgatttccatatgcaataaacctttttttcagaga

SEQ ID NO: 679457 - DNA, 1002 bp, Homo sapiens
gggaaattaactataatgttcgcactaagattgctgggagtggtaggtggacatatctatatatcaataaggactaaccgtctttttgtacatagcgagatgataatactgtattgttttaagcccacaggtttactccactttcaaaaagatcaattgggcactattcttcatattttttcatggaaataagcattggtctctccatttcaggttaaatgataactagaaagcattaacactagcacagatcgttctaggtggagtcatatttttcaaaactccagaacatgtatattggtcctgtgttaccaagttccatatgtgacagcagcaaccgcagaaatccccttgcaaatgactcatcgacggttacacatcttctctcattagcgaggcactggggacgacaccaggctagctacggtacagacttagcccgactaacgatcgcacaacgtccaccacacgacacacgaggagacaatggcgtaacatggcggatggatcaacagccacggataaggacacgttcccaggtacagatacacaacaggcctggatacaggatctggaccagcagttcaaccaacgcgtacccctgagcgcagaacagagtacacgaaagagcccaccaggaggcgaccgtgcgtagccaccagacgcatgaaaggccccattggacaagcaacttacttaagccccacagacaccgctcctcaccacacaccggacaccacgcacacgtagaaccaacacacagcatcaaaattagagcaaaaaacgtaacacacccaacaagcgatccaccacaaaacagagccatcaccagcaccggctaccactccgccccaacccccacccatcaccacaccaaaacgaggtcataaatcacaacagaggcaaccaaacaacaccagaaaaccacacacacgctataacgagcatcaacaatgcaaaacgacaagcacaagcccaccagcacccacaaacaaaacgaga

SEQ ID NO: 679458 - DNA, 121 bp, Homo sapiens
aattgcttgaacccaggaggcagagggttgcagtgagccaagatcgtgccattgcagtctagtctgggtaacgagcgaacttcctgtctcaaaaaaaaaccatttataacaccattagggt

SEQ ID NO: 679459 - DNA, 190 bp, Homo sapiens
gttcgcggaacgaagtggctcagtcttccagagccacatcatcgcgggtcgaaatataagccgagagagaggtaggtgtcggaggcctggaggtactagttgagcaggctgtggacggctgcctccacgtcggtggaataattctgacgaatctgggagctcatgggcggtcggcgagaaggagctaacc

SEQ ID NO: 679460 - DNA, 497 bp, Homo sapiens
  misc_feature (40)..(40): n is a, c, g, or t
gttgagtctagaggatcccagcggggaacaatcacttgtncagtatagagttgtactagaaaacagccatgtccattcatttatgtatggcctagggctggtttcctctctacgagcagagtggagtgatggccacaaagccaaaaatatttactacctggccctttccacccccaccctctgccttcatttcccgcatagccttcgtatgtggctggtttatttgcgctctgctgttgggctcctataagacaatataagttcattatggcagaggtagctggaacacagaaggtgcttactaaaatatttaattgaatggaaggcgggatgaaacacacaccctaaggggaaagaattagctaaaggtgatgtggctggcccaaggcagagccagtattagaatcatttttttttttggtcttggagagggagtttggctctggtggcccaggcggggcaacagagtgagactcggtctcaaaaaaacaggtggt

SEQ ID NO: 679461 - DNA, 322 bp, Homo sapiens
ttactcgacggagccgccgcccgcgacggcctggaaatcctgttcgatcacctggcaccggtgcttgggccggagttcgccgccatgcacgtcgcacaccgctcgggacaagacttcccggggaccgtctaccgaatccgcctgacggaaaagacaggtcgctttgaaaagacggcgttctagtcacttctgacttaacttggcggccagggtagttcgcgttcggtcgcgtatgtgcaacaccaggccgcggttgtgcggaacgcggagggtcctgcgcgtatcgcacggcaccgacctcgcccgcatgcgggatcagcag

SEQ ID NO: 679462 - DNA, 487 bp, Homo sapiens
agccccaagtatgataataggcagactattcccaactttctgtctagtttccagccattgaagtgaactgctaaacaaacaccaataattgaaatgttgagagatatggtcatgtaacttagtcctctgctgtttacttccccaggagctgatccatttatccatgcacttttaataaaccatggaataccaaggctcaacatatctaccccattggatcccacgatgttagacatagccatatctcctttgccctcaaaaagaaaagcatactgttaaaatgtgcttaccaatactgtgttttattaataatcttcacaacaaaagaaactctgcatacttttttgttgttgattcgttttcaaaaattgttgttagagcaaaagtcttactcaatttgtatttttaaatctttcttgggttagcatttaaagtctcaacatttattcaataattatatttattaaaccatttttcaataaggtaa

SEQ ID NO: 679463 - DNA, 199 bp, Homo sapiens
tcccccagggggggggggggtgggcaaaatggggggccagggatttcctccccccccgggggggccccccaagaagggatggaaaaccccccctccctccctggggccattgaaatttagggcgggtccccttcctgccccgcccctttttttggggtttggggggaaagaacaaaaaaaattttattttttgtcctga

SEQ ID NO: 679464 - DNA, 1044 bp, Homo sapiens
atcgcaatggcatcctaatgcttaccgaacgaaaaatgctaggctatatacaactacgcagaaggccccatacgattgtaggcccctacgggctactacaagcccttcgctgacgccataaaagctcttcaccagaacgagcccctaataacccgccaccatctaccaagtcaccctctacatcaccgccccgacccttatcgtcggtcaccaatcggctctctcctacgtgatgaaccccgcgttcgcctgtgacgccaagcaccccttggagtggagaccttcaaactgaggccgtgtcctcagtgtcttctgcgtagtcgcactcagctagggcgtacttcggaagtacaccagaatctattcgtggatccccgaggatggatcatggaaggtcgcatcacaaccgacacctatgacctccggctagactggtcgacgtcggtcgatcgcaaagaacaacacgctagtagtaaatgatcaaaccactagctcgaatcggaatcctatctaaaacgaaacattcatcagaaaataaaagcaggctccttccaagaccttcgaccatacatataatgcgaccagacacaacagatccagcacttactgagtacaatagcagagaagagaaatgatatgcgaagtgacgacaacaatctagatgagtgtcctcatcacggagcatacgccagacgacgcgaaatcaagaagtcacacacatcaacagccttgagatagacaagtactgaggtactgaagactcgacaacacgcatacaaccaatgaaaaggaactcacgaagagccccatccagaccggcagacaggcgagtccgacgcgcaagtaggaaaaacactcataggaaggacgaacaaagccacagacgagataccacacggcaaaggcaacagacaagaatgacggcaggcaccccgagaaggacgaacaaaaacaatacaagcagacaaagacagcaaaatggaccccaccctggaaacaagaagcaccaacagcacaacccgcgataacaatacaaacaagaac

SEQ ID NO: 679465 - DNA, 141 bp, Homo sapiens
caggtttttgttttttgtttttctgccagaagaatgaagaaacagactctggtctatatagattttatgttgtcaggcctacatagtggtagtgcagttgtaacaagcttgcttttcaaaaatgatgattttaggtgtgtg

SEQ ID NO: 679466 - DNA, 993 bp, Homo sapiens
tgtgtggtcgcgtctcggaaagccggtacgcgcttgcagcatgggtgatcaagctgactgaatgagcagatcgcgagaattccaaaggagagctatgatcactgattttgaccaaaagcatggtggactggaaatctataagcaatcagaaggaacttggcgaatctggtagattggagcatcctctttgcggccatggaatcctcatcagcatacggacagaagctttagccatgtgatcgattgcaatataaactcgaaaccgtacagatttgtccttgcatcgcggtaaactcgcgccacaaaatttggtacctatcacactgaaaatattcccttgaacgaaataggaatgggcctgacgaaacaagattgcacgagggagcgcaacgatgcagcgcggatggatagccaacgcacagagttgtagagcagtgaaacgccattttccccgggttgctggttacccggacactaaggggacctggcgcaacctgggtcgttaatggactgtaagcttggcattgcaggaaaaccatttaggcccaaaatgcagcacttggacaaacaccccatttgggaggaacgcaaccgctttcaacctacgaatctggaagatgacaaacggcttcgaactggcggacattggactcgcagggggtaacattccgggacttacttctggactcgagctcgaattggcgtgcaacggctaaaaagcataattgaacgggaaggttgctggttacccattcattgcactgcacctggtcccaagagctggcaaagacctcgatctgctaccgcgcaaactggcttggtcacaagacttctccttcgctaggcaaataaactctgtggctacaactctgtggccccatttctctcctaccttggttgtgggtgccacgttcaacgtccttggttcacacagcggtccatctctacacgggtaagcctggtctacacccagcctacgtgccagtggctctc

SEQ ID NO: 679467 - DNA, 201 bp, Homo sapiens
catgatccgtgatcagcactgtctctaacatagcaagaagcctcgtccattcatttacaggcaactatattcctttcctgctctttgggaggccgaggagggtggatcacttgagatcaggagtctgagacgagcctgggcaacatgatgcgaccccgtctctacaaaaaatacaaaaactgctggatcagcggatcgagt

SEQ ID NO: 679468 - DNA, 362 bp, Homo sapiens
gcaaaaccagtttacgagcagcgggccaaggcttacctggaggaggagtgccctgcgactctgaggaaatacctgaaatacagcaaaaatatcctggaccggcaagatcctacctctgtggtggtcaccagccaccaggccccaagaggaagaaactgaagtgcctggcctacgactgctacccaggggggccgctgttcttcacaacggaaacggcacttaccagtcctggaagctggtggtgccccctcaggacacagccacctactcctgccacttgcagcacagcagactggcccagcctctcgtggggccctgctagtgcagttaggaagcaagggttgaaggctgtgggatctcag

SEQ ID NO: 679469 - DNA, 567 bp, Homo sapiens
  misc_feature (11)..(11): n is a, c, g, or t
  misc_feature (561)..(561): n is a, c, g, or t
gtgctctgaancttaggggaacatcaactctacaaaaaaatgtttttaattagctgggcagccaggcacagtggctcatgcctgtaatcccagcccaagattgttactttaaaaattaaaaaagaaaaaataacaagtgttggaaaagatgtggcaaaactggaacccttgtgctttgctggtgggaaatgtaaaatggtgcagtcactgtgcaaaacagtttggcagttcctcaaaaagtaaacacagaattaccatatgatccagtaattctactcctgtgcattacctaaggcactgaaagcaggggctccaacagatatttgtacaccaatgttcactgcagcattatttacaacaaccaaaaggtggaaataatccaagtgtccatcactgatgaggagataaacaaaatgatatattcatacaatgaaatattattcagccataaaaaggaataaaatacagatacatgccaccaccacatggataaacctcaaaaatgtgctaagtaaaataagccagacaaaaaagggcagatagtcctaagttcagagccanggggta

SEQ ID NO: 679470 - DNA, 936 bp, Homo sapiens
gcacgcgtcgcgttatcatgaatcaacagggtttcatgtcgcttatcaaagagagatgtggacagagctatagaaagcaccctttgttcctcaactccactttacccatattttatgcaagacaaacactgtccttttgggctccctttcttacagatggatcctcttgagaagaattatcgtatctccacgtatttagcccttcaggttaccgcgataaatatattgtatatataaccctttattatgtgcgtatatctttgtgggataatatcattcaggtggtgctggtgtgattatattataatctgaacctaggtatatcctttggtcttccacagtcatgtcgaggtgggtctccctggtatggtaaatgagccaggtataatgtaacttcacgccagcctttgtactaagctcttgatagtggatatactcttcttcaagtttagccccagtctagggtaactggaaattatctggcctgctgggttccccatttttactattaagaagaccagtgataatttaataatgccaccaaatctggcttagtctaagtgagagtgtgacactgtgtggcaagagaggctcacacctcactaggtgcagagagcccaggccttatgttaaacatcatgcacttgacataagcaaatccttaatctgggaaaggaacaggcagcaaagcattatacggtccatcttgaatgaatcccttgaacctattttgatggtcaggaggtaaactcaagcccggaggtgggaagcagtacataaccacccatactgggtggtccgtgatggtaactctctgaaatgcacatggtatattcaaaaaggaaccacggttaaatatccgcgggcaaggccatatgtttaaacagccgtacattataaaaatacaaatttcactcaaacctacagacatagaag

SEQ ID NO: 679471 - DNA, 81 bp, Homo sapiens
aagacagcagcatatatctctgcagcgtacgccgggacggctacgagcagtacttcgggccgggcaccaggctcacggtca

SEQ ID NO: 679472 - DNA, 112 bp, Homo sapiens
ggatggttctgcaggagattctgggacttgcaagaatgctagggcagatgactgatcaatgtggctgacctccgtgccagaggacaaggatcctcaccggtggccatgcaga

SEQ ID NO: 679473 - DNA, 107 bp, Homo sapiens
cgccacgccccgttggtgcccggatctgtagcagcactggctggtgtctgtggcagcgtgcgggcccgtgcggcccggtccgcggcaccatcttttgtctcttatct

SEQ ID NO: 679474 - DNA, 316 bp, Homo sapiens
  misc_feature (90)..(90): n is a, c, g, or t
agggaaatcagagcaagctttttaggacagtgaaactattctctatgattctataatggtgaatacgtgttggtacacatttggccaaanctatatgaatgtacaccactaagagtcaatcctaatgtaaactatgaactttgaaggagaatgatgtggtctatgtagggtttataaatgtaacaaaggtatcactccggtgggggaaaagaaagagagatcagactggtactgtgtctatgtagaaagaagtagacataagaaactccattttggttctgtactaagaagaaattcttctggcttgagatgctgt

SEQ ID NO: 679475 - DNA, 510 bp, Homo sapiens
cagtccccattatcaagatttaaaagaacactaattaattttcacactgcatatctcattccaacttctctgagggttacaactgattgcaaaaagtactccatgctctcaaatgtaaggattcatttatgaaaacgtgaacatcctgcttgtctctaaaacattacaggaaaccttaaaaaggggtataattggtccctatgcgaaaatgaacctgacatatttttataaattatttgcgcatgactatctttgtgtgatagcactaggaagacttctaacgtttaaatactttatttgccctcaattactatttaaaagccctatacatttaagtaattttaccacttgcaaagataaatatttttttcttttagcttctctaaatgcttggaggggacatggaaaatggccttgtttgacacattttttcttggagttaatttcgatcacttcaattggggttttttttcagtttcaagttttgtggtggataccttttcctgcttt

SEQ ID NO: 679476 - DNA, 1013 bp, Homo sapiens
agcctccgagagcgcacgtcggcaggtcgggtccctcgtggagcgaactcaccgacctctcttcccaggtgtatttccaaaatgtcgcttttctaacgagctgacgctggacaagctggacgttagagggaagcgggtcggtgatgaggagtcgacttcaagtgtacctatgaatgaacaatcagataacaaacaaccagaggattaagggctgtctgttcctcaagacactcaagatttctgcttggacaagtggagtccgaagatcggctatctccgttactgagaccagctacggcactggacctggctgcgtgtgcaccagtgccgtagagcaaagatagcatcgcttagaggccagattgcttgtacgaccactcaaaattctctactggcgtaaggcatgtacatgtacttgaaagggacgtgtgtagagccccagaaggtgggacggaaaagcgcatgatgaccataacacgcaagtatggcatagagagggtcattggtccaatccatgacgtgagatggaaccatcgcggattgcaatgatgcgaggcacagaaaagtggtacaccgggtgagacatacgaatgacgtaatccgtgagtgaaacgataggttcaaaaagccagaaggcccagccaaccattaagaagctttttccagacgctttcaacctttacccagcagtctagggggatgatctattgtcaaatgatggctctatgagtgctctgtatcacaagagtcccaacaggtccattgggtcggacgtcaaatctggccaccagaaaggcctggtgggtctcttcgatgaagaacggacgctgaacctacttggcaaagggccttggaaaagcccagaagcgaccttcctggtcattcctgggcggagctacacagttgaagaacaagaatccagctcatcaataaatattgtggacaaagtaatgagatgatactcggggtgggaatggtataaacttcctaaggtgctcacacaacattgggag

SEQ ID NO: 679477 - DNA, 1016 bp, Homo sapiens
  misc_feature (392)..(392): n is a, c, g, or t
gcggatgtgtcggtgtatgctccaccagttgtgaggcttctctttggataactgcgcgcaggatatgccgtcttggaagccgatctcgcagacagagggagtatacgacgcttccgagaagtgtcctggcaacaactggtggcacggaccatcgctggcgcgtggtctatatagggatggactactatgtatcttggagccatgattacaatgcagctagactgatacggtgatgtgttgtattgctgacgaaggaactgtctcgaatacatacacgttcgatatctccataaatattttagtgtgatttgtgcgtggcgtggagacacgacgtgcgaggacagcaggatcagttgacaaccccgaggcgtcgaattgtacgtgttccgaancacttggcaggctcgcgactctccatcttcacactgtgccggtctttccgcagtagatttgctgacgagccaattcaggatgcgtgacagcagcatggccttattgcaggcttagtcaagggtatgacagttgggtggcaaggcgccatagattataaggagggcaggtagagtggttagctggaaccgtcaggcctctacgagcgatcatatcctcgatggagtcaaactgagtaagtctgccttgatgtcacccatgggttctggctccttgtgcagccaagtggctgtacttgtgaacgagtaagttaaggccagaagatggacggacggacggacagcctaaggaatctggtggaggcgaagccaatcgcgagctgggcatcttcatacgacacttgggctccgagatacgcagacaatttgagcctcttgatgtcaatcaagggaagtaaacaaagcgtggaagttttcttaccgagccaataccacaaggtggcccaaatcaacagaaagggggaacccaggggcttgcgcccgcgtgacacagggtggtgacgaaaaaggggagcttactggaagtccctcatctgaagaaacaatcacatccttcttggaggaatg

SEQ ID NO: 679478 - DNA, 876 bp, Homo sapiens
  misc_feature (297)..(297): n is a, c, g, or t
  misc_feature (454)..(454): n is a, c, g, or t
agcggagtggatgacccgcggcgggggaggaggagataccatcagcaaaatgccagacgtcaagggagagtgtgcccccgaacatagtcctggcgactcagagggcaggtcctgtaagcccgaaacctcaggaccccccgcaggaagacgaagagcggcgtaccgaggagcccccgtcccgttgtctttgctgtcacagagtctgacagagaagccgttaatgagagtttccaagtctgagcaagcaagcattgggatgaacttgtgattactacactggtaagagaaggttgtacncggcaagcgagtctggaaggctagaggtcgaaggagactagtgcgaaaatgccgttttgggaccgatcttaaaggagcaatgtatgcaggcagactcgcccactgacttcagactgtggctcttgacacttctgaaacgaaagttacgagagatctngtgctattcactgctagtgagccacgccgaagaacccgcctggagaatcgagcctggaacgaagctctaggacatggatcttgctcagagcaggaggcagaacatggggccctgaaagtcctctatcgtctctaagtacgttctcaagcatgatggcttggctgtgtgcaccagttcgagatgaagcagtgcagaaactagaatagacattacggatccgtgtgtggctactgagagggatcttccaggttctgggccggatgacaactggacatggtgaactagactatccagagccttcaatcccagcgtgcaggaacattccagttcagtatgaacgggctaaatgcaggaactcctcaataaggcagctagtttccttaatcacaacaactaaatggtgaaccaagcagcagggagac

SEQ ID NO: 679479 - DNA, 1330 bp, Homo sapiens
cttcttcatagtaatacccatacataatcggaggcttatggcaacatgactagttcccctaataatcggtgccccacgatatggcgtaaaccccgcataaacaacataagcattctgactcttacctccctctctccatacatcctgctcgcatctgcatatagtggcaggccggagcaggcaacaggttgaaccagtctacccatcccttcagcagggcaacatactcccaccctgatagccatccgcagcacctacaacatcattactccttacaccatagacaggctgatcatacctcataatacatataggagagcccactcaacatattcagtcaacccaacaaataatcacctattacaaaccccccatgaaccactaacaccaccacagtacgcacaaaaccgcccacaccttcattacaggatcctggcagtcccagggccgctacagatgaacacgacaatagagcgtaaatgtacgtccctcatcttgtcttccaccagagatcacatcgacaatgcaatgtgaaactcaccatcagtacgtccgatacacaaccacgccaccacgaaccacccgcaccacagccacgccgacgcaatagacagacgccacgacccgagccgggaaacgggcagcgcagcacgcaccacatacacagtaaccgcacagcgaaagcgaagagacctcagcagacacgaacaccgccccaaacaccgggaccggcacaacgctcacgccacaaacacccacaacccacacaccacaccgcagccacacaaacaacgagcacaagaatgcgggcacacatacacagacccacccgccagcacaaaaacacaaaaaaccccacaaaccgaacaaccacacataacacaacccgggcaccgggcacgccaacgcaagacacacacagcggcctaccccaacgcggacaacacacagacggaggacacgcccaggacaaacatgaagcaggggagcgcaagagaacgcgacagcccccacgagccgaaaggacaaggccggcgacacacatacgacaagccaagacaccgcccggggcacgaagagggaccgcaagcgaccgacggcgaggacagagagcaagcagaacaacagcacacgaagcggagcgacccccaacagccaccatgccgacgaggcaccagaacgccgcacaaccgcccccacccggacgcgcgaggagcaggccgaacaaccagaacaaaacaccgccaggaaagggcgccccacgaccgcaagtcggcgaagaaaacaagaaacacacagcagcggacaccccgcagggagccacgaacca

SEQ ID NO: 679480 - DNA, 244 bp, Homo sapiens
taacattattcgggctacacgcagtgcagtgttgtggccctacatttaagttgttttcttatattattctgcatttaacatgacggttaacatggaaaaatcaacatcacgaagatcctccattgcgtggagccacactttaaatgataatttctctttgactatcctcagaataaatattcgaattttgaatatatttagcatatgttgtctatttttaactaactccatatgctgccagtat

SEQ ID NO: 679481 - DNA, 241 bp, Homo sapiens
agcaactaagacgacatgagctacaacaacagaaatcatacacaaacataatactgagataaagaatacagacacaaaagagagatagtggaaatggcgcgccattcacaactatctcaagactatagtttgggttacaaaagtgtcttctcccgactattatgttcatctggagagatccccgtgggaaaggactctccagcaactgaccaagtgagaactgcccagccactgtccctct

SEQ ID NO: 679482 - DNA, 741 bp, Homo sapiens
  misc_feature (741)..(741): n is a, c, g, or t
cctaagcagagtgattacaacgttatcgaagcatacttcaacagcttggtgggggtctacctccaggattagtacacctacctctatgtcctatcacgatgtagacaccgatcatattctctatataagacgcgatccacgttttcagataactgaccccgcagacccatgatgactactagcgtctccttaagacgcaaaaaccgagcgacctaccaactctctttcaagacatcaagactccatcttacgatgaatcaccttctaacccagcacaccataaaagctagtcccgccctggcaatataattgtaccacagacttctgagctctatgccctctgttctgcccccacggaccccgatatctgcaacttacatccgactcacttcctagatcagtcactgattcttattgagaggatgctggaacacatgacctagatacacaggctcctatgactgaacgctgtactcaccgaggctccaatttacaagcctatttctacaaacacgtgttagataccttctcgatgccaaacatttttgtaagggcacactttcgaaggaaaataaacccactgacttagccattttacatcacgccaatagacagcttatcttacctattctaacaagccctctgtgccaactccaaaacaatgctttctgatgccgaaagatgaacaaaactctcttgagtttacttggcagaggttcactccgaggggcgccttgtccn

SEQ ID NO: 679483 - DNA, 130 bp, Homo sapiens
tggtttaggacatgtcacacggcaccacggacactgcagtcagcctagtccaggacataggtgactcgtacagcaggcagcaacctattctatcaacaaataaatgatgcgggtggggataccagcgagg

SEQ ID NO: 679484 - DNA, 276 bp, Homo sapiens
atacatacatgtacctccggagcacccatctagtaccaagcggtgtgggagtgacaaagtcaggtgcatcaccatacttgcatatatgagctgcctccttagcagactgcagagctcctgagccacctaccaatgatgataaaggtcatagtcataggacttgggaagatcttcagggccgtacattaaaagaaagcttttgaagtctgacctccttataagccttcaaggtatggacatggccggctactctttctctgcttcacaaaacaacaa

SEQ ID NO: 679485 - DNA, 673 bp, Homo sapiens
gaggctaattattcattgaagcccagctagaggacactgcgtctatacgcagagagctgaatggtcaactggccgaagtcttgcacaccacctagacgcagaaacttgagacaatgcggctacagcgtctcctctccacaatagactaagctgttattgacctaggagacatggtgaaggcccgggccacacgacttttaacagacttgctgagccaatgttgcgtcctactcagaggagtgtcagagtatctattagaggcctactctataatgcactggcagttcatggatacttatggcgtaagctggcactcttttgtgtgatgcagttagatgcaccatcgaaagacatgcggatcggaggtaagtgatcacagacttcgtcaactgagaggatgacgcctgcctgcttcataatatttaggcaaatatctaacatttgacgtttcactccttggcttacatattcttattgtgttgtaagcaaaggggcgaactttgtgggcgccctataattcaacttccacgatggaacgattctctggcaaaggcttaaaggctcccgaacgaaccaactagagttgttacacaggaaatcttttttgggatggaacaccaccacaattccagctgatttggcttagttgggtgggttcttgaagaagcacagt

SEQ ID NO: 679486 - DNA, 169 bp, Homo sapiens
  misc_feature (138)..(138): n is a, c, g, or t
  misc_feature (166)..(166): n is a, c, g, or t
cacgcatctgaacagtcttgctgtagacagactatactgagacaacaagttgtcaccagcagaagatagataatatgacctttataacttgatgaattaacttaaccaagagggtatgtgtagtttacttatttaccnctaaaactttctggtgtctggggtaccnctc

SEQ ID NO: 679487 - DNA, 348 bp, Homo sapiens
ttctttaaccactttttaagttacgaaggccaaagaaaacacaataagaataatccaccaagaggtttattggccaccggccattctgggaaggccggcggataaaagtgagtttaaactggcagattctcctggataggctagaataaagaaagtttctctctaaggggagggctccagctaccagagggggataaatatagaatcaatcaaatcaaggtggggcaacagggaagtaaaaaaggctttggatcggtcccaaagattggtgattggcataaaaataaaattattaatcattggtttttaaaatctaaggtagagagccgggcaagggtaccgagctcg

SEQ ID NO: 679488 - DNA, 234 bp, Homo sapiens
tccggcgcacagcttctctatgggaggagtagaatacaggccgggcagtagcttacacctgtaatctcagcacttttggaggctgacgcaggcggatcacctgaggtcaggagttcgagaccagcctgagcaacataagagaaatcttgtctctactaaaaatacaaacttagccagacgtggtggcgcatgcctgcaatcccaagctactctgagacagctgtggctggccgg

SEQ ID NO: 679489 - DNA, 208 bp, Homo sapiens
ctctttatcaagtgtcgaaacccatctctcttactaataatctataagaacttgctgggcattgtggtgcacacctttggttccagctgctcaggaggctgaggtgggaagatcacctgatgtctgggaggtcgaggctgtatgtgagttgcagttggcggccacctgcatcgtccagtcgctgagctgacacgacgtgagtaccctg

SEQ ID NO: 679490 - DNA, 393 bp, Homo sapiens
aaatatcttacctaagatcctagtttctttcactttttttttgagacggagtctcgctgtcgccgaagctggagtgcagtggcgcaatctcgggccactgcaacctccgcctcccgggttcaagcggttctcctgcctcagcctcctgaatagccgggaccacaggcaagcgccaccatgcccagctaattttggtatttttagtagagatggggttcaccatgttggccaggttggtctcgatctcatgacctcatggtccgcccgcctcggcctcccaaagtgctgggattacatgcttgagccaccatacccggccaatataagtagctttttctttgttttggtacaggtctggtttgtttgagatggagtcttgctctgtcacccagg

SEQ ID NO: 679491 - DNA, 181 bp, Homo sapiens
caggggtgtggggagatgagggaagcccgacacgggcggagcgtcagaaagggggcgtcaccaggcttccaggcgaacaggtctggaagaccagctggcgactaacagtccccgtggccatcccggtgagggtgacgttagcattacccccaacctcattgtagttgccgaagctggatca

SEQ ID NO: 679492 - DNA, 116 bp, Homo sapiens
tgcaggcgattctaaggatccccttactacagcgaggagtaggatctcttacttacgtcccttagtttatgttatagggcttcctaaacacctgagagggtgtgcatacacagggt

SEQ ID NO: 679493 - DNA, 483 bp, Homo sapiens
caataagggacttcctgagacaaaatggaaaaaggagaattaaattaaaatgcccaactaatatttatctactacagacataatatttctcagttgtgaactaattactatgcttggaaaatgctagcatcctcataaatattttggttctattgggatacaaaatctgatttcgcaaactttgcaaaagcacattttggctgggcacaatggcttaagcctgtaatcccagcacttttggaagcaaaagcgggcggatcattaaggcaagagaaccaaaacattcttggttacaccaataaacccggcttttccttaaaattccaaaaaaattttcccccgtggtggggggcgggaacccctttattccccactttctttttgaaggctttggggccgaaaaaaaggcttgaaacccccggaaggggggggcttttctaatgggaccccaaaaatcccccctttttgccccaaaattttttg

SEQ ID NO: 679494 - DNA, 175 bp, Homo sapiens
tcttctatttggttagctagtcaataacctattttccaagcctactacgtaaagagcattatgtgtgttttgggagtgggggatttagtttaattccttccctatatttgttaaaaatgtattacatataaagcagagtgttgtgtgctgtgatggatccttcccctttcagggg

SEQ ID NO: 679495 - DNA, 1006 bp, Homo sapiens
  misc_feature (690)..(690): n is a, c, g, or t
ataggcaggacgaggcctggtgttaatcctttgaagcgccttcacctttctagtgcgaggtgtggtctgtatagttccgccctggcagtgggataaagaatagggtgaggcagcatgtttgtgcactctcgccctggatgcgtggaggctgctcctactgggtcgtagtaggataacggatgagacctgtttgcctgctgctggactctctcacggatgctggaggctggaggcagtgaggcagaacaggcgagggcgagggatttggactgcctcatgcagcgacctcgccttccgctgcgcctcctcccagaacccaagaagcctggaacctgtggcgtcagccctgaaaggaggagacggcaacccagccgcgcttttgcctgcactctccctggatgctggaggctggaggcagtgacgcagcaacagcgcgaggcgatttggagcggctcatatagcgacctcgccttccgctgcgcgtcctcccagagcccaagaagcccggaacctgtggcatccatctctgaaaggagaagacggaacccagccgaggcactactgggttggggtctccacgaccgagctggtctcatcaagtggcgtcaacaaggggctcaaacccgggttgaggggttgctggagcgacggagaacgtggaactacactgtaggacaccagagtactctntaagcaaatccctttgtctgcagatgtgggattcccgaatctgcgagaagtagcccaccatgacgaagctgctttgctttatcgcttttgcaaaaacagaacaaggggacatgcttgggaacaggcctaagcctgtcataaacagggcttaaagctgacatgacgggattctgcccgaatgttacgtggtctgtatggtatacgccaatggtaaattggtagttatggggcagggtaggaaacctggccccgggggaattggtcaccaaaagtgtggcggctaaacgttttgggggtacggcggggggttacccca

SEQ ID NO: 679496 - DNA, 831 bp, Homo sapiens
  misc_feature (673)..(673): n is a, c, g, or t
gacccctccctctccgagcttgagaatttttcttccgaaataatcagacttcaagtccatggcaggacctcgtacatgaatttgatgagaagctcaatgtctgcttacggaactacaacgccaagaccgagaacctagctcccgtgaagaaccagtgacagatccaagaggaggagagagaaccgcgtttacaggtacgaggagtaagaatgtcttgaatgtgccctcatccatgcattcgagtcgagagccacatgctaggtccgttgttctccttgtacatagtggctggttgctgtctatatggttgtatgggctattacatttcattttcgtgttggcagcggagcagatgccctggtacttgcgtgtcgatatgcgtctataggtatgtccctttactaagtcccctgtaggagaactttcttaaagttgaaaccttagaggaagtgacaggtttgcctatgatacaacacatggacagttctcgaggagcacagtgaaactatcagggtctgtctatcttaagctttctttatatcagaggaagatccagcgagatgattagaagataaaggccagaataaattaggttaaccatgcaatggatgaatctatgttataggactagtttgcttcaagaaagcagcagaattgtgaaaatcccgaattnttgacaggcccctcagggcctggacgagttatctacagatgtaaggatatgtccactaagaaaagcgtctaaagctgaactgagaggcacaggggctaccctggacacagtagaggtggaaactcaagttgatgtggccctttgagtatgcagattcc

SEQ ID NO: 679497 - DNA, 335 bp, Homo sapiens
ttgcttggcaaggccaagggatgggaagagaagagaaaaatcgctttgttttattttttgggatggagtctcgctatgtcgctcgggatggagtctcgctatgtcgctcaggctggagtgcagtagcaccgtactggctcactgcaacctccacctcctgagttcaagcgaatttcctgcttcagcctccgaagtagctgagattaccggcgcatgtcaccacacccagcaaatttttgtatttttattggagatggggtttcatcatgttggccaggctgttctcaaactcctgatgacaagtgatctgcctgtcttggccttgccatatgcaa

SEQ ID NO: 679498 - DNA, 119 bp, Homo sapiens
ctgtgcgttgattcatagaggatccccgagtgtcttcaagaagttatgtagttgtcacagatttttctttgcattgtagaacatactccttcaacaatgtcctgtagtgccaaccttcc

SEQ ID NO: 679499 - DNA, 265 bp, Homo sapiens
taaatttaaacagtctcactgtgttgcccaggatggagtgcaggggcaacagtctgtggctcagtggcaaactctgtgcctcgcaagcagcgtgggactacaggcattgctccacgggtgcccagttaaattttatttgggtgattccttaagtggcgacgacaacgggttcccagcaatggtaggcaaaggatggactcgaagatctgacctcaagtgaatcatccaccacaatgaaggaactaaaaagcgtgaagacaacaaa

SEQ ID NO: 679500 - DNA, 910 bp, Homo sapiens
  misc_feature (236)..(236): n is a, c, g, or t
  misc_feature (416)..(416): n is a, c, g, or t
  misc_feature (492)..(492): n is a, c, g, or t
  misc_feature (501)..(501): n is a, c, g, or t
  misc_feature (514)..(514): n is a, c, g, or t
  misc_feature (545)..(545): n is a, c, g, or t
  misc_feature (564)..(564): n is a, c, g, or t
  misc_feature (631)..(631): n is a, c, g, or t
  misc_feature (637)..(637): n is a, c, g, or t
  misc_feature (650)..(650): n is a, c, g, or t
ggcagcgcccggagagctcttgcgcgtcttgttcttgctggtgtcggtggttagtttctgcgacttgtgttgggactgctgataggaagatgtcttcaggaaatgctaaaattgggcaccctgcccccaacttcaaagccacagctgttatgccagatggtcagtttaaagatatcagcctgtctgactacaaaggaacaatatgttgtgttcttcttttaccctcttgacttcancctttgtgtgccccacgggagatcattgctttcagtgatagggcagaagaattttaagaaactcaactgccaaggtgattggtgcttctgtggattctcacttctgtcatctagcatgggtcaatacacctatagaatacaaggaggactgggacccatgaactattcctttggtatcangacccgaagcgcaccattgctcaggattatggggtcttaaaggctgatgaaggcatctcgttcaggggcctttttnatcattgantgataagggtatncttcggctagatcactgtaaattgacctccnctgttggccgctctgtggnatgagactttgagactagttcaggccttccagttcactgacaaacatggggacagtgtgccagctgntggaanctggcagtgtacntcagctggaggtgcatagatcgaggatgttctccaagcgagtgagggctggtgtttagatgcagtggggtggggcatgaaaagaaaccgtcgtattttgccttggtaacccgtttgtgtccacacaaaattaacttgggcactgcctgagtgcttttccatttgtccggcgcttggttgtgtgtttggaagggaatgggttcaaggggggttgccgagtgtgtgggtctaatgagaaaactgagacattctgtgtggtac

SEQ ID NO: 679501 - DNA, 494 bp, Homo sapiens
  misc_feature (67)..(67): n is a, c, g, or t
  misc_feature (132)..(132): n is a, c, g, or t
  misc_feature (144)..(144): n is a, c, g, or t
  misc_feature (146)..(146): n is a, c, g, or t
  misc_feature (149)..(149): n is a, c, g, or t
  misc_feature (155)..(156): n is a, c, g, or t
  misc_feature (166)..(166): n is a, c, g, or t
  misc_feature (168)..(168): n is a, c, g, or t
  misc_feature (175)..(176): n is a, c, g, or t
  misc_feature (190)..(190): n is a, c, g, or t
  misc_feature (207)..(207): n is a, c, g, or t
atcccgaatggaataaatctagcacccctgatggtgtgcccacactttgctgccgaaacgaagccanacaacagatttccatcagcaggatgtgggggctcaaggttctgctgctacctgtggtgagctttnctctgtaccctnanganatactnnacacccactngnagctatnnaagaagacccacangaagcaatataacaacnaagtaaataaaatctctcgacatttaatttaaaaaaaaaacctaaagtatatttccatccataaccttaaagcttctcttaatatccatacatataaactaactataaaccacctagaaaacataaccaataaagaaataattcagaaaataactaaactcaaagtacccctatctcattcccacagtaataacaccctttatatcccagaataaaaaaatagaaccccagactctatcgactatctaaaaaaaaaatatattactgctatcaaaaattcaaatcag

SEQ ID NO: 679502 - DNA, 365 bp, Homo sapiens
tcactctacaggatctcggactccacttggttgccaggcagattgctgaactcaggagttcaagaccagcctgggcaacgtggtgaaattccgtctctgctaaaatacaaaaaattagccgggtgtagtggtgcatgcctgtgatcccagctactcaagaggctgaggcagagaattgcttgaacccggaaagtggaggttgcagtgagccgagatcgtgctactgcgatccagcctgggcaacagagcgagattccatcttcaaaaaaagagaaagacagaacacataacacggttaccatggaggaatcctgcagtccaggggacattctcaaacatcacaatgattggtgtcaacaattgaa

SEQ ID NO: 679503 - DNA, 117 bp, Homo sapiens
ccgtaatggaatcatcttaacgtgaagatcaagcagaacacaacaagcccctactgatttctgggtttctgccacggcacaggttcatatccaggtgaatggcagatctgagacgat

SEQ ID NO: 679504 - DNA, 160 bp, Homo sapiens
gagtaagttctatggcagtggtcaaatgcccagtgatctattctggatcacacttcttgtcctcctgcattgataggtttacctgtgtagcagtaggacattgtggagatgaaagtgttgtcattttctgagtctaggacataaaggcattatggccccc

SEQ ID NO: 679505 - DNA, 261 bp, Homo sapiens
agatccccctattctacactgaaattccattgacatgtatatgctcgataactaccttctggttttactttacatagtattgactaacccttgacttatcaaaattatctcactcatgtcactagctaatagaaatcatggggggcctatttaaggcctcttggcgttaatggctagttccctataagggttctgtgccacacacacacccgccccccgctcccctcacacacgagtcctaacttcttcacttttattcaa

SEQ ID NO: 679506 - DNA, 669 bp, Homo sapiens
  misc_feature (28)..(28): n is a, c, g, or t
  misc_feature (73)..(73): n is a, c, g, or t
  misc_feature (75)..(75): n is a, c, g, or t
  misc_feature (87)..(87): n is a, c, g, or t
  misc_feature (111)..(111): n is a, c, g, or t
  misc_feature (118)..(118): n is a, c, g, or t
  misc_feature (185)..(185): n is a, c, g, or t
  misc_feature (188)..(188): n is a, c, g, or t
  misc_feature (241)..(241): n is a, c, g, or t
  misc_feature (251)..(251): n is a, c, g, or t
  misc_feature (272)..(272): n is a, c, g, or t
  misc_feature (335)..(335): n is a, c, g, or t
  misc_feature (400)..(400): n is a, c, g, or t
  misc_feature (431)..(431): n is a, c, g, or t
  misc_feature (448)..(448): n is a, c, g, or t
  misc_feature (459)..(460): n is a, c, g, or t
  misc_feature (470)..(470): n is a, c, g, or t
  misc_feature (486)..(486): n is a, c, g, or t
  misc_feature (541)..(541): n is a, c, g, or t
  misc_feature (555)..(555): n is a, c, g, or t
  misc_feature (609)..(609): n is a, c, g, or t
  misc_feature (667)..(667): n is a, c, g, or t
tgctccacaatcttttcttccacataangccccttccgctttcgtactgcgttcatgtacttccgggcttggntntcttgggtcggncttctccccaaagtgcaagtattnctcctcngtagttggcacccagaaggggtctctgggaatgatctcccattggctgtatatactagttgtgggcnggncaggccacttgtcctcttcctgatttcatcagcaaaaccaaagctttcagcancaggctgctntgccttgatgatgtacatgtntgtcccttctttcttttcttcttgtatgtacccgtccttctctctttgacaagttctgctttntctcgtccggggacatctccaggggctctggtggtcacatgtgtacatagctgccatcaggcgcnggggtttcacttgctgtgcttagcgtcttgnttctttttttgtggggntattagctgtnntgagaaaggnccatagcagtcagtgngtggagattctcctttctgtgatgtcctcttctcaaaggcctcagagcagccatnttgtagctcttggntttcatttccaccagaacaggtttcattttcctcctgtccctcttttgccagancacttgctccttgttcctcaaatttactttaggtcccatttttccagtacaaaacagnct

SEQ ID NO: 679507 - DNA, 89 bp, Homo sapiens
tgctgtgtgctgcccgcctgcctgctggctctcccccagccccacatcccctttggaagagaatgtaaaataaacctgggcccaaggga

SEQ ID NO: 679508 - DNA, 201 bp, Homo sapiens
ctcacgtgatcgacggaacttgtacagggaggcatgcagctgtactggtgaatacacgtctgaccaggctccatgtttacgatcttggagccgtcatcacggtgctcacgtgtctgacggagcttgtctatgaaggcatgcaccgcacgtggtgaatacacgtcgatctgcaagcatgcgtgcatcctcgggtcctggaca

SEQ ID NO: 679509 - DNA, 398 bp, Homo sapiens
  misc_feature (74)..(74): n is a, c, g, or t
  misc_feature (392)..(392): n is a, c, g, or t
  misc_feature (394)..(394): n is a, c, g, or t
catgaaaaccataaagatatgaatagccttttttcaaaatggggtatttggccccatatttgttgccatagcanggcacccataataagtgcctttacatgtattaactcatcctaattctcacatgcatccctataaaatcagtataaactgaagaactaaggcaggcagatcacttgaggccagcagttcaagaccagcctggccaacatgttgaaacctagtctctactaaaaatacaaaaaattagccaggcatgatgttgtgtacctgttatcccagctacttgagtggctgaggcatgagaattgcttgaacccgggaggtggaggtttcagtgagcctagatcatgccacctcactccagcctgggctacaagagcgaaactctntnataa

SEQ ID NO: 679510 - DNA, 1355 bp, Homo sapiens
gtggtgtccccacggcgggcatgcaagctggctgtgctgagcaggctggctgaactgctggagtggctgcggagggagcccgcggcggcggcagcagttacatgcgaaaatggcgggagaccgtggattgacaaccctggcgagctgatcaccaatgaccgcaggaaccatgaatgacgccttactggaaccaccgccaagtcaacgttccctcgagcatcgactgctgagacaaaccccgtcaacacagggtcgggggctcggaccggggcccagctttcaagccgagctttacgaaaaaactcaggtgtcaacggacaaaattctttcctatttttcaaaggactgcaacaggaaattcttagcttggtagtagcacagagaaagaatcacaaggatggaactttttaggaaacttgcgcttggacggaagaaggtggaaacttttaggaactcacggacgaggaaggcaaagtgattcaggtaagatataccacacgcgaagttacaccttgggagaaaaacggccggtattatatggcagttcacaggaagtttaccgttttctaggaaggggcagcaattgtagtggggacgaattagtttatggagttggaaccaaaatttgattgatttgggaaggagacacaatggaaaaacgacacaagaggggggcattggggagaggcacagagattgtagaattaagaagccgaagggatatccgcacttggagattgcaattcaccttacgttgggacaaagaaggacaaaacatggaaacagtcggggttatgggatcacgttattgcacagacgaatttttgatttaagattagtatcaagcagaatagggcaaaagtttggacaccgaagatttagaggtttacgtaaattttacgagagagggtaggattaagtttaacgatcacgcaagtttgcgttaacgatactagtttaagaggacaagcaagtttggtcgctattgggaagaacgattttctgggggcgacaaggcaaacaggtggggtggcgaaaaaaaaagcagtgatttgacacttataatttgtacactgtggaagtttgggaaattaatgtggccaagccaaagtataggacaaggagaaaggtgttgtggttacaaaggattagtgcaaaggacaaattttgtggtgagagaacgcagagaaaaaatcattgaggataaatttaagcatgattttgcacacctttttacaagggatatactttagacgtaaatgacgaaaagtgtcaaattaaattgtgtagatcagcaggatatagtattggtatagaatagagatgatagtagaggaggccacaagtgttaggac

SEQ ID NO: 679511 - DNA, 1066 bp, Homo sapiens
ggattgccagcatccccttcccttgcctctatcgcacggtataactggccaattggacggcgcttaccgtttcgtgggacctgttattctaaagcattatggtgaccttccagtttcgcataacttgggatgtcccgttcttatatattcgtattcgctccatttatgggtcttctccctgtcttcgtcgcgcaaatactttgttgttgacttaattgtataccaggtaattgtgcggacatcgtagacgaggtgtagttccttattggcctgttacaagccgtaaatcgcaaagtttgtttgcttttgtaacaacatgctttttgcttcaatgcatatgtgacaaggcccaaggcggttctgtgggtgttcatgaactagacctactttaacacattgaaccgacctcttttttccacagtcaagctggtcttctgtcacctttagaattcctcgttcgatttggtaaccgttccaatatgcccgctgggcatgtgaaatccttttccgtcttgtttctttggtaattttcggctactatgtcagtcacgcatgttgctgtcaaattcttatgtggctctggccccaggacggctgtcatgtctgccctgtgcctttactaagagtttggtacaatacgacgaatacggggactattctctgtgtgatattagtataattcttctgccactgaactgctgcatgaaaagtttatcctgatgacttgtctgttaccctgcctctcatgtataatagtgtttaccataacataccaataacttcagcatctacaattcagagcctttcgagaattctggctttcacgtgtagaagcagaaagtgtaagaggaaatcagtgccctagacatacttttctgtctaaacagaactgtctacagatacatttggtacaggttatttttcattgtgctttcgacatccatgtctctcgtgatacagatggcccataagtaacgaatcatgtggctgtaccttcctccacaagtaaatgggatggataattatcgtatattaagatgtgattctcttttttatcctaagtata

SEQ ID NO: 679512 - DNA, 427 bp, Homo sapiens
agggttaattttgtgtaacctggcacccaacattatatgtctaggaatctgtccctcaataggatgaatggtaaaaacatatgtagagagatattaatcgaagtattatttgtaagaacaaaagatggaaacaacttaaacacttgtcaatagaaaaatagtgaaattatgatttattcttactattcttccgttaaaaaagtgagctagagtgtgtgggggcagagtgtatgagagaaatctctgtaccttctgttcaattttgctgtgaacctaaaactgctaaaaaaaataagtctactaaaagagctagagctataaatgtactgaggcaggaaaatcacttgaacctgggaggcagaggttgcagtgagctgagatagtgccactgcactccagcctggtgaaagagcaagactccatctta

SEQ ID NO: 679513 - DNA, 1588 bp, Homo sapiens
  misc_feature (623)..(623): n is a, c, g, or t
aagttcaaagatcatggcaatccttcaaaaacatggtccctcagcaagcccttgctgacttcgacaactggtgacgaaaatgagcactaaactgcggacggaagcttgctggctcgcgcgcgactctggctggacagctaaacaggaggagcaccgcaacttcctgcctgagcctcagaactcactactctggccacactgcgctgccacacggctggcactaacctcgctcgacatcacctggctgcaactctagagacccccgaggacctacgcgctactccaggagtcttcagcaacactggacaacacacccccttggaagaaccgcacggacaccacttgcgcgtatctctattccaccacccacagtatgcgtgctctgcacacggccaccccgcacaccgactgcgctaccatcgctcctgcgtcctatcacacctggcgggacatcggcacactgcctgcacctgcgcgcaacgcacactctgccccacccacactttgccatatcctggagacatgagacacgggcacgaggcacaacgaacaccacgccaaactatgccgtagcgcacgcacacacctttgcacaccacatctactcatgttctcgaaacacntcgagtccaacgggagcttgcttgaccgccatgagtgaatttcaccctgacggctgctagctatcactctactacataatcgaattcacgttatatgcatacttacaagtacacgtttgaaacagttaccaacactctagagcacctactcgaagaggcgcttgggtaccaacttcagtattacccattacgacattccggcgacgtaagtacacagttccgcgtaacagcgcccagaaacttggatagacccctgacgaacaacggggagtatctagggccttcgcggatccacacaccatgagatccaacccggacgttccattaggcgttcctttggaacccaaccgccataataacacattgggcccatagaaacacagccaagttgggccaaaacggggacacacagcacaaccataggactcttacgacttggagacgcacaacgccttttacagcacatgtcctagatgacgaacgaacccttttgcaccgcggcatccccacgcggactcccaacacgcccaacttctcgtttgcccattcgctgggagtttaacacaaacgaactttgggggacatcatctcgtaccgttgccaacgcttcgcaatgaaagaacctcggaggaacctactgacacacaggctatgatagccaccaaccatactttggtatggcgcgctatctcgcgaaaccgaacagcttagcagaaacaagagttacgccaccattgcacaccaggctcatggcaaccaataccatcgaccacacgcgaagcaggacacgatcacacacaaaggtcggcgcacgcgctatcacaccactacaacatgggacacaaaaggaaagcatattaagagaccaatacaccagtagcagaccctttaggcaaaaccatagatacaccagcaaaagtagagacagacggacccacacaaggggacaaccgaacacgagacga

SEQ ID NO: 679514 - DNA, 146 bp, Homo sapiens
cagacacattacaggaactggctgatattccagtgactatacacgaccatctcaatatttttggatgatggctcgtttatccccgttcattctgatgaactttggaaaactcgagttatttttactgatcacctaatcaaattggc

SEQ ID NO: 679515 - DNA, 409 bp, Homo sapiens
atatcagctcggtaccttctttcgccaggcgggtatggtggctcatgcctgtatcccaacacttgggaagccaaggaggacgaatcacttcaggtggagagttcgaaaccagcccggccaacgtggtgaaacctggtctccactacaaataacaaaagttagccaggtgtgctggtgggtgcctgtaatcccagctacgcaggaggctgaggcaggagaatcacttgaacccaggaggtggaggttgcagtgagcagagatcacgccactgcattccagcctgagcaacaagagtgaaactccatctcaaaaatatataatagcagccaggcgcggtggctcacgcctgtaatcccagcactttgggaaaccaaggcaggtggatcacctgaggtcaggaattcgagac

SEQ ID NO: 679516 - DNA, 428 bp, Homo sapiens
cttcctgtatcagtcaaacgcctacattttgctgtctaacatgaattcatcgttatggcacagaaaggacattcaacacccgatgctctcatcacagagagatccggccatgtcccagctctgcccttgctgctctgaaattaagccaggggatgtactgatgccctgggaaaaaggaattcacaagaatgggtctcattcataggaccaaccctccctcacacacctacccactttggactgccatgtatagttggtaggtgtgttcactgccaaaggctcagggctgaagggacacgtgggagccgaaatcctgcctgggttgcactggtcaagcaacatgtccacccaagaagtgccttcctggaatccccagaaggcactagacagcttaggggctgtcctgcggctccccattccccacaggg

SEQ ID NO: 679517 - DNA, 371 bp, Homo sapiens
cgacctagaggatcccccgccaagtggatgaggctgggatatctacattgctttgtggggagttggagtcagtgtggatgaggctgggatatctacatgctttgtggggagtcggagccagtggtggatgaggctgggatatctacatgcttggtggggagtcggagccagggtggatgaggctgggatatctatcattcttcgtggggagttggagccaaggtggatgaggctgggatatctacatacttcgtagctacgtgaggagccaaggctggatgaggctgggatatctacattcttggtgcggagtcggagccaaggtggatgacgctgggatatctacattcttggtgcgtagtcggagtcaa

SEQ ID NO: 679518 - DNA, 186 bp, Homo sapiens
tcggtagctagctcaagttagcagtggagttaggaatggaagtcttatgagctgtttattcttacttgatagtttgtggctttgagtttggttgctttgagggttggagggaaacgccttgttctcaggggtctgtatagaaacaacatacagcctgcatgcggtggctcacgcatgtaatccctg

SEQ ID NO: 679519 - DNA, 240 bp, Homo sapiens
gggggcccccccccattattttttctggttccaaaagggggggggaagggggttccctttttggttccacttcatggggggctggggggggactttttccctccccttttaaattaggaccctggggtaaattttctttttccaatttttgccccgggggggggggggggttatttaagggggaggttccttaaattttgggggccaaaaaaatggggggcctgggggccctcccgggga

SEQ ID NO: 679520 - DNA, 538 bp, Homo sapiens
ttagaggatctccgggagccttaacctgtgcacgtgcccagtaggcatcgggcacatctgcatgctctgacagctgcccaagtggcaggcaggctgtcccctgaggtctgcctgtccagcccttcccttgcccagagaacccaggcacaggtagcttctgcaaagaaggagaggcacagggtgggggcggtcagtggtgtctggtggatatcactgggctttggacagcttggcattcttctctgccccttctaggtctcagcggctctaggtgtggcagaaggacacagtagggcgtggttatgctcagccagttgccccagtgcccttggtgaaaccccttggctgagcctttggtgggcactggtgcactggatcacggctgggttccacttttcagtacacatgaggcagcacttgccgcacctggtcccatatgctacagggtctgattggcccagcgattaagtggtcagcttgattcctgccattcctagcacgggctgccagtcagggaccagtgtggagtactggggag

SEQ ID NO: 679521 - DNA, 220 bp, Homo sapiens
cctgccccgtgaatgctcgaccgtcctgtgaaggagagaatgctgtgctgctagttggaaactctatgaggcctggggtcgaggtgacgctgtgagcctgtgatggggaggagctgccggtcatcttgccagagcagctcaggccacatgcatttcctggttcttccagggggtcacccgcagaggatgcttggcgaggggcacccttttagccttgggc

SEQ ID NO: 679522 - DNA, 870 bp, Homo sapiens
  misc_feature (613)..(613): n is a, c, g, or t
gggtggcgtgtgagaggttttctcgctctagggagattcttcaagcgtatcatctatgtcaacggacgacaggtgtgtcccttccttcatatgaggaacgactcagggatcaagaagtcattcgaaaagctaaagaggcactattcgtaccggtgtgaatagtccgggtttggcagcaattgttgcgtatggattatataaactgaagagcaggggaaatatgtaagaatgtccattcatctgatccagatgcgtgtggagccaaggttgtgtaggagcaatgacgtgtggtatgggctattccatgtatcgggaattctgggcaaaactaagccttagaagaagagatgctgtcttggtgcttgtggaggagcttgctgaaggtaagatgtcttattattaaagttacctattatggtggaaataaactaattgtatgggtttagatggtaacatggcatttgaatatggggttcctttcttgggaggttgattggttggtgaccgaattactagtgactagttactacactaggtcattcaggaagtcatgttagtttaaagttgtcacctagatgccttgatggtggtgaagtgtccaccttcttaattntgaagaggacttagttctaacgagataacaggcaatcctggaggttcccggttgtgcgcaatgccgatatttgagttgcgtacaaatcatttgcccagtaataacattggtggcgtggtaccgggggtgttaactttgtcccatgtgggtatcttggggtccacggagtatttgttgttccccacgacacacggtcgttttaaaacaaggcgcgaagcaaaagtgccgtcggtaaaagcaataaccaacgtgggtaa

SEQ ID NO: 679523 - DNA, 341 bp, Homo sapiens
  misc_feature (28)..(28): n is a, c, g, or t
  misc_feature (158)..(158): n is a, c, g, or t
aggaaaggagaccggctgagcctcaggntaattgtactgagtaaggactgcagctcccggtgaccgcgagagtcggtgaggtgggactggtgactctcagaagctcctcggtgcacttttgtctcggcagactgggagggagcaggcgctcgcggaanacgtcacttactgggtttgttcacctgtttccagcaagttttggtcttttgggcagaagcctgttgaccaactgtgggccaccacagtcttgcacagaaaggtggcacccggagtggtttgtggccctcactaccaaagccacgggaagcccaatttccagtaggattgccggttttgaattc

SEQ ID NO: 679524 - DNA, 226 bp, Homo sapiens
catgtgggcagtgtgcggcagtacaaacaaagactttcctgagaggtcacatgcattgcataaagctgcagccctttctgaagcaatgacatcttctcctgggggcaaaggggttttcttctgaatcagaaccactgcaacttttgcgtttcttccttgtaaactttgcctgactatttccactctggtggcgcactcagactgcttttctttccattcagcctct

SEQ ID NO: 679525 - DNA, 280 bp, Homo sapiens
  misc_feature (13)..(13): n is a, c, g, or t
  misc_feature (50)..(50): n is a, c, g, or t
  misc_feature (117)..(117): n is a, c, g, or t
  misc_feature (279)..(279): n is a, c, g, or t
cgccatacgcacntgcttcttttgcccatgcatccgcacggacttcgccngtcgagatcggcaaggaagaattcataaccaaaacgaccgccgccgccactggcaccgcgttcggtnttgccatcttcttcgacgagaacgctcacggaaagacgcaccagcgaacgggacatccgccgcttagcgttgccgtcggtgggccgcaaccaaaatttaatttcataggacaccattgagggttgggcagttcatttcctgttacggggtttgttccgtttng

SEQ ID NO: 679526 - DNA, 1234 bp, Homo sapiens
  misc_feature (83)..(83): n is a, c, g, or t
ttttatttcttatttttgcaaacaaaagctgccacatgtttattgaagacattactgggctcttaagcccagctggatctatnaatatcatttcccatgattattaatccactattattcaggaaacagttcctggagaatgcattattatctaagcacgaggctctctcttgttgactcaacccgtggcacgttcaaataagctctcgtttagccacagtctgcagttaatggctcgccaaccctaataactatctgagggcgccttgccccttttattctatgtccccaagaggtccaagagttatcccactttactgcgggagacataaatatctcgagtggtatatcggacactattgcagacacatataaatcgcgtgttattatttcacagatgcacctgtggggacacagttttgtgaacaaaaatcaacgtgtctcacgaggacacagggcaagatagtggacacccgaactccgtgacacgtggctctcgttctcaatgtttctctcggtgacaagccaaatgttgcccaagaaatttccgtggtaagctaaggaaattgtgaacagggtctacacacaacacgttacagccgcccgtgttaaaccccagagtctacagtatatatacgcttttatactagggggcatctgagaggcatatggatctcgtcctgtgtgacgtaaccaagataaaactcttgtgaactgtggtatataatcattttcacccactttcccatcaaatttttaatacacgccgatcctataggtaccaacaccatattagctgtgtctccacaaaatttcccctttaggataatctgtgtgcggccacattgttgcctattattaaatctcccccaaattaatataacaaactggttgtcctccttatacaatctacaaaacccaaataacatcttccgtgcgattaacacagttgcccacacacttttttcgtcgtttgagaacggttatacacacagatatttcgcccccatagtagagtctcatttagaaacaccttttacctttcacccaattaacccctccacggcgattaaacaaatacagtggctggggatcaatcaccactctacataccatatacagcctaaacttccttcggccaaatcgcaacgcaaactctggctcgcgacactcgttctgttggccagaacgcccccctattttcccacgaaattctacagatatatctcccaag

SEQ ID NO: 679527 - DNA, 265 bp, Homo sapiens
gagtatatgaagctagatatatcgggttcatgaatatagcgatgcacgtgcaatacagagaaacttgaatagctgatatctctcgaaacatatagtacatggagagaggtaggaaaccttagcttagattgctgcttttactttggcaagactatggaagtgatttaacctacggttaggaatatcaaaaaccaaaatcaatagcaatagttgaatataaaatggatgcttctcagaatggtctgtattgttaatgtaagagata

SEQ ID NO: 679528 - DNA, 145 bp, Homo sapiens
attcgtgtcgcgctcttccatgtgaatagtggcgtcagggttctcctcagcactcgctgtcgcctgcctcttccatgtgacatggtggctgtcctggggttcctctccatgcactctgcatgtctgccttgcgctcttccattgt

SEQ ID NO: 679529 - DNA, 429 bp, Homo sapiens
ttacgtaggcatagaaaacacttcatattttattcaggatatggaatgtcatccttagaatggttttgagcaagggggtgcgttgatttggtttttcttttattttccttttcagagacagagtctcgctctatcgctcaggctggagtgcactggaggaatcacagctcactatctccttgaactactaggctcaagagatcctctcacctcagcctcccgagtagctgggactacaggtgcccaccgccatacctggctaagttttgtatttttagtagggacagagtttcaccacgttgcccaggctggtctggaacgcctgacctcaagtgatccacccgcctcggcctcccaaagtactgggattacaggcgtgagccaccacgcccggccagtcaaccatttttaattgttgtgttgcagtgt

SEQ ID NO: 679530 - DNA, 328 bp, Homo sapiens
cagattttttttatgaaaacgaagagagatgtttaaagtttatttttcagcaggtgaggtgctcacgcctataatcccagcactttgggaggccaaggcgggtgaatcacctgaggtcaggagttcgaaaccagccttcccaacatggtgaaaccccgtctctactaaaaatacaaaaattagccaggcatggtagcgcacacctgtaattccagctactcgggaggctgaggcaggggaatcgcttgaacctgggaggtggaggctacagtgagctgagatcgtgccattgcgctccagcctaggtgacagagcaagactccatctc

SEQ ID NO: 679531 - DNA, 114 bp, Homo sapiens
gattatgctcatatctgggaatgacctgaattctatcccagctctgatgtacccacatgggaacattaggggcaggcagaaatgcagctcattcccattatgcacttgttcaca

SEQ ID NO: 679532 - DNA, 440 bp, Homo sapiens
  misc_feature (172)..(172): n is a, c, g, or t
  misc_feature (237)..(237): n is a, c, g, or t
  misc_feature (275)..(275): n is a, c, g, or t
  misc_feature (307)..(307): n is a, c, g, or t
  misc_feature (309)..(309): n is a, c, g, or t
  misc_feature (343)..(343): n is a, c, g, or t
  misc_feature (383)..(383): n is a, c, g, or t
  misc_feature (385)..(385): n is a, c, g, or t
  misc_feature (400)..(400): n is a, c, g, or t
  misc_feature (405)..(405): n is a, c, g, or t
  misc_feature (409)..(409): n is a, c, g, or t
  misc_feature (415)..(415): n is a, c, g, or t
  misc_feature (426)..(426): n is a, c, g, or t
  misc_feature (433)..(433): n is a, c, g, or t
ggagcaagtgcgggtcctttgcctttggtggaaagtccccgggttccagggaggggccccgtgtcctgcctgtctgaagccaatgctgtctggttgcgccatttttgtgcttttatgtttaattttatgagggccacgggtctgtgttcgactcagccctcagggagatttntggccttttggcacagaggattcatttgcccacacggaggggacccggtcacagcctcaagtcantcccaagccccctccttgtttgtgcatccgggggcagntttggagggggtttgttggggaactggcgccntngccgggactccagaaccgcagaagcttccccagntcacccttggaggagggcgggctttttatagcaccagggntnaggtgggaacccccntcccncccnccgccncaataaagttngcccccncctccca

SEQ ID NO: 679533 - DNA, 128 bp, Homo sapiens
tacagctcgccctgttaatgaatactatatgtacctgcatatgatgcacagctagcaccccgaaagccagacgagctgactaccaacagctaagagagcacacccgtctatgtagcaaaatagtggga

SEQ ID NO: 679534 - DNA, 379 bp, Homo sapiens
  misc_feature (131)..(131): n is a, c, g, or t
  misc_feature (174)..(174): n is a, c, g, or t
agtaatccggcgtgtgtcaatttgatctagaagtgttagaaaatatggagcacagatcagcatatatgcatataggattagatttatgtatatataagatacattctcttagagttgaacatttaaaaatntcaacatgtcctaaaatatctgctttgtaatagacagtatatnctcagccaggtatgggtggctcatgacaaaaaaaaaagtgaccagtatacaggcatatgaaggactttaatgccagcccactcttccttttgggagtcaggctcttgctcccaagtccagccagtcccaggcccaggctagagtgtgtggcacgaccatagctaactgcagcctatactctctggactcaagcatttctcctgca

SEQ ID NO: 679535 - DNA, 1408 bp, Homo sapiens
  misc_feature (439)..(439): n is a, c, g, or t
  misc_feature (740)..(740): n is a, c, g, or t
  misc_feature (760)..(760): n is a, c, g, or t
  misc_feature (1114)..(1114): n is a, c, g, or t
  misc_feature (1297)..(1297): n is a, c, g, or t
ccccaggccaggattgtggaagagtcagcagatgagatgtttcttgcaacgcacttcgctgttggaagtattgagacccccggagggtcccacccctcacgagagttgtatcaaaacattgttctcgggggtgtccacacccccatccgctttgggaggggtaatacaaagagtgattggggaaaaaatccttgtgggaaattttgtggaggaccgcccgtcttctgcccaaagagttacccgttctcccacgaagtatttcttgttgggcaccaccaaagaccccatggggcgtgtcccttcctggggttttcccagcgccccccccacgatgtaagtgggaatttttactgagcgcataaatttgtgcgcgtgtgtgcaacttttttccttggggccttaaagggccttccccctgtgtttggttgagacccacagncccgttagtaccttgggggtaattaaaaaggggcgccccctcggttccaaagagccacttgggggcttgcccgccgcgttgtgagatgccgcccacgcgtgtgttgtcgccgtttcttgggggacaccacggtaaccccctcccgtgggcccccccctggaagtgtgcccccgcaatgggggggcccactaaggtgtttgactgttaaagctccccacgttttaaaagagatgcgccccgttaaatgttcgtgttttgggttttaagtgtacacacgctgtatattgttgacacacaatanaattggctggggtatatttngggcgcgccacccctctctcggttaattgaggaataaaatgtgttctaaaatcccaatggttctcctcgccctcttgtgatttctcttgttctgagagggcctctgtgttctcgtttctcctctcacatttctaaagtgagaaaaggtggtaattttctaagtggcctcggggtggcaatattcactcccacgcgataaatagtttctgcgccacagactgccactctcctctcttgttaactaagagtccctctgagccacagtgcacacactgtttgtgggagactcggtgggcccacagttcgtaatacgccacttccctcggaaaggaatttctgggaccacaataattnccacgggaattcacattgaactttcttggctccccctttttcccacatttcctctctggggagaaagaggggagaattgagccacatggcttataagtgcaatccctatcaaaggggcacgctctcgtctcccacatggccacattggagatcactgagacacactcgagagtcacgaaggcntggggcacgaatcaacttcacagcaagcccccacatgaatggttttcacgtcctgctttctctgtgggtacgtgcccctctgtttaaaaataaactgaatatggatgttta

SEQ ID NO: 679536 - DNA, 470 bp, Homo sapiens
  misc_feature (32)..(32): n is a, c, g, or t
  misc_feature (338)..(338): n is a, c, g, or t
cacgaggtgtatcataatgtctttcatagatngtaagacagggaagtgtttactgaaattgactatccaaaaaatgttgactaactggttttatttgactttgggagtaaattattcctagcaatctctgggttttgggttccaaagaaccctggagacgagtgatggttgtatgctcagtattataggttatttaaagtaaccgaaccaaaacttgcatatgcacagcacataacagtggttggcacgtagtgggttgtgtgtgcgtctgtagtctcagcttcctgagtagatgggactataggtgcacacccggctaatttttgtatttttagtanaggcaggaattcgagaccagcctggccaacatggtgaaatgctgtctctgctaaaagtacaaaaattagttgggcatgttggcaggctgagtaatctcagctacttgggaggctgaggcaggagaatcactt

SEQ ID NO: 679537 - DNA, 718 bp, Homo sapiens
  misc_feature (468)..(468): n is a, c, g, or t
  misc_feature (492)..(492): n is a, c, g, or t
ctaacctggccgtatgtgacaatttcagagaactgtgattttgactcaagggttgtagatttcctttttcactctaatttcagtgtctaaagtcctcacaaccatgaacaatctgagtatttgatgagacagggctaaatattgcagtttttctcctagaaatcatttgagggtatttgctttaagttgattggaaaaatatggcgtaactgtttgcacaaacttgggacaaatgatattgggataacgatctactagaatagggacattttacccacagtttctgggagaaaaaccgaggaatttctatcatgaccagccttcaggcctcctgaaatatatctctcacagtgtcctattcttatgctgaggagcctgaggtccctgtgtgaggattagacagtggattgttatgtgtgtaggggaatcagcttaatgtgtctgtccatgtctgaatttattgcaganattgaaaagaaggggaaggggaanaaaagaaggggaagaagatcaaagaaggaaagaagaaggggaagaaaagaagggagaacatccaaacccaccatgtccccaggctcaacggcgtgctgatggcagtggaagagcgtgaagtcttacaggactcactggatagatgttattcgactccgtcaatgtactttgaactacctgactcattccagcactacagaagtgtgtatactcatttgaggaacag

SEQ ID NO: 679538 - DNA, 785 bp, Homo sapiens
ggcagtgtggagaagaccaagtctgtggtcagatggcatgcattaacacagtcttgggcgagtcgtgatgatgcagctcgtgagcagtggtcgtagaaaatgcactcaccaaatcagagctgttggtagaacagctacctccctctcactgaggaagaactagaacatagaatcaaaaaaagttgaaggatttgatctggttcagaagaccacacgttattatgttacgatcgtggtgatccctgatctaccaagcttcactcccgtgccataccagtcaggctgctcagcgagggcttaaaggaagctaagcaaaaaagccaacagaccatttctcagctccattctactgttcatcctgattgaatttgccaggaagaatgtgtatacgttgccaatctagaaaattcaggatgctcaaggataaagctctacctctcatgggtagaagtggaagaaggagcattggatatgatgatacggtgatgagtcccactgtgctgacgcacagttgacgttcacggtatctcttgccagttgcccgcagaggctgactcagggagctccagaacatgtgccataccctccgtgtccaacagtccaaggtgtaccacagaacatccaagatcaagccaacgcacatggcgcgtgtgactgcgcagtgcgaccatctactctagtgttccgcaatgtcgtgcctcctttaagagagagtgtctgacaaggctcctcagttctagcaaggggcaggtgctgaatatgaaggaatctttacatgacgtgat

SEQ ID NO: 679539 - DNA, 191 bp, Homo sapiens
gtgtcccagttgagctgtcgcaacatttaaggcgataggttgacgaagcgctactttgtacatttaaagcttgcatggtccagtctaccaactggcccagggagtcttgtttcgtgtttttcaacttgcatatagcttaacccttttcttattaacacttggaattccttctaaagctgtcactatcagat

SEQ ID NO: 679540 - DNA, 459 bp, Homo sapiens
  misc_feature (34)..(34): n is a, c, g, or t
  misc_feature (93)..(94): n is a, c, g, or t
  misc_feature (120)..(120): n is a, c, g, or t
  misc_feature (132)..(132): n is a, c, g, or t
  misc_feature (135)..(135): n is a, c, g, or t
  misc_feature (138)..(138): n is a, c, g, or t
  misc_feature (157)..(157): n is a, c, g, or t
  misc_feature (188)..(188): n is a, c, g, or t
  misc_feature (193)..(193): n is a, c, g, or t
  misc_feature (215)..(215): n is a, c, g, or t
  misc_feature (223)..(223): n is a, c, g, or t
  misc_feature (232)..(232): n is a, c, g, or t
  misc_feature (246)..(246): n is a, c, g, or t
  misc_feature (259)..(259): n is a, c, g, or t
  misc_feature (282)..(282): n is a, c, g, or t
  misc_feature (286)..(286): n is a, c, g, or t
  misc_feature (300)..(301): n is a, c, g, or t
  misc_feature (319)..(319): n is a, c, g, or t
  misc_feature (351)..(351): n is a, c, g, or t
  misc_feature (356)..(357): n is a, c, g, or t
  misc_feature (361)..(361): n is a, c, g, or t
  misc_feature (374)..(374): n is a, c, g, or t
  misc_feature (390)..(390): n is a, c, g, or t
  misc_feature (399)..(399): n is a, c, g, or t
  misc_feature (428)..(428): n is a, c, g, or t
gcgataaggagatggagcgcacaggggagagggnaggcagggagaggagggggggaaaagggggcgggagcagcgacgaaacagcgcagcaanngggggggcagagcgcgagaggaagcnacaaagaattgnacnganaacaaaccacaggggaaanggggggtaggaagagtcagccttagaaaagngacanccacacggttgcacagcaagantgcgctcnccaaaacgnagccatcaaaagcngcaaacaaacccnatattacatccatttgacagaanggcngccaaacatatatnnggcgggaaaggattaaanggggagtgtgtcaaagccagcggggtgaaaangcggnngggnaaaaaaggatgantatgatttagaagtcnctatatatngacaggaaaaaagtgacactactgcactnttgcggggataacggaatcgtgacaggggct

SEQ ID NO: 679541 - DNA, 337 bp, Homo sapiens
ttttttttatggtagaaaggattgactttattaacctcacttacgatactgaatacaaagtaaaattaggtggtgacccctaattttcagtctatttcaaagcatggtcccccagatttaagaatttaggcattcatatgtccaaaaagggaagcgaatccaaccacccaatcccaaaagacccccgtggattaaggaataagaaagttgagcctaaggcccttatgataatcccttttagtaccttcttctacgttttcattaattccttcagtaactggatttttaaccaaaccctataatccatcataattcttccaattatgagttgaaaaga

SEQ ID NO: 679542 - DNA, 525 bp, Homo sapiens
  misc_feature (55)..(55): n is a, c, g, or t
  misc_feature (60)..(60): n is a, c, g, or t
  misc_feature (91)..(91): n is a, c, g, or t
gatctcttgagtatccccatctatcctgcgatagcgagtgtacgatgttctctgnctgcngatgacatgatcttacatatagaaaacgctnaagactccaaaaaactattagaactaatgaacaaattcagttaagtagtagcataaggaaatcaatgtataaaaatcagcagtgtttctatgtactaagaacaaactatccaaaaaagaaataaataaaacaatctcacaataactaccaaaaaaaaaaggcttgggaataaatttattcaaagaggtgaaagacccatacactaataagtataaaatattgaagaggatgggtgcggtggctcatgacagtaattccagcactttgggagactgatgtgggcagatcacctgaggtcagtagttcgagaccagcctagctaacatagagaaaccccatctctactaaatatacacaaattaggtggtcgtggtggcaggcacctgtaataccagctactcggaaggctgcagcaggagaatcgcctgaacttg

SEQ ID NO: 679543 - DNA, 1073 bp, Homo sapiens
tgaaatggagctgagatggctggagccagggtccagctagaggacaatgcccacgtggcatcttcggggccctggaggagggagtgggaggaggatgggaggggtgaggtgtcagttccccattggtctaggccaggtgttctgtggcggtccccacaccacacaacacacacacatctgcacctcaaccacagactacacttgctgaactggctcctggggccatgaggctgtcactgccactgctgctgctgctgctgggagcctgggccatcccagggggcctcggggacagggcgccactcacagccacagccccacaactggatgatgaggagatgtactcagcccacatgcccgctcacctgcgctgtgatgcctgcagagctgtggcttaccagatgtggcaaaatctggcaaaggcagagaccaaacttcatacctcaaactctggggggcggcgggagctgagcgagttggtctacacggatgtcctggaccggagctgctcccggaactggcaggactacggagttcgagaagtggaccaagtgaaacgtctcacaggcccaggacttagcgaggggccagagccaagcatcagcgtgatggtcacagggggcccctggcctaccaggctctccaggacatgtttgcactacttgggggagtttggagaagaccagatctatgaagcccaccaacaaggccgaggggctctggaggcattgctatgtgggggaccccagggggcctgctcagagaaggtgtcagccacaagagaagagctctagtcctggactctaccctcctctgaaagaagctggggcttgctctgacggtctccactcccgtctgcaggcagccaggagggcaggaagcccttgctctgtgctgccatcctgcctccctcctccagcctcagggcactcgggcctgggtgggagtcaacgccttcccctctggactcaaataaaacccagtgacctcacttcttttctctgcaaaaggtgcttgtggggctgggagtgcagacattggtgtttctgctgatgtcccttgtgaaaaaaaaa

SEQ ID NO: 679544 - DNA, 2086 bp, Homo sapiens
tgaaatggagctgagatggctggagccagggtccagctagaggacaatgcccacgtggcatcttcggggccctggaggagggagtgggaggaggatgggaggggtgaggtgtcagttccccattggtctaggccaggtgttctgtggcggtccccacaccacacaacacacacacatctgcacctcaaccacagactacacttgctgaactggctcctggggccatgaggctgtcactgccactgctgctgctgctgctgggagcctgggccatcccagggggcctcggggacagggcgccactcacagccacagccccacaactggatgatgaggagatgtactcagcccacatgcccgctcacctgcgctgtgatgcctgcagagctgtggcttaccaggtgagtccttcaccactgtcaccctgccctgctcacaccccttctcaagccagacccctccacccacctcacattccaccaccggcctttgatccccaatccctaccactgggcatcaagccacagatgcagcctttcatatattccatgcctcagtttacccatctgcctgcctaacagcagacaatctgggagacctcctcagtattttgagaccccagggaatcactcacttgtccttagacttctccctttccaggcccatccttgagtccggactccctccccaaccctgacggggcggctttggctatgtgtacatggtgcaagtgcacacgtgtgagcgcctgcacgtgagtatgcgtgtgtctggcttcacacacacacctgctgagcatgcctgcgtgccagtgtctctgtgaggtgggggcctgggagtacttgtgtgattgaatattgggctccagtttttcttaccttgctcttgtggtttaaaatggcacgtgccggccgggcgcggtggctcacgcctgtaatcccagcactttgggaggctgagcggggccgatcgcctgaactcaggagttcgagaccagcctggccaacatggtgaaaccccgtcactactgaaaatacaaaattttagccgggtgtggtggcacatacctgtagtcccagctacctgggaggctgagggagaagaatcacttgaacctgggaggtggaggctgcagtgagctgagatcgtaccactgcactccagcctgggcgacgaacggcgtgagactctctctaaataaataaataaataaaaatagaatgacacttgccactgggcaggtgtgccctggacgagggaccccagtgcccaggcctcacctaccacttcagcatttctttcccatcccccacccccatcccagagagctttgggggctgggggaggggccatgcaacagcctcacaggtgcttcctgctcaaacggctctcttgccactttattttccccagagactctgctcctatcctccccacctccccctaactgagcagcagtcctgagggccctgcctcccagtccctccttgttccagatgtggcaaaatctggcaaaggcagagaccaaacttcatacctcaaactctggggggcggcgggagctgagcgagttggtctacacggatgtcctggaccggagctgctcccggaactggcaggactacggagttcgagaagtggaccaagtgaaacgtctcacaggcccaggacttagcgaggggccagagccaagcatcagcgtgatggtcacagggggcccctggcctaccaggctctccaggacatgtttgcactacttgggggagtttggagaagaccagatctatgaagcccaccaacaaggccgaggggctctggaggcattgctatgtgggggaccccagggggcctgctcagagaaggtgtcagccacaagagaagagctctagtcctggactctaccctcctctgaaagaagctggggcttgctctgacggtctccactcccgtctgcaggcagccaggagggcaggaagcccttgctctgtgctgccatcctgcctccctcctccagcctcagggcactcgggcctgggtgggagtcaacgccttcccctctggactcaaataaaacccagtgacctca

SEQ ID NO: 679545 - DNA, 910 bp, Homo sapiens
agtatctgcaccataccataacttgctctgagccatatagtctcccctgtccacttctgcacaatatcatggcctaattccctctgtccaattaggtcttcaaacgacgctcctttttaagggccaaaacctgctctacaaagtacttggacgctttctcccacagggggaaatctcttcacccccttacaccccgtttttcttcaaagcccctgtttttccctaaaaaggaaacacgccatacggcgaacttcttctacaaagtggtagtctcttccacaaattaagccaaacttcaccactgggtgaacacccccaacaaccaacaggggaaagatcttccccctcaagaacggggtacttccccccccttttttacacagccggtacatttaaaggtaaaatctggacgtcttttaaagcaatcctgccaaatccacacccggaaaacgttctgttgtaaacacgcgtgctccgcctccaagaaggctcttcttcaaacgcgccatactttgctataatacagttcccctcaattggggcccccacaaacatgatcttcttctgtatcttgacccgcccgccaccaggtttgctctccatatattggcccttcctccccccgagggagttgttatatacaccatggtctctttgttagaaaaatttatcaaattttgtatcaaccctttcccctaaagccgtcaatcaagctagaaatcccatttctaagttattatgcaaacaacataattccttctacttggcagcatcaaagactagcaaaatgccgccatttctcgcaaaccaccaccacgcgcacgctcctatccccgcccccaattacagttcttttttttataaacaaggttttccccaaccctttccgcgggttttccccaaaaaaaaa

SEQ ID NO: 679546 - DNA, 2186 bp, Homo sapiens
tgaaatggagctgagatggctggagccagggtccagctagaggacaatgcccacgtggcatcttcggggccctggaggagggagtgggaggaggatgggaggggtgaggtgtcagttccccattggtctaggccaggtgttctgtggcggtccccacaccacacaacacacacacatctgcacctcaaccacagactacacttgctgaactggctcctggggccatgaggctgtcactgccactgctgctgctgctgctgggagcctgggccatcccagggggcctcggggacagggcgccactcacagccacagccccacaactggatgatgaggagatgtactcagcccacatgcccgctcacctgcgctgtgatgcctgcagagctgtggcttaccaggtgagtccttcaccactgtcaccctgccctgctcacaccccttctcaagccagacccctccacccacctcacattccaccaccggcctttgatccccaatccctaccactgggcatcaagccacagatgcagcctttcatatattccatgcctcagtttacccatctgcctgcctaacagcagacaatctgggagacctcctcagtattttgagaccccagggaatcactcacttgtccttagacttctccctttccaggcccatccttgagtccggactccctccccaaccctgacggggcggctttggctatgtgtacatggtgcaagtgcacacgtgtgagcgcctgcacgtgagtatgcgtgtgtctggcttcacacacacacctgctgagcatgcctgcgtgccagtgtctctgtgaggtgggggcctgggagtacttgtgtgattgaatattgggctccagtttttcttaccttgctcttgtggtttaaaatggcacgtgccggccgggcgcggtggctcacgcctgtaatcccagcactttgggaggctgagcggggccgatcgcctgaactcaggagttcgagaccagcctggccaacatggtgaaaccccgtcactactgaaaatacaaaattttagccgggtgtggtggcacatacctgtagtcccagctacctgggaggctgagggagaagaatcacttgaacctgggaggtggaggctgcagtgagctgagatcgtaccactgcactccagcctgggcgacgaacggcgtgagactctctctaaataaataaataaataaaaatagaatgacacttgccactgggcaggtgtgccctggacgagggaccccagtgcccaggcctcacctaccacttcagcatttctttcccatcccccacccccatcccagagagctttgggggctgggggaggggccatgcaacagcctcacaggtgcttcctgctcaaacggctctcttgccactttattttccccagagactctgctcctatcctccccacctccccctaactgagcagcagtcctgagggccctgcctcccagtccctccttgttccagatgtggcaaaatctggcaaaggcagagaccaaacttcatacctcaaactctggggggcggcgggagctgagcgagttggtctacacggatgtcctggaccggagctgctcccggaactggcaggactacggagttcgagaagtggaccaagtgaaacgtctcacaggcccaggacttagcgaggggccagagccaagcatcagcgtgatggtcacagggggcccctggcctaccaggtgatgcccggggcattggggataggatgaagctcctggagccttggtttgccccactgtgggctgggcagcatctgaggctcctgctgggctcccctaggctctccaggacatgtttgcactacttgggggagtttggagaagaccagatctatgaagcccaccaacaaggccgaggggctctggaggcattgctatgtgggggaccccagggggcctgctcagagaaggtgtcagccacaagagaagagctctagtcctggactctaccctcctctgaaagaagctggggcttgctctgacggtctccactcccgtctgcaggcagccaggagggcaggaagcccttgctctgtgctgccatcctgcctccctcctccagcctcagggcactcgggcctgggtgggagtcaacgccttcccctctggactcaaataaaacccagtgacctca

SEQ ID NO: 679547 - DNA, 323 bp, Homo sapiens
  misc_feature (42)..(42): n is a, c, g, or t
  misc_feature (49)..(49): n is a, c, g, or t
  misc_feature (117)..(117): n is a, c, g, or t
  misc_feature (137)..(137): n is a, c, g, or t
  misc_feature (172)..(172): n is a, c, g, or t
  misc_feature (207)..(207): n is a, c, g, or t
  misc_feature (254)..(254): n is a, c, g, or t
  misc_feature (266)..(266): n is a, c, g, or t
  misc_feature (294)..(294): n is a, c, g, or t
  misc_feature (301)..(301): n is a, c, g, or t
aattttaaaaaagtaaaaataagctgggcgtggtggcacatngccagtnggtagtcccagctaactacgaggttgctccagctcaggcgttcaaggctacagagagccatgattaanccaaggcactccagcctggntgacagagtgagactgtctcaaaataaaataaaantaacatattggtgaagatgcggggaaaaaaaaganctcttagacactgctggtgggaatgtaaactagagcacccatgtggngaacaacatggngtttcttcaaaatttacaaatagaactntcatatngtcccagcaataccttactggg

SEQ ID NO: 679548 - DNA, 116 bp, Homo sapiens
tgagctaaaatacaaatggcgggatggtggtgcgtgctgtggtccggctacttgggagactgaggcgggagaatggcgtgacccctgggaggctggagcttagcagtgagcctgag

SEQ ID NO: 679549 - DNA, 127 bp, Homo sapiens
ggcacgagcctggacgcagaagcaagtcaagagcctccagagcttgttgaaggacacccagattcagctggacgatgcagtccgtgccaacgacgacctgaaggagaacatcgccatcgtggagcgc

SEQ ID NO: 679550 - DNA, 991 bp, Homo sapiens
tgaaatggagctgagatggctggagccagggtccagctagaggacaatgcccacgtggcatcttcggggccctggaggagggagtgggaggaggatgggaggggtgaggtgtcagttccccattggtctaggccaggtgttctgtggcggtccccacaccacacaacacacacacatctgcacctcaaccacagactacacttgctgaactggctcctggggccatgaggctgtcactgccactgctgctgctgctgctgggagcctgggccatcccagggggcctcggggacagggcgccactcacagccacagccccacaactggatgatgaggagatgtactcagcccacatgcccgctcacctgcgctgtgatgcctgcagagctgtggcttaccagatgtggcaaaatctggcaaaggcagagaccaaacttcatacctcaaactctggggggcggcgggagctgagcgagttggtctacacggatgtcctggaccggagctgctcccggaactggcaggactacggagttcgagaagtggaccaagtgaaacgtctcacaggcccaggacttagcgaggggccagagccaagcatcagcgtgatggtcacagggggcccctggcctaccaggctctccaggacatgtttgcactacttgggggagtttggagaagaccagatctatgaagcccaccaacaaggccgaggggctctggaggcattgctatgtgggggaccccagggggcctgctcagagaaggtgtcagccacaagagaagagctctagtcctggactctaccctcctctgaaagaagctggggcttgctctgacggtctccactcccgtctgcaggcagccaggagggcaggaagcccttgctctgtgctgccatcctgcctccctcctccagcctcagggcactcgggcctgggtgggagtcaacgccttcccctctggactcaaataaaacccagtgacctca

SEQ ID NO: 679551 - DNA, 2168 bp, Homo sapiens
tgaaatggagctgagatggctggagccagggtccagctagaggacaatgcccacgtggcatcttcggggccctggaggagggagtgggaggaggatgggaggggtgaggtgtcagttccccattggtctaggccaggtgttctgtggcggtccccacaccacacaacacacacacatctgcacctcaaccacagactacacttgctgaactggctcctggggccatgaggctgtcactgccactgctgctgctgctgctgggagcctgggccatcccagggggcctcggggacagggcgccactcacagccacagccccacaactggatgatgaggagatgtactcagcccacatgcccgctcacctgcgctgtgatgcctgcagagctgtggcttaccaggtgagtccttcaccactgtcaccctgccctgctcacaccccttctcaagccagacccctccacccacctcacattccaccaccggcctttgatccccaatccctaccactgggcatcaagccacagatgcagcctttcatatattccatgcctcagtttacccatctgcctgcctaacagcagacaatctgggagacctcctcagtattttgagaccccagggaatcactcacttgtccttagacttctccctttccaggcccatccttgagtccggactccctccccaaccctgacggggcggctttggctatgtgtacatggtgcaagtgcacacgtgtgagcgcctgcacgtgagtatgcgtgtgtctggcttcacacacacacctgctgagcatgcctgcgtgccagtgtctctgtgaggtgggggcctgggagtacttgtgtgattgaatattgggctccagtttttcttaccttgctcttgtggtttaaaatggcacgtgccggccgggcgcggtggctcacgcctgtaatcccagcactttgggaggctgagcggggccgatcgcctgaactcaggagttcgagaccagcctggccaacatggtgaaaccccgtcactactgaaaatacaaaattttagccgggtgtggtggcacatacctgtagtcccagctacctgggaggctgagggagaagaatcacttgaacctgggaggtggaggctgcagtgagctgagatcgtaccactgcactccagcctgggcgacgaacggcgtgagactctctctaaataaataaataaataaaaatagaatgacacttgccactgggcaggtgtgccctggacgagggaccccagtgcccaggcctcacctaccacttcagcatttctttcccatcccccacccccatcccagagagctttgggggctgggggaggggccatgcaacagcctcacaggtgcttcctgctcaaacggctctcttgccactttattttccccagagactctgctcctatcctccccacctccccctaactgagcagcagtcctgagggccctgcctcccagtccctccttgttccagatgtggcaaaatctggcaaaggcagagaccaaacttcatacctcaaactctggggggcggcgggagctgagcgagttggtctacacggatgtcctggaccggagctgctcccggaactggcaggactacggagttcgagaagtggaccaagtgaaacgtctcacaggcccaggacttagcgaggggccagagccaagcatcagcgtgatggtcacagggggcccctggcctaccaggctctccaggacatgtttgcactacttgggggagtttggagaagaccagatctatgaagcccaccaacaaggccgaggggctctggaggcattgctatgtgggggaccccagggggcctgctcagagaaggtgtcagccacaagagaagagctctagtcctggactctaccctcctctgaaagaagctggggcttgctctgacggtctccactcccgtctgcaggcagccaggagggcaggaagcccttgctctgtgctgccatcctgcctccctcctccagcctcagggcactcgggcctgggtgggagtcaacgccttcccctctggactcaaataaaacccagtgacctcacttcttttctctgcaaaaggtgcttgtggggctgggagtgcagacattggtgtttctgctgatgtcccttgtgaaaaaaaaa

SEQ ID NO: 679552 - DNA, 257 bp, Homo sapiens
tggaaagggagtctggctcggtcacccaggtgggatggcaggggggctatctgggctcacggaaacctcggcctccaggcttcaagcgaatctcgggcctcagcctcccgagcagcgggaataacaggcgccgggcatcacgcggggctaatttgggtatcttaagtagagagggggttccacaagggtctcgagctcttgacctcaggtgatccgcccacttgggccacccaggatgtgggacgggggtaccgagc

SEQ ID NO: 679553 - DNA, 992 bp, Homo sapiens
gagcaccgccccgctcgccccggcggcagagaggagactatgtgaacgtcagtgtgctgctgagcgagcccgagggagtgcggtgtgtctgtatcggggccttagccgccagcccggtgctgagctgccgcctgcctgggcccggagggtcaccacgcagtacggtggcaatacctggacggtgcacactgagtgtgacccagaggggaactggaacgcatgtgagaacattcgattctgccgccaatacctggtgttccatgacggggactcagtggtgtttgcaggacctgcaggcacagtgtggagaccctggtgggaactgctgagcagagagtctccttcaggcaccatgaaaagctgtgctgcgcaatgctggaggcacgggccctggggaagagaaggcagtatcctggagggtctgggagaagaacccggacgctcaagagcttcaacctgtcagcgctggagaaatcatgggccttgtttcattgattgattgacttgctttggctgccatgtcctggtcgcactcggatgacacacttgtttggatgctcgcacgacaagaagctgccccaaggacagaggtcccttcttcaggaccaaagccttggcggtcagtgccaggagatgatgagatagcatggttgaaacgcaagacacgccatcaagggggatcaggatgtggtatggaaggactgtggaagaaaaggatgtgttgcgcaaaagtcatcctggagatttgagttatgatgttgagagtgcaaacattgttctagggggggcattggcaatttgcaccaggaaggcagtattggcactgaagatctgcttgaaagtgtggagtgagaagatccggtgggggaagaattatatacgtatgcatatagcaaaacaggacaggataagagctagtttatgcagaagaaaagtactgaagtagattgtcgtaggactttatggcagaagtaaggtggcatcacactagg

SEQ ID NO: 679554 - DNA, 2163 bp, Homo sapiens
tgaaatggagctgagatggctggagccagggtccagctagaggacaatgcccacgtggcatcttcggggccctggaggagggagtgggaggaggatgggaggggtgaggtgtcagttccccattggtctaggccaggtgttctgtggcggtccccacaccacacaacacacacacatctgcacctcaaccacagactacacttgctgaactggctcctggggccatgaggctgtcactgccactgctgctgctgctgctgggagcctgggccatcccagggggcctcggggacagggcgccactcacagccacagccccacaactggatgatgaggagatgtactcagcccacatgcccgctcacctgcgctgtgatgcctgcagagctgtggcttaccaggtgagtccttcaccactgtcaccctgccctgctcacaccccttctcaagccagacccctccacccacctcacattccaccaccggcctttgatccccaatccctaccactgggcatcaagccacagatgcagcctttcatatattccatgcctcagtttacccatctgcctgcctaacagcagacaatctgggagacctcctcagtattttgagaccccagggaatcactcacttgtccttagacttctccctttccaggcccatccttgagtccggactccctccccaaccctgacggggcggctttggctatgtgtacatggtgcaagtgcacacgtgtgagcgcctgcacgtgagtatgcgtgtgtctggcttcacacacacacctgctgagcatgcctgcgtgccagtgtctctgtgaggtgggggcctgggagtacttgtgtgattgaatattgggctccagtttttcttaccttgctcttgtggtttaaaatggcacgtgccggccgggcgcggtggctcacgcctgtaatcccagcactttgggaggctgagcggggccgatcgcctgaactcaggagttcgagaccagcctggccaacatggtgaaaccccgtcactactgaaaatacaaaattttagccgggtgtggtggcacatacctgtagtcccagctacctgggaggctgagggagaagaatcacttgaacctgggaggtggaggctgcagtgagctgagatcgtaccactgcactccagcctgggcgacgaacggcgtgagactctctctaaataaataaataaataaaaatagaatgacacttgccactgggcaggtgtgccctggacgagggaccccagtgcccaggcctcacctaccacttcagcatttctttcccatcccccacccccatcccagagagctttgggggctgggggaggggccatgcaacagcctcacaggtgcttcctgctcaaacggctctcttgccactttattttccccagagactctgctcctatcctccccacctccccctaactgagcagcagtcctgagggccctgcctcccagtccctccttgttccagatgtggcaaaatctggcaaaggcagagaccaaacttcatacctcaaactctggggggcggcgggagctgagcgagttggtctacacggatgtcctggaccggagctgctcccggaactggcaggactacggagttcgagaagtggaccaagtgaaacgtctcacaggcccaggacttagcgaggggccagagccaagcatcagcgtgatggtcacagggggcccctggcctaccaggctctccaggacatgtttgcactacttgggggagtttggagaagaccagatctatgaagcccaccaacaaggccgaggggctctggaggcattgctatgtgggggaccccagggggcctgctcagagaaggtgtcagccacaagagaagagctctagtcctggactctaccctcctctgaaagaagctggggcttgctctgacggtctccactcccgtctgcaggcagccaggagggcaggaagcccttgctctgtgctgccatcctgcctccctcctccagcctcagggcactcgggcctgggtgggagtcaacgccttcccctctggactcaaataaaacccagtgacctcaaaaaaaaaaaaccccgggcctttgggcggaaaaagtaaaggccggtatttctcccctttaaaggaacccgccccagg

SEQ ID NO: 679555 - DNA, 318 bp, Homo sapiens
  misc_feature (218)..(218): n is a, c, g, or t
gagacagggtctcactctgtcacacaaactggagtgcagtgcataatcatggctcactgcagtctcaacctcctggtctcaagcaatcctcctgcctcagcctcccaagtagctgggactacaggcgtgcaccaccatacccagccaattttttgcagagatgaggtcacaccatgttgcccaggctggtcttgaactatttgcctcaggcaatcctntttgcatcagcctcccaaagtgctggtattataggcgtgagtcaccacaactgggtaaaaaactactttatggtgataaaagttaaagcggtttacctag

SEQ ID NO: 679556 - DNA, 2268 bp, Homo sapiens
tgaaatggagctgagatggctggagccagggtccagctagaggacaatgcccacgtggcatcttcggggccctggaggagggagtgggaggaggatgggaggggtgaggtgtcagttccccattggtctaggccaggtgttctgtggcggtccccacaccacacaacacacacacatctgcacctcaaccacagactacacttgctgaactggctcctggggccatgaggctgtcactgccactgctgctgctgctgctgggagcctgggccatcccagggggcctcggggacagggcgccactcacagccacagccccacaactggatgatgaggagatgtactcagcccacatgcccgctcacctgcgctgtgatgcctgcagagctgtggcttaccaggtgagtccttcaccactgtcaccctgccctgctcacaccccttctcaagccagacccctccacccacctcacattccaccaccggcctttgatccccaatccctaccactgggcatcaagccacagatgcagcctttcatatattccatgcctcagtttacccatctgcctgcctaacagcagacaatctgggagacctcctcagtattttgagaccccagggaatcactcacttgtccttagacttctccctttccaggcccatccttgagtccggactccctccccaaccctgacggggcggctttggctatgtgtacatggtgcaagtgcacacgtgtgagcgcctgcacgtgagtatgcgtgtgtctggcttcacacacacacctgctgagcatgcctgcgtgccagtgtctctgtgaggtgggggcctgggagtacttgtgtgattgaatattgggctccagtttttcttaccttgctcttgtggtttaaaatggcacgtgccggccgggcgcggtggctcacgcctgtaatcccagcactttgggaggctgagcggggccgatcgcctgaactcaggagttcgagaccagcctggccaacatggtgaaaccccgtcactactgaaaatacaaaattttagccgggtgtggtggcacatacctgtagtcccagctacctgggaggctgagggagaagaatcacttgaacctgggaggtggaggctgcagtgagctgagatcgtaccactgcactccagcctgggcgacgaacggcgtgagactctctctaaataaataaataaataaaaatagaatgacacttgccactgggcaggtgtgccctggacgagggaccccagtgcccaggcctcacctaccacttcagcatttctttcccatcccccacccccatcccagagagctttgggggctgggggaggggccatgcaacagcctcacaggtgcttcctgctcaaacggctctcttgccactttattttccccagagactctgctcctatcctccccacctccccctaactgagcagcagtcctgagggccctgcctcccagtccctccttgttccagatgtggcaaaatctggcaaaggcagagaccaaacttcatacctcaaactctggggggcggcgggagctgagcgagttggtctacacggatgtcctggaccggagctgctcccggaactggcaggactacggagttcgagaagtggaccaagtgaaacgtctcacaggcccaggacttagcgaggggccagagccaagcatcagcgtgatggtcacagggggcccctggcctaccaggtgatgcccggggcattggggataggatgaagctcctggagccttggtttgccccactgtgggctgggcagcatctgaggctcctgctgggctcccctaggctctccaggacatgtttgcactacttgggggagtttggagaagaccagatctatgaagcccaccaacaaggccgaggggctctggaggcattgctatgtgggggaccccagggggcctgctcagagaaggtgtcagccacaagagaagagctctagtcctggactctaccctcctctgaaagaagctggggcttgctctgacggtctccactcccgtctgcaggcagccaggagggcaggaagcccttgctctgtgctgccatcctgcctccctcctccagcctcagggcactcgggcctgggtgggagtcaacgccttcccctctggactcaaataaaacccagtgacctcacttcttttctctgcaaaaggtgcttgtggggctgggagtgcagacattggtgtttctgctgatgtcccttgtgaaaaaaaaa

SEQ ID NO: 679557 - DNA, 2088 bp, Homo sapiens
  misc_feature (2052)..(2052): n is a, c, g, or t
tgaaatggagctgagatggctggagccagggtccagctagaggacaatgcccacgtggcatcttcggggccctggaggagggagtgggaggaggatgggaggggtgaggtgtcagttccccattggtctaggccaggtgttctgtggcggtccccacaccacacaacacacacacatctgcacctcaaccacagactacacttgctgaactggctcctggggccatgaggctgtcactgccactgctgctgctgctgctgggagcctgggccatcccagggggcctcggggacagggcgccactcacagccacagccccacaactggatgatgaggagatgtactcagcccacatgcccgctcacctgcgctgtgatgcctgcagagctgtggcttaccaggtgagtccttcaccactgtcaccctgccctgctcacaccccttctcaagccagacccctccacccacctcacattccaccaccggcctttgatccccaatccctaccactgggcatcaagccacagatgcagcctttcatatattccatgcctcagtttacccatctgcctgcctaacagcagacaatctgggagacctcctcagtattttgagaccccagggaatcactcacttgtccttagacttctccctttccaggcccatccttgagtccggactccctccccaaccctgacggggcggctttggctatgtgtacatggtgcaagtgcacacgtgtgagcgcctgcacgtgagtatgcgtgtgtctggcttcacacacacacctgctgagcatgcctgcgtgccagtgtctctgtgaggtgggggcctgggagtacttgtgtgattgaatattgggctccagtttttcttaccttgctcttgtggtttaaaatggcacgtgccggccgggcgcggtggctcacgcctgtaatcccagcactttgggaggctgagcggggccgatcgcctgaactcaggagttcgagaccagcctggccaacatggtgaaaccccgtcactactgaaaatacaaaattttagccgggtgtggtggcacatacctgtagtcccagctacctgggaggctgagggagaagaatcacttgaacctgggaggtggaggctgcagtgagctgagatcgtaccactgcactccagcctgggcgacgaacggcgtgagactctctctaaataaataaataaataaaaatagaatgacacttgccactgggcaggtgtgccctggacgagggaccccagtgcccaggcctcacctaccacttcagcatttctttcccatcccccacccccatcccagagagctttgggggctgggggaggggccatgcaacagcctcacaggtgcttcctgctcaaacggctctcttgccactttattttccccagagactctgctcctatcctccccacctccccctaactgagcagcagtcctgagggccctgcctcccagtccctccttgttccagatgtggcaaaatctggcaaaggcagagaccaaacttcatacctcaaactctggggggcggcgggagctgagcgagttggtctacacggatgtcctggaccggagctgctcccggaactggcaggactacggagttcgagaagtggaccaagtgaaacgtctcacaggcccaggacttagcgaggggccagagccaagcatcagcgtgatggtcacagggggcccctggcctaccaggctctccaggacatgtttgcactacttgggggagtttggagaagaccagatctatgaagcccaccaacaaggccgaggggctctggaggcattgctatgtgggggaccccagggggcctgctcagagaaggtgtcagccacaagagaagagctctagtcctggactctaccctcctctgaaagaagctggggcttgctctgacggtctccactcccgtctgcaggcagccaggagggcaggaagcccttgctctgtgctgccatcctgcctccctcctctgtgccgtccacctctctgtgctgtccacctctctgtactngtccatgtcctctgtgctgccacctctaggtggggc

SEQ ID NO: 679558 - DNA, 375 bp, Homo sapiens
atctgccgtcctttggtgattaaatgcacaccagcaaatctatgtcttgacctgattcactggcataatgcatgagcagaggctagacgtatcatctggattgttgtgaaacgtttaaaagcagtggccgctccctgcttttattcatttaccccatcctggattaagtataaagcactgtgaatgaaggtaggtgaaaggctagatgcaggggtgtgggtagacgtattttatcttattttatcattattttagaggggggaggtagctcaatattatgggctcctttccccctttttttggtgatctaattgcattggttaaaagcagctaaccaggtctttagaatatgctctagccaagtctaactttatt

SEQ ID NO: 679559 - DNA, 1068 bp, Homo sapiens
tgaaatggagctgagatggctggagccagggtccagctagaggacaatgcccacgtggcatcttcggggccctggaggagggagtgggaggaggatgggaggggtgaggtgtcagttccccattggtctaggccaggtgttctgtggcggtccccacaccacacaacacacacacatctgcacctcaaccacagactacacttgctgaactggctcctggggccatgaggctgtcactgccactgctgctgctgctgctgggagcctgggccatcccagggggcctcggggacagggcgccactcacagccacagccccacaactggatgatgaggagatgtactcagcccacatgcccgctcacctgcgctgtgatgcctgcagagctgtggcttaccagatgtggcaaaatctggcaaaggcagagaccaaacttcatacctcaaactctggggggcggcgggagctgagcgagttggtctacacggatgtcctggaccggagctgctcccggaactggcaggactacggagttcgagaagtggaccaagtgaaacgtctcacaggcccaggacttagcgaggggccagagccaagcatcagcgtgatggtcacagggggcccctggcctaccaggctctccaggacatgtttgcactacttgggggagtttggagaagaccagatctatgaagcccaccaacaaggccgaggggctctggaggcattgctatgtgggggaccccagggggcctgctcagagaaggtgtcagccacaagagaagagctctagtcctggactctaccctcctctgaaagaagctggggcttgctctgacggtctccactcccgtctgcaggcagccaggagggcaggaagcccttgctctgtgctgccatcctgcctccctcctccagcctcagggcactcgggcctgggtgggagtcaacgccttcccctctggactcaaataaaacccagtgacctcaaaaaaaaaaaaccccgggcctttgggcggaaaaagtaaaggccggtatttctcccctttaaaggaacccgccccagg

SEQ ID NO: 679560 - DNA, 905 bp, Homo sapiens
  misc_feature (36)..(36): n is a, c, g, or t
  misc_feature (70)..(70): n is a, c, g, or t
  misc_feature (121)..(121): n is a, c, g, or t
  misc_feature (127)..(127): n is a, c, g, or t
  misc_feature (183)..(183): n is a, c, g, or t
  misc_feature (193)..(193): n is a, c, g, or t
  misc_feature (196)..(196): n is a, c, g, or t
  misc_feature (222)..(222): n is a, c, g, or t
  misc_feature (228)..(228): n is a, c, g, or t
  misc_feature (247)..(247): n is a, c, g, or t
  misc_feature (262)..(262): n is a, c, g, or t
  misc_feature (266)..(267): n is a, c, g, or t
  misc_feature (278)..(278): n is a, c, g, or t
  misc_feature (317)..(317): n is a, c, g, or t
  misc_feature (343)..(343): n is a, c, g, or t
  misc_feature (356)..(356): n is a, c, g, or t
  misc_feature (413)..(414): n is a, c, g, or t
  misc_feature (472)..(472): n is a, c, g, or t
  misc_feature (685)..(685): n is a, c, g, or t
  misc_feature (816)..(816): n is a, c, g, or t
  misc_feature (899)..(899): n is a, c, g, or t
ttcatgctatcatatttttttttgtttattcttatntattgtgtctatattgtgtttgttttcaatttgnttattttatatatattttttattagctgcagtagctgcatttctatttttnattacnattttttaaagtctttttgcttggtcatctaaagacgtttttcaaatttcaaaagntcagcttttnttnttctccttgtttcccctaaggatttnttaaantgtctcattcatttccttntttctaaatgttccngttnntaacgaaacantgcaaaaatggcaaacattttcttggaccatttttttcnctgttacaacaaaaaatgttcaaggnaaatagatctttnttttgttttattttttgtctgtttgtatttttattaagtccgttcagttttattttnnttacatagctgtaaccatcttaaggaaaatgacattaagtttgcaacaaatacttgcnggtgaaaacacattactagcatttcaaaaatttacaaaaatgtaacaaaatatcctaaacagctatctttatatttgtaaaggaagtatgaacaactggcttaaccagtttccactgcacatcaaacaggtggcaaagtgatagagatcatctttgatttttaagagaataataaaaactaatttatatcccacacattacaattctaggggnttaggaacaggctaacacatgatgtcatctactttaacagccttttcatttactcgtattgtcttgatactttacaatgattttttttttcctataagataatcgtattgttgctgtaaaagccgtaattnttttattttttttaattcccttaaagaaatcgtgtgaaccatttcccattagatttcataaacacacgtgaaaattcagacanaatagg

SEQ ID NO: 679561 - DNA, 1160 bp, Homo sapiens
tgaaatggagctgagatggctggagccagggtccagctagaggacaatgcccacgtggcatcttcggggccctggaggagggagtgggaggaggatgggaggggtgaggtgtcagttccccattggtctaggccaggtgttctgtggcggtccccacaccacacaacacacacacatctgcacctcaaccacagactacacttgctgaactggctcctggggccatgaggctgtcactgccactgctgctgctgctgctgggagcctgggccatcccagggggcctcggggacagggcgccactcacagccacagccccacaactggatgatgaggagatgtactcagcccacatgcccgctcacctgcgctgtgatgcctgcagagctgtggcttaccagccagagactctgctcctatcctccccacctccccctaactgagcagcagtcctgagggccctgcctcccagtccctccttgttccagatgtggcaaaatctggcaaaggcagagaccaaacttcatacctcaaactctggggggcggcgggagctgagcgagttggtctacacggatgtcctggaccggagctgctcccggaactggcaggactacggagttcgagaagtggaccaagtgaaacgtctcacaggcccaggacttagcgaggggccagagccaagcatcagcgtgatggtcacagggggcccctggcctaccaggctctccaggacatgtttgcactacttgggggagtttggagaagaccagatctatgaagcccaccaacaaggccgaggggctctggaggcattgctatgtgggggaccccagggggcctgctcagagaaggtgtcagccacaagagaagagctctagtcctggactctaccctcctctgaaagaagctggggcttgctctgacggtctccactcccgtctgcaggcagccaggagggcaggaagcccttgctctgtgctgccatcctgcctccctcctccagcctcagggcactcgggcctgggtgggagtcaacgccttcccctctggactcaaataaaacccagtgacctcacttcttttctctgcaaaaggtgcttgtggggctgggagtgcagacattggtgtttctgctgatgtcccttgtgaaaaaaaaa

SEQ ID NO: 679562 - DNA, 788 bp, Homo sapiens
  misc_feature (692)..(692): n is a, c, g, or t
  misc_feature (713)..(713): n is a, c, g, or t
  misc_feature (737)..(737): n is a, c, g, or t
cgcgaatcggcaacgtgaagaaggccgtgcacgacctcggtatcgactacccggtcgcgatcgacaacggctattcgatctggcgcgcgttcggcaacgaatactggccggcgcactacttcgtcgacgcgcagggacgcatccgccatcaccacttcggcgaaggcgaatacgcgcagtcggaacgcgcgatccagtctctgctcgccgaagccggccatccggaagcattgaacgtgccgctcgggctggccggtgcgcccgcgaagggcgcgctcgcggcggcggacgccgcggacgtgcgctcgcccgaaacctatgtcggttatgcgcgcgcggaggacttcacgtcgccgggcggcgtcgtgcgcgatgcggcgcaccgctacgacgcgccggcgcgccccgatctcaacgactggggcctcgccggcacgtggcaggtcggcgccgagcgcgcgacgctcgccgcaccggccggccggatcgtctaccgcttccatgcgcgcgactgcacctcgtgctcggccccggcgagaacggccagccggtgcgctttcgcgtgacgctcgacggcgcgggcccggcgccgcgcacggtgccgacatcgatgcgcagggctacggcacgtcaccgggcaggcctgtaccagctcgtcaggcagccgggcgatcggcgacgcacgttcggancgagtctcgatcggggtcgangcgtacgcatcacttcggtgacgngggcccgtcatcgggcccgctcaccgcatcgaggagaagagaacgatcccc

SEQ ID NO: 679563 - DNA, 1076 bp, Homo sapiens
  misc_feature (626)..(626): n is a, c, g, or t
attcacttcaaatacggaaagcgacgataaacgacgagaaacggcacaaaatagcgacgacacgacgtcaaagcgacgataaacggacgtctaaaatacgtaaaacatatatccactaacattccaccgagaaagccaccgacatatatatattgtagtacaggaggaagaccgtaaaagtaaattgagtgcatacgtcacgcggcttcgtagctctaagtacgctcagcgaagtccgtgcgagggcccttcgaattaaaagacggaggttcctaaaacatcacgtagcacggcgattcagtcgtaaataccgaagtaggaagggttgaaacggcgaattcctaccatttaggtgatcaccgaaaataaatctactaacactaatactaaaaaatatcctgggcgagagagccgcggtacgttaaaacggtatagtagtaacgaaaggctcgagaaaattaaagttagagcggttaatatggtggatgacgctggcggtgacaggtcgcggaacgcaagctactcctccacgtgagagcggacatccccgcgcctcctaactaccacaaagagcgaaaaggaaaacggaggaacaaacagaaacgtagccccgaatgtaaaagtgnggagtaacaaacgacgcagccgatatagcccgagaaagaacaaggaccagcgataaaccgaacggcgcaggcggtatagcaaacggacaagcgagggcgtggcaaaggtagccgcgcgcagcagggggaagccagcgaaagatagtagtttactcactaagagtccgatccaaacagcaggatactaaccgatagaagccatagccgtacggaggataaaacaaaataagcatagacaccaaataccggaagagataagctacaagtaatcagcgaggtaggggaaaaaaagaccaaggttccataaacataccataacggaaaaaggagaataacagacatagcataaccccagtaaaggacaacgcatacaatcgagcattagcaaaggaaataacccacataatgaccactgacagtgtacttgctagtaacatacgtagggacact

SEQ ID NO: 679564 - DNA, 394 bp, Homo sapiens
gactagctgactcttcctttcagcctcatccaacccccagccacccttctcctgccccagccttccatctcatctctctgcttccatctctggctttatccactccagccagatattgctgctgccagatccatttgctttttatcacatcactttcttgcccccaaatctatcgcactttcattttgcccttttcattgtttacagaaaaatttgggttttacttgatagcagttatgtgtactagctgttgataatatcatcacacttgagtgccgagcattttctgggcaaggtttgatttcagtgttttcgtggtatcatttgctagactttatatttcttattctgtttcattctcttacagctggtcttggaagaacagggacattgc

SEQ ID NO: 679565 - DNA, 734 bp, Homo sapiens
tagtctaatcttatattcttttagaaattagaatgtgtggaagcgaggtatactttccacatgactctttttttaaagatggcttgagatactcaccagacattaatttcattttagttgtaatgaccagtgatgggcatcattgctttaataattaggcatcattcttaggactgcttgttgagagtagacggcagcttaatgaccaggacaccaccctcccaaccttccattaaaattcagcttgccagaatagcaaaatatgaaaccaataataactaaaaaaatgcagttttctagtaaatagagacttgaagtggatatatattcatcactaatttttacattagtgtttaggataaacataatgtaagagcaggtaccatggttgctaggtaaccagtggtgattgtcatgcccgatattcaactcttaaagggtatgcttaatgggtataatcttcaatttaatttgagattaatttaaaaatgtatgcttgaaatattttatgttaataaacttttaaatattgcaacatggtattaacactaaatgtgtgacaggcactgaattccagaacaggtttcttaaaactgtattaacttgtggttagagctaaattattctacccacaaaaataacttttgaatcaaattaacaaattaattagtgttatccttaaagacttggtgagaacctgcaatatttctgggtgaaggattgcagacatagca

SEQ ID NO: 679566 - DNA, 371 bp, Homo sapiens
gaagagatgcatcaagcatcattagttatatagggaaacagaatggtctaaaaccataatgagatgccgcttcaccccctctaggatggacacaaaatggaaatgtaacacgcgtttgctgaggatgtcaggaaattgaagccttcatacattgctgaattggaagtgtcaagtggctgcagccgcgtgtataatgagtaagtccgtggtgctccaaatgaggttacagtatggacaatacatatgtcccaacttctttcgctctctagatatttatgcgtagaaaattgaagacatgttcaaacaaaatgtgtacataaatgttcacaggaacgttattcataacagccgaaaagtggaaacaatccata

SEQ ID NO: 679567 - DNA, 936 bp, Homo sapiens
gacgagttcgacggtcccgcggctctgtctcttgctgcaacagtgtgcggacggagacagatccgggaaaatctcttccagctctccgaagacgagcacttcgcggatttccttctccgtattgtcaaaccacatctcgtgggatccactatgcttcggtacaacttctcggcttatctggtgacctgtccaagaccgccgatttttgatgaggtctagcatcattcttggcacgaaaccatactgaatggaagcttcaccagaaatgtcagtcatgaagtgaatgccaccgatcgatgagggtgccttacgatcaatgagggctggtcgagtatgtacctggctggaccgtcctatcacctatgctctcttcatgggaactttctagtattacggaacacggcagcatatgcagtatgccctctggtaaaggacgctgaggcgcaagtgggctattccggcctaaacatggtccgaaggaagagatgcagcctgtaggggccagacttagcgctcttcctgtaagaaatgtttgtagggtgagttgggcgtcacgtctgtcgatcgtctgtaaccgtgacaatcaaagaagatccagctcggaaaggagtgaagtggggggtgacacttggcacagtaccgctgatggacaagggcgtaggacattggcgcctctgtgtagaaaagaccgtatgtataaccagcgatccttatctagaaactgccttcactgaccacatggggtaaactagtcacgctgggggagatgcgccaatgctgtagtcgcacttcgtggaagactcgactttcctgagaattggggaaagtggaactaagcaagaacgatggcgtgcgccgactgagacctagctacaaatggggtgggtggcccgataggctggtctgggcgaatactcttcctaaagggtaactcta

SEQ ID NO: 679568 - DNA, 138 bp, Homo sapiens
tattcctattttcagtagagacggggtttctccacgttggccacgctggtctcgaactcctgacctcaaatgatccgccttcctgggcctcccaaagtgctggaaacgacaggcctgagccgccgggatttcagcctt

SEQ ID NO: 679569 - DNA, 238 bp, Homo sapiens
aacaactcttgtgcctcagccaccctcagtagctaggaccacaggcctgcaccaccacacccggctaatttttgtatttttagtagagacagggtttcaccacattggccaggctgttctcaaacttctggcctcgagtgatccacccgcctcaatctcccaaacaaagtgctgggattacaagcatgagccaccacgcccggcccctgcttggatttttaacgaacctcataacgaa

SEQ ID NO: 679570 - DNA, 101 bp, Homo sapiens
catgctatagataatatattccgcactcaaggagtaaccaggtcgtccaagcaagaaacaaatgggaaaatgtcttaaaaaatcctgggtggactttatga

SEQ ID NO: 679571 - DNA, 910 bp, Homo sapiens
  misc_feature (348)..(348): n is a, c, g, or t
  misc_feature (372)..(372): n is a, c, g, or t
  misc_feature (380)..(380): n is a, c, g, or t
  misc_feature (393)..(395): n is a, c, g, or t
  misc_feature (401)..(401): n is a, c, g, or t
  misc_feature (429)..(430): n is a, c, g, or t
  misc_feature (442)..(442): n is a, c, g, or t
agcgggtttccttccagcagctccgcggggtaggaggggaatgggcttgctctctctccggcgattactaacttttgcatcgcccctgtttttgtctttctctccatgtccccttcccgccctctgcagaccatggtgaagtccgggcagcagcatcgcagccgtccccggtgacggccggctccctctcctggaagcggtgcgcaggctgctggggctacgattgcggaccgctttctgctctatgccatggacagctattaggcgactagctcggttgtcctccagatgtgactcccgtgctgccaggctgcagcgtggcgcgatcgactctgtgcacgtcctgtnacaccaaaagtggcatgatccttntgcagaanatgactacattcnnnttattnggaaatagcggtgcttgcagcgctatgnnggacagtcgatncctgcgagtgaactcgtcatgagggcgcaaggcaatgtgtatcatctgtaagtgttttacattgctctacctgccggaatcgcctggtcccgggagatcggtctcactacattcaatggcagtttattttgtgaacatgattagacctacagtctctcatcaatggccatttgaattcacttcagagcaatccactactgccagaccagaaggtctgctagaaggtcagagtaatgcagaatgcgtgccttcatctcagatttgtcatcacaggtggatccatgtgtcttcagtagacaaggtcccctgtgtagctagcaacagtgccagctccatgccattgcaccttctttagtcttgatggcccttccgcattattggggtcattacaattgactgatatgaccttaaggactccatgaacctggctatggggagactgttgagaaattgaaaaagattcaccaa

SEQ ID NO: 679572 - DNA, 845 bp, Homo sapiens
ggcctcctgccggcctcatcttctcccaggcaaacccgcctggagccctatggccaactgcgattacagcccggtgtccggggacaaaccctgttgccggctctctaggagagcccaattctgtcttggcgtcagtatcctggtcctgatcctcgtcgtggtgctcgcggctggtacgtccctaggtggcgtcctagcagtgatagactgtgtccgggactagccaccaatgcgctttcccgagaccgtcctggaagcgatagcgtcaagtatcactgaaaattcatcactgagattgatgaccattggtagacgttgcccccatgctcgtaatagtgcgatgcgtttcgaagagggttgcggttgcattatgctaacagatcagtcgcattgtccacattgtacgtcgattcgaacgacctatcgaagcgcacgtgaatttgaagcgtcagtggaagcatcaggagcgcagtacccatatgcgagactacttgaattccttctttccgcgatgcatgacataatacacgcatcttggtcccgatcatggttctacgtcgaggtccgaacgagagacattagttcaccgcctgtgcaggaccacttgctgctaagggccttaaccttgcctcgatcgaacctcatcataggatgctgcgttggaacttcgagaccaacttccagaacatacatactgattcatatcttggcaccgaaacctgtggaagacaacggatctgactaggccaatccaaccggctgttctcagatatatctgggagaatagcgcgtctttcccggcgaggatttgcgagagatcttgccttcgtgatgtgttctccatg

SEQ ID NO: 679573 - DNA, 332 bp, Homo sapiens
tgtctgatagctgagaggtaccagcaatagcccacaaaaaggagagtcgatatgcccgttacgttatcgaatggtcagcaattgtttcttcaccgtcgatgccgacggccaggagaaacaacgggaacctacccgtttcactgtcgacacagacagagagaaatccatgtcgtttgtgaagttgaacggtgactgcacctacatcaccgaagctgaagccgacacattgaccgtcgctggcgccaaggatggccgtaagcatttgaaggccaccgacggtgattcggtgatttgattgatctggatcatcactgcctgaaaagcgctgcacc

SEQ ID NO: 679574 - DNA, 573 bp, Homo sapiens
cctcagggttttccggagctgaagaatgacacattcctgcgagcacctggggagaggaaacagactacactcccgtttggtgcatgcgccaggcaggccgttacttaccagagtttagggaaccgggctgcccaggacttttcagcactgtcgctctcctgagcctgtggactgcctcaccactggcgctcctctggatgctgcacatttctcgacatcctgttgtcccaggcactggcatggaggtgaccatggtacctggcaaaggacccagcttcccagagccattaagagaagagcaggacctagaacgcctacgggatccagaagtggtagcctctgagctaggctatgtgttccaagccatcacccttacccgacaacgactggctggacgtgtgccgctgattgggctttgctggtgcccatggaccctgatgacatacatggttgagggtggtggctcaagaccatggctcaggccaaggctgggtctatcagagactcaggcgagtcacaagtggttcgaatcgcaagagaggctcggccatatctggtagagcaatggggtgg

SEQ ID NO: 679575 - DNA, 145 bp, Homo sapiens
caccatatatttaatccaacaatgaggcatgattgataaatatactcttagaggagctgaacaatttcacttgcaggtgggccttgataagaccgagacaatgacactgccattaaggcatgatggtctactgatgacttagttt

SEQ ID NO: 679576 - DNA, 1335 bp, Homo sapiens
tgagcggcgctgggcgctctcggccaatgagcggcgtccacatgccgctggcggcggcgaaacgtgggaggcagctggcctgataaatgctattagagcagcctcctgctggagcctgtccccgacgccacctccttttccttctgccgcagtttcctccgcctgcatgtcgggcgtgcggcgctgagggacccgggctgagcgcgcctgcgacacctgcaccgacctggcttcgccttccctcgtgctgctgttccggcccttcagtgggtcttgcctgtgtgtgccccactccttcctgtgccctgtggcgggtggccttcttgatctgcctcaatgacgagcggtggacggggggcctccggggggcccgcagggcaacttgcaccacatcaccgggcaggggccgggcatgaagggggcggaggggaagggccacaatcccgtttcatggggcgaacggggcgaacgtggaagcggatgaggataccaggaaggccgcacgaaaagccacgggcaccaagtgacgagactgcactcggggggacccggcagccagaaagggggagccggaggatcattgggatacaatgggaggcggcggaaaggggagagagaccaggcccggagaggcgcatgccacattacacacgtccggcccaccgggggctaggaaaggcgacgggaacagcgccgggtgcaccggcacaacaggaaacgcgaaacggcacacgggggacgaaagaaaggacccacgactacccggccggccccacttgtggggaggacatacaccacggtaggtgatatgtgacaaacagaacaaggcaccgacgacgagggccacgtggaacaggtgtcgccgaaaggtgtacgcggagaaaagcagccagaaacggaccagcggcaccctggcagacgagtgaggacaccgactggggcaaagtggaccagaacatggggacagctgtgccccgggggggcacacccccctcgacgaaaagaaggcacaacgtggtgtagaagacaaacaccgcggccgtcgccacgaccaacaccaacaagggaacacgtgggtggaggacaaccggcagagtgctatgccatggggaggcccaaacatttttcaggggcaactgctaacaaacaccgaaagagcaaggaaccccggggatggcctagtgaaggcccactgtggaggaaaacccacaggggttccacaagcgaaaaacggcctgataaagctgggacggcacaacacatgggggtgggagcatccaccaagccgtaacgttattcacccgcgggtttggccaccaaaaaagcagacaacac

SEQ ID NO: 679577 - DNA, 172 bp, Homo sapiens
  misc_feature (76)..(76): n is a, c, g, or t
cccgcatcccccttccaacaaaaaaccccctctacctaaaaataacagccctccgctgcagtttcctaggactgantacaagcctagacctcacctacctaaccaacaaacttaaaataaaatcccccctatgcacattttatatttccaacatactccgattctaccctac

SEQ ID NO: 679578 - DNA, 143 bp, Homo sapiens
gcggccgcctactacttctactgctcgaattcaagcttctaacgatgtacggggacatgaaaacattctcctccgcataagcctgcgtcagattaaaaaaataaactgacaattaacagcccaatatctacaatcaaccaaca

SEQ ID NO: 679579 - DNA, 852 bp, Homo sapiens
taatttatagagcatttcggggggggggggggaaacacacctaaacactttatctccaagttacaaaagtttgaggtgcagagggaaggccagatttttttttaaatgaaattatatagatgagatctcagtatttaaactggtgtcctcaattttggtggaaggctggggttgggaaataacccgcctctagtggctggtgggtatcgcaaggcagcggtggcttaatcaatatttcctggtgctcaccagaggcaaaaggttaccaatatccttgacaccattctctctccatttacttctgggtgggttaccctgactctggactcttagaaggtggccccgagagggggctaacctttattaaacagatcggcatattatgagatctggcgggcgagccacaagggggagttccacattaactctacaagaccaaaccatttggtatctgggcatcatcttactaacacgacggacatggggggttttctggcatcaactgggtatgacgggttaagaatggccgtatacaagagggaatagaaaactggtactgttttaaaataatctgtaacttttcaactttgatattataatataggggggaataccaattaatgtgtgcgtgggaaacactcccgtcacaggtattactaccctggtgtttatataaccccgttaactcgtgccggtgcccggcggcaccggaagccttttgggacggtaggtcccaagggtatgcgggcgtgcccgggttaagtggcaccggagtgacaagggatcccggcggcacgtggcacttcttggccacagcggtggacccgggcacagggtcgccgcagacgcacg

SEQ ID NO: 679580 - DNA, 245 bp, Homo sapiens
tgcgctgcatgaacgcttcactgtggttgaactccagcagatggtggctcggcccgatgtcgtggagatgcatgatgtgacagcgcaggaccctaagctcttggatcagctcaaggccactcggaactctgtgcctgtgccaggccactggtgtgatcagacgcaaatactgcagtgcactgggggcattgcagccagccccccttctgcagcttgccgagacttcatccaaacgcacaggccat

SEQ ID NO: 679581 - DNA, 1137 bp, Homo sapiens
  misc_feature (330)..(330): n is a, c, g, or t
  misc_feature (354)..(354): n is a, c, g, or t
  misc_feature (450)..(450): n is a, c, g, or t
  misc_feature (456)..(456): n is a, c, g, or t
  misc_feature (461)..(461): n is a, c, g, or t
  misc_feature (467)..(467): n is a, c, g, or t
  misc_feature (477)..(477): n is a, c, g, or t
  misc_feature (497)..(497): n is a, c, g, or t
  misc_feature (629)..(629): n is a, c, g, or t
  misc_feature (971)..(971): n is a, c, g, or t
gggtattagtgatggtaaactttgtgtcgctctttatgaaatgatccatataactgtgggtgcatcagtgcttttcaaaggggctgcttactatagggttaactatgtatattcatgttaagagttaacttgtggttggctgtttcctggattttataacatacatgtgcagaaatgtattcaaatgaaaggaagcatacctttatcaagatgctattaccattgaacatcaagtataatatttcatttggattctctttttggttaatgcctaaaaatgcctattgggattttttttttaaattaagagaagctctcttctgtgtagancagttgtcccaaaatagcttaggnttggttccctgttgcttgacagatttaactattctttccagcagtggaggtgctgtcagagtccagtgttctagaagaggcagtgtctaaagccanatttcntttcnaattcnggtagctatnaccaggaatttggaaacgtntggttaaagtagtctaatattttcatgtaaagagcataacatttgcgctatgtattaaattttggtaaccctaacagttgaatcaatatttcaatcagtgccaagggctcctgtagtctatccacgttgtancaatacatatttgtcagattattgtcaaacacttgtgtatgcttatttaaaagatctattagggtgcacatagttgtggatgtcctaagagtatgcaaataaattttggtacaaaaaaaaaaaaaaaaaacaaaacattttttgtgggcaccagggccgtaaaaaaagttccaaacaccacttgtttgtgggcggggccccaagtagagaaaggacatatgggcaacacggggtcccaaggggaacctcgtggcacaagaagatgtggtggcttcccccccaaaaaaaaaaagcgccggggagacggcgtttttgaccaaccaggagggtcggggcaactcngggtacacacggccacggacataaccaccccccgcgaggatgggaaaaacagagagaagagagaaatgagagaaagagaagagagaaaagaaggaagagagaaaagaaacaaaagagagaagacagacgagaaaagaataaaggagaaaagtaatgaaggaagaaa

SEQ ID NO: 679582 - DNA, 852 bp, Homo sapiens
ggcaccgtggttcgcgagatgtatctctggccctccggcccattcccccggttcccccgatttggtctcaaccagggtaaccacccaaaataacttttgctggggtgatagatgaaaggattgctcccccctttctggtaacaacactagtgggtggggcccgcccacattttcttaagcagtctgcggggaaaccaccctaatgtgcatggaaagttgcttttcatcgcacaagccacacacattgggtgccacgagcgggatctgacttgtagtagcctccccctgtgggaccctccatctggtcgtctgcaagtgttattcaccaccagccggtcctccgccggggggtgctagctacaaaccacgccgggcccaaacaaaagatcctgttcggcatattgctccccgcgaggttgtctgataggatcgatccccgaaggaggtcaaagacgggcgctgcacctatagttcattttcgcccgcatattgtggtgcgcacccaccccagttaaaaagaacaccggtcggcgacagacatgcgtttccatcacgcctcttgtgtacctccattggcggcctcgatctacagccataatcgtgtaagcaagggcattaattgagtcaaccactgggctgtcgccatgccgctcccccagaggcgaagcagaaaatttggtctcggaacccccacttgtggttggtttttgtggcgctatgccctcgttgatagtatagtgagtgtgcttcataaaccacgcttcttttatatgggcgtcctcgctctgtggcacgccactaagtctgcttgtcggaaaacttgtggtgcccccccacaattatcaacccacc

SEQ ID NO: 679583 - DNA, 644 bp, Homo sapiens
aacaatgcaaatatagaatgtttggctgggcacagtggctcactaatcccagcactttgggaggccagggcaggtgacctcaagcaatctactcatctcggcctcccaaagtgctgggattacaggcgtgagccaccgcgcctggcctaatttttgtatttttagtagagacggggtttcaccatgttggccaggctggtctccaacttctggcttcaagtgatccgcctgctttggcctcccaaagtgctgggattacaggtgtgagccaccgcacccagcccatttgtagtttcttaaagccccagatcttctgactatttgaaatgagagaacataatctgtccctcttactcttgtcttctagaagagcggtgttccataaatccttaggattctgaggttatgccccagagactgtcttacagaataaaggggagaccaagccgttaaaatttccccactacttttgtaccattgcagtttggcttttagatgtttactatattggagttctgcttaaagtttgaaaacactgctctagatagacccttccactctggatgcctcttccatcctatttgggccctggatattagtgtctggcccaagaggtctaaatttgtggaatgaagatggtgaac

SEQ ID NO: 679584 - DNA, 442 bp, Homo sapiens
  misc_feature (6)..(6): n is a, c, g, or t
  misc_feature (63)..(63): n is a, c, g, or t
  misc_feature (74)..(74): n is a, c, g, or t
  misc_feature (88)..(88): n is a, c, g, or t
  misc_feature (140)..(140): n is a, c, g, or t
  misc_feature (150)..(150): n is a, c, g, or t
  misc_feature (159)..(159): n is a, c, g, or t
  misc_feature (174)..(174): n is a, c, g, or t
  misc_feature (178)..(178): n is a, c, g, or t
  misc_feature (191)..(191): n is a, c, g, or t
  misc_feature (217)..(217): n is a, c, g, or t
  misc_feature (223)..(223): n is a, c, g, or t
  misc_feature (230)..(230): n is a, c, g, or t
  misc_feature (240)..(240): n is a, c, g, or t
  misc_feature (275)..(275): n is a, c, g, or t
  misc_feature (277)..(277): n is a, c, g, or t
  misc_feature (291)..(291): n is a, c, g, or t
  misc_feature (313)..(313): n is a, c, g, or t
  misc_feature (320)..(320): n is a, c, g, or t
  misc_feature (335)..(335): n is a, c, g, or t
  misc_feature (344)..(344): n is a, c, g, or t
  misc_feature (365)..(365): n is a, c, g, or t
  misc_feature (372)..(372): n is a, c, g, or t
  misc_feature (376)..(376): n is a, c, g, or t
  misc_feature (385)..(385): n is a, c, g, or t
  misc_feature (390)..(391): n is a, c, g, or t
  misc_feature (393)..(393): n is a, c, g, or t
  misc_feature (403)..(403): n is a, c, g, or t
  misc_feature (415)..(415): n is a, c, g, or t
  misc_feature (421)..(422): n is a, c, g, or t
  misc_feature (426)..(426): n is a, c, g, or t
  misc_feature (436)..(436): n is a, c, g, or t
ggttgnggttctgggaatgtgttctaacagtgtaaccatctaaaaataagaaatcccaaaaanacaccaactgnagaaaatttaaaanagaatttaaatggagacttttttatttccttcattgcaatataatgttagtntttttttatnatttggtgntttagcagctttgtngtcntgtagcacaaagnttctctttactgccacaggctaaggntgctgnacagggnaggcaccaangggagacactggcgatgggagtgctattgggaaantnctgtgttcaagcanaggatggggttatttacatccnccagagngtctcaaaggtgtanatgggcaantcttccattgttagattaggnttatgangggnggggggggnggggnngnggggctgtgngcgtgtgggggnggtggnnctgnggtgggcttngggggg

SEQ ID NO: 679585 - DNA, 1120 bp, Homo sapiens
  misc_feature (10)..(10): n is a, c, g, or t
  misc_feature (20)..(20): n is a, c, g, or t
  misc_feature (23)..(23): n is a, c, g, or t
  misc_feature (474)..(474): n is a, c, g, or t
  misc_feature (1007)..(1007): n is a, c, g, or t
actaccagtntagccgcacnttnactatactactaacagaccgcaacctaaacacaactttctttgatcccgctggaggaggggacccaattctctaccagcatctgttctgattctttgggcacccagaagtttatattcttatcctcccaggatttggaattatttcacatgtagttacttactactccggaaaaaaagaacctttcggctatataggaatagtatgagcaataatgtctattggctttctaggctttattgtatgagcccaccacatattcacagtaggattagatgtagacacacgagcttactttacatcagccactataattatcgcaattcctaccggtgtcaaagtatttagctgacttgcaaccctacacggaggtaatattaaatgatctccagctatactatgagccttaggctttattttcttatttacaggttgggtggtctaaccggaantgttttatccaactcatcccttgacatcgtgcttcacggatacatactatgtagtagcccattctccactatgttctatcaatgggagcagtgtttgctatcatagcaggatttgttcactgattcccattattttcaggcttcaccctagatgacacatgagcaaaagcccacttcgccatcatattcgtaggagtaaacataacattcttccctcaacatttcctgggcctttcaggaataccacgacgctactcagactacccagatgcttacaccacatgaaacactgtctcttctataggatcatttatttcactaacagctgttctcatcatgatctttataatttgagaggcctttgcttcaaaacgagaagtaatatcagtatcgtatgcttcaacaaatttagaatgacttcatggctgccctccaccatatcacacattcgaggaaccaacctatgtaaaagtaaaataagaaaggaaggaatcgaaccccctaaaattggtttcaagccaatctcatatccnatatgtcttctccataacaaaaaaaaaagggggggggtaaaattcctcgaggggcaagttacggtaccgttttggaaaggtcctaggggggataaaaaggggggtaaagggag

SEQ ID NO: 679586 - DNA, 213 bp, Homo sapiens
caacatgatactacaggaaccccttcacctccaaaaggcagtggaggctgaccaaatcactcatgttgtagacgaggtcagggtccacagcttacggaagagggtgggaggagtaggaaaatgtccatcttggtatactggtttgtcacctataattcattttcccacagagaattcttacattatttatttatttatttatttatttttgag

SEQ ID NO: 679587 - DNA, 455 bp, Homo sapiens
  misc_feature (199)..(199): n is a, c, g, or t
aaggtccacacaaggagagaaaacaagagtgtagatacgggtgtgagagtgggccaggcgtgtgttgaaaggcatgcagcaagtcaggcttctagacatgtctgccggagagcttcaggtcttctcatcatgagaaatggcaagcccatgtggttacaggcagccacgtacaccacaccatctttgcggaaggttccanggaagagacagacaactgaatgacctcaagccattccttgggcagagccccaggccgaggagagctgggcgagtccatgatgtctgatcagattggggctggggttcaggtcttaaacatcaggaagcccccaaatgcagtgcccgacaggcttctctttgttattgatccctgggttaactcaaaccatactcgctcacccttctgcagctcagccatggcaaagaccgttgctgtgcttccactcccctgccca

SEQ ID NO: 679588 - DNA, 151 bp, Homo sapiens
attcccttatgcatttcttgcagggaagtctaaattgtaataaactccctcaagcttgctggttttatctaagaatgtgcttgattcgtcccgtatttttcgatggggtaattttggccagatacatgaatttttgggaaaagaatttttc

SEQ ID NO: 679589 - DNA, 324 bp, Homo sapiens
gatcagtgaagacatttaagtatttccttaacaagaagtcttgccagaaacagtatgaacatctgagtggggccaggtgcggtggctcacacctgtaatcccagcactttgggaggccgaggtgggcagatcacctgaggtcaggagtttgaaaccagcctggccaacatggtgaaaccccatctgtactaaaaatacagaaattagccaggcatgttggcaggtgcctgtaatcccagctactcagagggctgaggcaggagaatcgcttgaacctggtaggtagaggctgtagtgagccaagatcgagccatggcactccgg

SEQ ID NO: 679590 - DNA, 637 bp, Homo sapiens
ggtcactcggcgccgggccccggttccggcgctgccgggtctcggttcgggttcgttgccccggtgccgggaccgggccggtctctccggccgccccagccgggcgcagcagccggaggtgtcgggaccctctggacccaccctagcgggccccgccggcggtcggcctccggtccgggctcccagtcgcgccgtcctcgccgccccatggagtcccagtgcgactactcgatgtacttcccggccgtgccgctgccgccgcgcgcggagctggcaggggatccgggccggtaccgggcgctgccccggcgcaaccatctgtacttgggggagactgtccgttttctgctggtgttgcgctgccggggcggtgcggggtccggcaccgggggcggcccgggcttgggctccagaggagcctgggcagaactggcaaccgccctggccgccctggcctcggtcagcgccggaggcgggatgccggggggcggcggcgccggcgaccaggattcggagcccccaggggaggggatcctgggggtgggggtttgttccgaggctgcagcccccttctcagccacggcccgggccctgctacctcaaggggagcgaccacggtgaggagctttgggggact

SEQ ID NO: 679591 - DNA, 951 bp, Homo sapiens
tctgattataataaaaggactaaagcagaaagaaattatcttcctctcttgctcccggccatatgttttttcatataaaataatgggtatcaattttgcgtcgccgaattagttgtttttcgcacacccccctaaaagtttttgcccctccctgccgcgcctttaaacaggcctttacccaaacgtggttcttatatctccctaacatttatgagtgttaatttgaaaaaagaggaaacctttataaataaccccttcttcccttagccttatgtgcctgattaattcccctctaccaaaagaccgttacactttttttccagaagggaccaccccgccctaaaacaaggaggttaaacccccagctttttttaataaaaggagcccgttttgttccctcccctcttgagaatctccccaacctttttaagaaactttaaggcgttgtaaccaaaggtctccccagaaccacggtgcttccccgccccgccagtgattcttttcgccacaatcttttataaatccacctcttttaaaaatataaaaaagttgtggacactttgaatattaaaaagaaacaccactcgcgagaatattttcttcgcaacacacggcgaagttgggacacaaaaaaatgtataaaaaatattgtagttgtgtttttaccgccgagtattacaacagtagtatagtaataatgattataatctcatcttctcccgcctcgcgtcccatttatcacgctattatgtattagatgtttaatttattaaagaaagttaatataaattctcttttggcgacccccaattatggtaaacctatggatatttttttttaacctatattatatggtagtttgtgctccccatgatataagtgagtttattttttaaatgggttgaacccaaaaaaaaattgtggaccccttttaaaaaagggaaaaaaaaa

SEQ ID NO: 679592 - DNA, 155 bp, Homo sapiens
tctcatgatctatagatcttcatgatcctcatgatactcatgatcctcatgatcctcatgatcctcatgatcctcatgattctcatgatcctcatgatcctcatgaatcctcatgatcctcatgatacctcatgattcctcatgatcctcatgga

SEQ ID NO: 679593 - DNA, 829 bp, Homo sapiens
aacccaagaaacaatttgggttagccatctaatatagcaaataaaatagattttttaaagaaatccaaaattgtcttaaaggaatggaccccttgaagaaaaaaaaaaaaaggtttggtccctcagttagaattggctcactagctcactagcaagaattttatattttctggaaagcaattatatatatttgggaaagtccacggtactgggaatggaaagtccaaatttaggcaacttcggagcctagaactttaatttacttttccctaaattgtcccaacacttacatacaaattttcttggaaggacataacctgggacttggcagacactggcttttgaacaaaaaccagcctagtgaatggactgagtacagcccttaaaggctgcccagttcattctattagatgactaaggaaaactagaaaaagaatacgttcaccctttgtcaggtcaatgtgaacagacagacagtcattactgtacgaggtactgaaggtgacgctgtttcagcatcttagttggaccatgaaatgtctatagaattatgtgtagtcgtccccgacgattcatttctccattacttattaccgcctattacatgtcgggtaatattatagttgtcttggcattcttactttttgacccggagagactattttggattattacagctaaaaggcttcaccagaatagcgggggcttggattcaaaagttcggcaggtttaagaaaacctgctcaggggatcacgctgtgcccacgtctggggtggtcccaatcccttaccaggggatttaatcctcataagccggtgtttgggaata

SEQ ID NO: 679594 - DNA, 750 bp, Homo sapiens
agcgctccaactggctcctcgctccgggctccgccgtcgagccgggagagatgcctccgccagcggccagtgcaccatgccatgacgacgccacgcgaccccgtgcctctcgtgctggcaccgcgctaactcagtgggctgcatagtgcacccatgatgcctgaactccaaagatgtgtgatgtgcaatgctcatgcaatgaatgaatgaatgtgtgctacaatgtgaacgactgagaaagccaaggagaaagacaagaaggccgagtggcgctggcgacgtgaagaggaggggaccccgaatgtgagagtgagccccatgtgctggcctgcatgatgccctgcctgatggccaatggatgtggcaatgtgagaatgccctgaccatgtgactgcctgatgtggcaatggcctgaggatgaacgtgacgtggctgagaaggacgctgtgctgtgctagccaatgtgatgtgatgtgccccctgaatgtgccggagccctgagaagactgtgagggctgcgtgcagaggccaaggctgaagcccccgaaggcgcccgagcaggagcaggtgcggcccccgggccccgctttgcggtggctggtgaatggcccccaaaagctgcttgaggtccgacgtcggtcccctgtgtccgagtagcgtcgggcccatacctgccgggtgtagggagcccaagcaatgactgacggtgaacccaataaagacttgggcgccctgaggcttcttgcggct

SEQ ID NO: 679595 - DNA, 499 bp, Homo sapiens
  misc_feature (486)..(486): n is a, c, g, or t
tcttgtttcctgcacttcttgttgttgttgttttgtttattttgagacagtcttgctctgtggcccaggctggaatgcagtggtataatccggctcactgcagccttaacctccaatgatcaagcaatcctcccacctcagcctcccaagtagctgggtctacaggcatgcaccgccatcatgcctggctgcctggtttgttttgagggtttttgtttgtttgtttgtttctgtttttagagacagggtctcaccatgttgcccaggctggcctcaaactcctgggctgatgttatcctcctgccttagcctcccaaattaatctgttctatatttccattattttgtcatttcaagaatgttatgcaaatagaatcatacagtcagtaaccatttgggattggcttttttcacttagaataattctctggacattcaccgagggtgctgcatgtatctataagtcattccttttcattgctgagntgtattccatgga

SEQ ID NO: 679596 - DNA, 427 bp, Homo sapiens
cggttggggctcattcaggccaaagcaaggagcggggggagggcggcatctagttgggctctatcatgagggggggggccgtggctgctgatggacgcatcgagccaggagatatgtggggtcttcattatttttccctttcgggacctctcatctttccttcctctttctccattcgtgttgcctccaccgtagggggggaggtgatcatttattggtagagtggcagcacactagcctctgacttcagtccttggcacaccacaggcaggctaatcttcctgcaggatgggtctcatcaccctttgccggctacagaactctgctgggtgtccttgtcctgtcagggctgatctcgggacgggtacctaaaactctagaatcggacagggtgaccctgctcatcgagcctcacttcccttgcaac

SEQ ID NO: 679597 - DNA, 656 bp, Homo sapiens
cggtcccggggtcctaggcggcggtgcagtccgtcgtagacagaattagagtagaagttgtcggggtccgctcttaggacgcagccgcctcatgggggtccaggggctctggaagctgctggagtgctccggtgctggcaggtcagccccgaagcgctggaagggaacgatcctggctgttgatattagcatttggttaaaccaagcacttaaaggagtccgggatctgccatgggaactcaatagaaaatcctcatcttctcactatgtttcatcggctctgcaaactctctattaaaagcgaattcgtcctattaaagtgtgcgatggggcatgctccactattgaagacaacagacttcggtgaagagaaggcagcagacacggaccttagcgtccagtgactccaggaaaacgagaagagaagcattctgaaaacatttaagacaaagacaagccatcaaacagtgccttcagaaagccaaaggagatgaagcactaaccaagtcttacccaagttcgaacgagaaacacgaacctctaaagtaaggccatccttaacaagaaggaaagaacacaccacaggtcagaagaggaagatgaaaaaagaatgggcacgacagaactgaatcaaaaacaaggcattacagggagga

SEQ ID NO: 679598 - DNA, 151 bp, Homo sapiens
cgacatctagaggaaaaccgaccatgacccaagcatgcatcccccccccctgctcgaagtgtataaaccactgcggggcatgccttcctggacaagttccgccgacacgtgagcaccgagctgacctccaaatatcgttaagctgcagcct

SEQ ID NO: 679599 - DNA, 200 bp, Homo sapiens
  misc_feature (169)..(169): n is a, c, g, or t
tacaccttgcaaatatcaagtgaaaattttaggccagtctacagtcatctgtgttcttctttccaaataggttacaaataaaacctattctttgaacatatctttcactgtttcatatctcattgtgagcaaaaaccacagttgcttaggatctctttgttttttatgnttacaacttcctcaggtataccagtttactg

SEQ ID NO: 679600 - DNA, 134 bp, Homo sapiens
ccccccctttcccccttttttgtcccccaacttgaaatgaatgaaggcttttggtttccctgggagtgggtggagccacccagggcttacctgtacattgacttgagaccagttgaataaaagtgcacccctta

SEQ ID NO: 679601 - DNA, 213 bp, Homo sapiens
gcacgagggaggctgaggcaggagaatcacttgaacctgggaggcagaggttgcagtagctgagatcgtgccacagcactccagcctgggcgacagagtagactcagtctcaaaaaaaaaccttgaaatgtaggagggtctattttatccctataacttaatccaggtaatattgggggcattggatacctctttgttttttcacagattcct

SEQ ID NO: 679602 - DNA, 483 bp, Homo sapiens
  misc_feature (23)..(23): n is a, c, g, or t
  misc_feature (282)..(282): n is a, c, g, or t
  misc_feature (437)..(437): n is a, c, g, or t
  misc_feature (471)..(471): n is a, c, g, or t
aaagagcaagcacccctgtcccnaaagcccccttcatcacctgggttaattccccgtgggtacctgtgtgtaccagtggggatgcctgtggggtttgggttccccagacccactgcagtaaagtgaatcctagcaagaaagtgagtcaccacacacattttggtttcccctagtatgtgtaaaaagttattagactaggccgtgtgcaagtggctcatgcctgtaatccccagcagtttgggaggccaaggcaggaggatcgcttgagccaaggagttcaanactagtctgggcaacataggaagaccccccccatctcaaaaaaaaaaataaagccaaaagtggtggcatgcacctggggtcccagctactcgggaggcagaggtgggaggatcacttgaacccatgaggtcgaggctgcagtttgccatgaattngccactgcactccagcctgggtgaaggaagtganactctgtctcaa

SEQ ID NO: 679603 - DNA, 113 bp, Homo sapiens
ggatcccggcgcagcgtgctcatatgcatcaaaaaaaaaaaatcaaaacagctccacgctcccaatgttcaattaaaatttcctgtgaaagggagcaaccttattcgtgacgg

SEQ ID NO: 679604 - DNA, 325 bp, Homo sapiens
tacagtcatggtgggtcagtgcggtatcaggaataatgtgggaggccggattgaagtccgggccaggaacaatggtaattgtgggacttaaagagtgagtacagctgaaggagccggggagcagaaagtatatgtgtcaggtatgaggaagaaaatagatttgggaagttatgagaaatgtagagagtgagttgagcatagttggtgatttttagggcctctaacggtattaaagcagcggcagccgctgcatgcagacatgagggctaggctaaaacagtaaggtcaagttgtttggacagaaaggctacagggtgtggtcctg

SEQ ID NO: 679605 - DNA, 414 bp, Homo sapiens
aaaccaccccagattggctgcttgttgcgcctggagccaaacctgcaagctcagatgtatagactcaccttgcgtaccagcaaagacaccgtctctcagagactatgtgaattgctgtcggaacagttctagtccgcagaccagaagatcaggctctttgtttgtgcgtctctcttgtctctctcgtttgtctttgtaccacactgcagataaacaccccttgtctgaaaactgccattcacggcacctccaggcctatgcccacagccagcccctgggtgtggagggaatgcaggactcagtttgagaagggctgcagcaggcctgccccgtcaaagaagggtgcctgagcctgggaaatcagggcagtcctgtggttcaacctacaaattaaagggaaattagaagtttgaa

SEQ ID NO: 679606 - DNA, 380 bp, Homo sapiens
cagaagacatcatctgaaaggcctccagtatagcgctcgctaccacagctctgtacgtgcttgctgaggttgtgacccataagccaccaagggttttctccgcaggtatcagcttatggcgggtgctgaggcctcaggctgtattcagctccgagatgttctggatgcgcgctaggtgggaatccaggttttctttgcacctttccaggtcctgcaagtatgggtgagacatggcactgtaggcagatattcttttggctgggttaaatgtcaaacacttcagaagtaggtctttgcctagttcatcgatatctgttacaaacttctcaattggttgggcagattttgaatgaaaagcctgcctgggaagggcaacatct

SEQ ID NO: 679607 - DNA, 309 bp, Homo sapiens
  misc_feature (118)..(118): n is a, c, g, or t
cgacgatattctaacaaaagacatggaactatactatattcgggcatgactggagacagcacagtctagctcttattcgagcgagctgggcaacaagcaactttagtagacaatcacnagttatcggccacagccatgcattgtataatcttcttcatagtaataccatcataatcggaggcttggaactgaccagttcccctaataatcggtgccccgatatggcgtttccccgcataaacaacataagcttctgactcttacccccctctctcctactcctgctcgcatctgctatagtggaggccg

SEQ ID NO: 679608 - DNA, 371 bp, Homo sapiens
aaatcaaaggatcatttgaggctactatgagcaactatatgccaataaaaggaaaattcaagaagaaatggatcacttgctagatacatatgacctaccagattgaaccaggaagaaatccaaaacctgaacagaccagtaacaaataatgagaacaaagccataataaaatgtctcccagccaacaaaccaacaaaaaaaaggcttgggtcccaatgactttactgctgagttttaccagacatttaatgaagaactaataccaatcctactcaaactcttctgaaaaatagaggaataaagaatatttctgcaactcattctatgaggccattaattttctgatattgaaaccagacaaggatacagca

SEQ ID NO: 679609 - DNA, 136 bp, Homo sapiens
agtgtttctcctgataaacagcctgagtcccgacgacacggctgtttattattgcgcgagggggccttttacgactgatctctacgggcgctactttgacacttggggccagggaatcctggtcaccgtctcctca

SEQ ID NO: 679610 - DNA, 926 bp, Homo sapiens
  misc_feature (291)..(291): n is a, c, g, or t
taaacatcaataacgaatgatatgacatattaatattaaatacaataaacataaaaatgccgtctcttatcactatctaaataacccactatcgcaaattgttgaaatcggctctcattggccgctcttacaacttgcggcgcattttccccttcctttgtccccctctcgctgtaccctctctgtcgcccttggcccaatgttgtggtttccgcacctctgttctctggccaacacccaagcactctttcgggtatacccaactagagtgtgctaaatcctctaggttgnccattctgaccaccgaaaatgcttataaacagagcttctcaaaaacccagtgggaacccctatatatttcgacaacccccttatagtttcaacagtttaccccccctctctactaaaattctgcaaccaactgcatccaaagtagacctctttctaccccattctccctagacgccccaacacattgtggaagcagggctattctctctcaaaaaacaaatgggttatgcctagcccctacgctatcaattcacggtcttcttatctcattatgagacaacacaacccctcttggcccgaggatccggtacacctaccccggcatacccgacttaacctcttcggaaaagtcctaagaggtagggattactagaaaggactcaacgcgcgggcgatacagaggcaagacaacccactgtgccccaccgggaaaacacctaatgacactatgagtgcgggtgggaagacacaacattagcccctatctactccctcacagagggcatgaaagtaggggggagaaaatatcccggaacccaggggagaggtaggccgcgccacctgggagtcacggcacgattgaataccttgatccgcttttcaggacaaaggtcgaaacccttttccacaaaaca

SEQ ID NO: 679611 - DNA, 108 bp, Homo sapiens
gtgatatatatccttcacacggtgttgatataatccctcacacgggtgtggatataatccgtcacacggttgtgatataatccctcacactggttgtgatataatccc

SEQ ID NO: 679612 - DNA, 459 bp, Homo sapiens
atagggtactgcattgtagtctccatatctgtattacttttctgtaatatttaagagttgcttaaaagcatacaaaatgtactgttactaaaacagctaattatttctctctccccctttgacaggaaggggcttcagttgttcctccatgctacaaaccataattaacaatgtaaccgtacttagtaacataaagtattgcgatatgttagtaacaatcttgcagccttcctttccaaagttcattttattttgatcagctcagtatagtgcagtaattatattaggtatcttcactatatgataggtaccatgtgtcacagatgatttaatctatttaagtgttgggctgctaggagcacttgtacatttatgataatgcagaattaggagagcggttccccagaggttagttttataatcaggtgctcaggttggaataaagtggtattgagaaca

SEQ ID NO: 679613 - DNA, 399 bp, Homo sapiens
tcaccttaagggaggatttaattggcccccaactgattgtcacttaaatgaaaattaaaaaatgaataaaaagacttacttctcagctgcaaatatttatggagaatgggggccaccccacaggatatgaaagagagaaagcagctccctaaacttcaaaccctatttgggtccctagacacacaagagctattttagagtatttaatttcattaaatgtaatattagttattgctgcaaatagctaaatttattattacattggatttgatggtcaagagtatttcccatttttttaacagactgtccagtgtttgtcaagctttctggcataattatgtactcaaaaggtatcccgctaacaattggtataaacacaaaatgcttttcccatacagc

SEQ ID NO: 679614 - DNA, 149 bp, Homo sapiens
taaattcgcggccgcgtcgacgtcccaatgtgtccctatgggtcccaatgtgtccccccatgtgtcccaatgtgtccctatgtgtcccaatgtgtccctatgtgttcctatgtgtccctatgcttccctgtgtccccgtcgggtcgacg

SEQ ID NO: 679615 - DNA, 137 bp, Homo sapiens
tgagctggtccagttatagagttctgatgttcccgatggaggcttccgctcctttcgccgggctggtcactggaacacgaagtgctcttctacctgctcgccgcattggtcgtgcctttctttggaacagccggcct

SEQ ID NO: 679616 - DNA, 125 bp, Homo sapiens
cccatttagaataaaatgatacagccgaagtggccaagatgtttccataacttattctccttgctgactaaatcgcaaccctgaagtctgtgcctccgtagggcaaggacaggacgacaggtaca

SEQ ID NO: 679617 - DNA, 304 bp, Homo sapiens
gcgtcgaccttgcaatataaggtttacagccaggatacaaaacattacagtcctcaccgttatcatctttgaaccctttgagaacattctttatgtgtccattatttttaacagatatggaaccactgttcttattcatggcttcctctttatttcactgataatggatacctcatttctgtatgttctcattcaacaatagtcaaatacttatggccttaggaaactatagtgctgctgagacaaaagtggtccaccctagatgctcatcacttctgctttcaaatcattgacccgtcgacgc

SEQ ID NO: 679618 - DNA, 711 bp, Homo sapiens
gcaaggactaaccgctataacttctgcataagtgaatcgactagaaataacttggcaaggagagccaaagctaagagcccgcgaaaaccagacgagctacctaagaacagctaaaagagcacagccggctatgtagcaacaatagtgggaagatttcatagtgtagaggcgacaaaggctaccgagtcctggtgatagctggttgtccaagatagaatctgagtgtcaacttttgaattggcccacagcaacccctctaaatcgcccttggtgaaattgaactgtagagtccaaaggaggaacaggctgctttggagcactgaggcaaaaaaatgcttggtaccagcagcagtatcaatacatgtagagcatccataggtagggcctcagaatagcgatggcgaccgaattacagaaagcgtacaagctcagcagccactacctaaaaaagtcgctgaacatatatacttgaactctctcacacccaaatatggaccggatgctatcagcctatagaagaagcaaatgtatagtataagtaagatgaaaacatgctcctccgcataagcctgggtcagatgaaaagcacgtgaactgacaatttaccagccccaaagtatctacaatcaatcaatcaagtcattatgaccctcactgtcaacccaacacaggcaatgctcataagggccggtgcggacaccgaacgaccga

SEQ ID NO: 679619 - DNA, 216 bp, Homo sapiens
ctgtctgctgatctagaggatccctcctacgagcgctaacagagtgagactcggtctcacaaaaaaaaaaaaaaaaaaaacaaaaatttctcaaacatctttccccgggattattttctattttttcaagatttctctgtggggaaaaaaatggggttcccgtgggttttcccaacccaatgggcccctggcacccccttttccccggggcccctt

SEQ ID NO: 679620 - DNA, 298 bp, Homo sapiens
tctagaggatctcattggagaatgtgccatcgcaagaagaagatgtagttcacttgtgtgactgtaaacttgattagagaaaaaaaacaaaaaactgtttattgtggcacagagacatacttatcattacactgtgaacatgactcagacgcatacagggaagaatagcagcgactctagatgttcttaacagttgatactatttctaacacaatcattacacttttgccacatactcagcaaaatttccagcaagtgtacaacaagcaggccctatgttattagcacattgcttcca

SEQ ID NO: 679621 - DNA, 313 bp, Homo sapiens
  misc_feature (59)..(59): n is a, c, g, or t
  misc_feature (76)..(76): n is a, c, g, or t
  misc_feature (116)..(116): n is a, c, g, or t
  misc_feature (285)..(285): n is a, c, g, or t
cgcgccggacgggcggccaggcttgcgcgcggttcccctcccggtggcggattcctggnaagatgaagtgggtgtnggcgctcttgctgttggcggcctgggcagcggcgcggaanactgccgaggtgagcagcttccgagtcaaggagaacttcgacaaggctcgcttctctgggacctggtacgccatggccaagaaggaccccgaggcctctttctgcaggacaacatcgtcgcggagttctccgtggacgagaccggccagatgagcgccacagccaaggncgagtccgtcttttgaataacttgggac

SEQ ID NO: 679622 - DNA, 220 bp, Homo sapiens
cctcagcttcccggggcgctgggattgcaggtgtgagccactgcgcctggccctgctttcttatttttaactttatatttttcaaaagctggcatgcagggccgggtgcacttgtcacgcctgtgaccccagtgctttgggagaccagggcaggtggatcacttgaggccgggagttcaagaccagcctggcagcatggcgaaaccccatctctatttaa

SEQ ID NO: 679623 - DNA, 687 bp, Homo sapiens
ggagagaactagtctcgagtttttattttttttccccttgggttccacctttgcctctacccgcccggttgggttaaacaaagccaagggaaaaaaaggaaaaaaaaaagaaaacaaaaccagccgttctaagcccggtgatggctcccagtgtcaaaattttcagcaaagggtgtgaaaagatcttcgtgcgtgaccctcttccatcttctgtgcgtgaggcagtgtgcctccctgttaatccggtgggcacagcccaccttctcctgtggtgctccccgcgcgtgtgcacaaagtctctctctatatcacagccggggagacgcccactgtgttccctcaggcgctccagttcctcctgggggggccccaggttccgggaccaataagcaacagattatatggagtgctcgggtgtgggaaatggagggcccagaacttcgtgtcttcggccattgaatttgggtgacttgcccagggaacctcctcaggatgggggtgtggcccatactccaggaatataccacgtgcaagagtttatggggccctcgaataagtcaacgagggtggagtgggtttgtggcacacgttaggacatttcccctaagggtctgacacgaaggtgtctccagagatagggctgtgaacctccggaagtccttttcattggggggaacacaaaaccaa

SEQ ID NO: 679624 - DNA, 358 bp, Homo sapiens
ccggaaatgtagatactgtgtgtgtgtagagagcttctcagactatccaccttattgggtcgctttgcagttcgtgatatgagacagacagttgcggtgggtgtctatccaagcagtggacaagaaggctgcaggagctggcatggtcaccaagtctgtccagaaagctcagaaggctaacataatattatccctgattacctgccagcccactcttaatcagtggtgaaatgaacggtctcagtaactgtgagtttcatattggccatctacgtttaacgtagtaaaagactggttaatgacttacaatgcatcgtaaaaccttcagaaggagaggagaatgtcttgtggaccactt

SEQ ID NO: 679625 - DNA, 209 bp, Homo sapiens
tagacaagccaggagaaaagcagtgtggaagatgtcagtgttaacccaacgggatggagggcaccgtccctagggctggactgctctgtctagagcatctggagatcatttacctatcctcgaggcatctttcaatagacctcttttatacttgcacttcatattgaactgcagttacatgctaccattgacaaataaacaccatattt

SEQ ID NO: 679626 - DNA, 593 bp, Homo sapiens
tgtaacaaatggggtcttgctatgttgcctgggcgggtattgaactccgggcctcaagcaaatcaatcctctgtgcatcagcttcccagagggctgggataacaggccgggccacccacacccaaacagaggttcaaagacgcttgggagaaaccagcctcgtcctccagtctcttggtggtggtttggagactgagtctggctctgttgcccaggctggagtgcagtggcatgatctcgggtcactgcaacctctgcctctcgggttcaaacaattctggtgcctcagcctcctgagtagctgggattcacgggtgcttgccaccttgcctggctaattcggtggttttagtacacgatggggtcttcatcactttgggccaggctggtctcaaactcctgacctcaagtgatccaccttgcctacggctcccaaaatgctaggattcacaggcgtgagccattgcacctggcctgtcctacagtcttatttcacaacaggttgtgccaagctaggagcttaatcttgtaaaatacttgaggcagggataggttcgtccgtcaaggcttgggcttcatggcgagcagaagtc

SEQ ID NO: 679627 - DNA, 833 bp, Homo sapiens
atcaaaagggacaagcatcaagcacgcagcaatgcagcttaaaaaaaaaaaaaaaaaaaaaaaaaaaaaaatttgtgggcggcccgggcccctcgaaaagcgttttcaaaaccacccggtggggcgccgggggcccaggaagggaaagggagaaacggggccaaagccggggcccaagggaaacccggggccaaggacaaggggggggagtttctcacaaatataaaaaagcgccgcgcggggccacagcggagggttcttgtgaacaaatactccgaagaggggagttccggagggacccatataggggaatatctatataaaacagagggagtctccagcagggaagaccgcgaattctcaaattataccgccccgggcctggggaggaataaaaaaaaaaagagagaaaaacgagaagaaagaaaacaaaagaaaacagaaacagaagaaaaaaacaaaacagaaaaacaaaaaacaaaggaacaaaagaaaccgaacaaaagaaaagaaagacaaaaaacaagacgcacaaaaaaagaggaaggagggagagaaacggagagggagaaaagagagaaaaaacaaagggaaggacagaagagagagagggaaaggaagaaagaagagaggagaagaaaagaagaagaaaagacaaggaggagaaaagaagagagaggacaagaagagacaagaaagaacaagaagcgagaaagaaaaaaaaagggaagaaagaaagaagaaagaaagaaaaaggaaaagagaagaaaaaagagaaaaagaaaaacgccacagaaaaaaagaaagaaggaagaaaaagaaaagaagaagag

SEQ ID NO: 679628 - DNA, 424 bp, Homo sapiens
gaccatctacctttcctgatgctcagttccctcatctgttaaacgggaacaacagagtcaacctgtatgtggcgtgttctgagacggtggttctcatgtgtggtagctggggcagcaccagaagcagtggcggcctcagaatcacctgggaacttgtcagcacacatgcaaattctcgggcttccacctcagcactcctgcaatccaggacatctgggcaatgcataggcaaactcattttccatgcagccctgtaggtgcattctgcatgcttgttcccagtttgcgcagtcactgactcatggattaaggtgcagtgcagtgcacatgtgacagcaaccaagtgctcactgctcttggtttccttcattacaacaagcagggcagggcagttgcactggggtcactctcagcattgctctct

SEQ ID NO: 679629 - DNA, 617 bp, Homo sapiens
cgtgcagctttgtgtgttgcctgtgccgtaggctggcgcagccggtacagccggtgcggcggcagaacgtttgcccaacagattcgccagtgccttcatcgaacatctccgatgccagagcatgtgctgcagggacacgagacgccaacaggaatgagggcattttggcgctcattccttgctggtcacgcgcaggatgccggagaggaaggcagcactccatgcgacagaggatggattgggctgtggctgagcggggaacgcggattggatgcgctgatccaaatcatatcgacgcaccaacttgcagaacgggcactccgcattgctcaatgggagatcaccgatcacgctgatgtgatggctgccgcatactgggcaactggccagcgccaactgtggctgctcgatcacccagataccttcaatgtggccggccagatcaaaggcgcggtcgaagttgagccggtaatttgcgccgcatatcgagatatagcgacggtagccaccgatcagtgagtgcgctggctcgaactgcaggaaacggtggcggcgatagcttgccgcaaacaggacgcatcgatccggtccaaaagattgctctgtagtccactcgg

SEQ ID NO: 679630 - DNA, 1187 bp, Homo sapiens
  misc_feature (38)..(38): n is a, c, g, or t
  misc_feature (1184)..(1184): n is a, c, g, or t
agtccggcagacgtcatgatcggttgccgatttcctgnccactgacccctgatcgcacgagacttcgaccagtgatcccagtctacgtgtgcggtgatacaggacaagaacacgaagcgcgatcatggagacacgtgtgcataatggagcttgccccaattgtgtcaaggtgagagcgcgcagacccgcgtgttcgacatccgacgactctatacgagcgctacagttatgaccacgttcctctagaatgccgctctgttgctgtgttcgctattgactcaatgcataggttacccttgatgcgatcctgcgaaggaactgggtcaatgcgtttcgaacgctggcagttgtagatgagctcgtcaggagcaaaggcagtcgctcaaggcgaggaccccgtgggatggcgacttacagactctgagttcaggtttcactgttcactggcggttgcacttgatggacataggttcatgacgcttactgtggatccgaaacgcaaatactgctgcaaaacgttcacgttggttcacctggaacaccaaagtactggggacttatggcacaagctgtgcagcaacctgatggactggggcgcctctagaggtaatacaacgcgaagggttggccagtgcgtaaaacggggcctacacaaaggtagcagatgtgctggaattccattacacacaacggggcacaacatgctggactttacctaacttcgatccctcgtgggcttccctttcctgggattccccgtgcattaccgggacccaaccccagagatcaaccgaggcaacgccgtcctctcgggcaaggtggtgaccggattggggcccagagaagcccacaaacgataccagggagacgcggttgaaactcccgcaacaaaaagcaagcggaaagcggaaccgagaacaacggtgttgcaacgcggggcgcgcctgtgaacgcgacggacagacgaaaagtagcgtcccaagaaagggccaccactgtgctcaccaacaacgcacgctgttcctctcacacaaaccaaggagagaagcggggaggcaaagacagaacctctcgctacacaatgaaggacaacgcaaaacgtctaagtgagaccgatgaacaacatgatcggtggtgatgtcgattgatatggatgctggagagtgaggatcggggggagagantgt

SEQ ID NO: 679631 - DNA, 247 bp, Homo sapiens
cgcaagtgatgatgagataatccatattctgtgcttcataccaaaggaacagatgtcccacattttcacacagtttatggcagtttcagacgttatgaaccgtcataaagataaatgggtactgtcaaaccaagaggatcatcgttcactgtagattgcctttttaaccttctgccgcctttctgggctctttactacctgtttttttttgtttgggtcctctctctttttgtcttgttttcccttg

SEQ ID NO: 679632 - DNA, 384 bp, Homo sapiens
aggccgatcttaaaatggccgattttgcccgttgaaggcatcctgggaaaaaaaacaagcatcccagcgggcatctccccccgacttttcctggagtccccccccggtccctgacaactccagtcagttttaggaactaaagggccggatcatcagacttaccctgtcctgcccccccttccctgctaacatcaaggggtgggcagttaccttttgagcttggaacaaacagactggaattttcctctgccccctcttggggataaaatcttgtttataaaatttcaaaaggaagtaaatcccctagggaaaacccttaattttaaatttggttcatgtggggcaaagtttttagcttttaaaaggataaaataaatttttcca

SEQ ID NO: 679633 - DNA, 822 bp, Homo sapiens
  misc_feature (113)..(113): n is a, c, g, or t
ccttcgtcctctcggccgcccgcgtgatttttttcaggtttccctccccgctctccgctcagccttgtcacagtaactatttgcgtcgaagtgtcccctcctccttccacggngtttctcttaaccacacgtcgttcattgaccaacgtcttccctgcccctcataataatgtagttgtcaatacacaaatcaggttcctttatatagacagagagaatgtaacgcaggcgccctttcttttacagaatacaataaaacggtcgcacctttttaatctccgggtaacacacatttccacctctttcctcgcaccacataattcgcccccctgtttttaccgcctggtccccccctataataatgcgcgtgtcgcactaagcttctgcaccagaatacctagaagggcgagaagatcgctcacagcttgaagtatatacatgtcctccttcgaggagaatttcctatacaacgcctcgactaccaccattgtatgatagacccccagatatagtgcgcgagacaatctgcgtgttcgtgaacaccacaaagagactgttgtcacccctatttgtaccgcctcgtattgctactaccagtcatgtcctcccacggagttcccacaagaaaataatatcttcctttcacgacgtcgtatgcaaccctatttttctcggcgaatcacccaaattctttcacccccgtctactaccgcccccgccaacaccctatttattaacgagtttataaatagctctctcaacaagatgcttttcccttccaacatcccttcggtaccgtaaatacaaaccccacacaaaaca

SEQ ID NO: 679634 - DNA, 901 bp, Homo sapiens
cacttcctcccattctgctgggcaagctaggcagcgacccccagaagaaaaccgtgtgcatttacgggcacctggacgtgcagcctgcggccctggaggacgggtgggacagcgagcccttcaccttggtggagcgggaaggcaagctgtatgggagaggctccacggacgataaggggccagtggccgggtggatgaatgccctggaagcctatcagaagactggtcaggagatcccagtcaacctgcggttctgcctggaaggcatggaggagtctggctccgaaggcctggatgagctcattttgcccagaaagacaagttcttcaaagatgtggactatgtgtgcatttcagacaattactggctggggaagaataagccgtgtatcacgtacggcctcagaggcatctgttacttcttcatcgaggtggaatgcagtgacaaagacctccattctggggtatatggaggctcagtgcacgaggccatgacggatctcatttcactgatgggctgcctggtagacaagaaggggaagatcctcatcccgggcatcaaccgatgccgtgcgcctgtgacggatgaggagcatgcgctctacgaccacatgacttcgatatggaagagttcgccaaggacgtggcgggctgagaacccttctgacagctgcaagaaaagacattcctgatgcacagattggggataccgtcctctacctgcatggagatccgaaggcgcttcttcggtcaggggcgcagactgtgatccccagaaaggggtcggcagttctcatcaggtcgtgccagacatgatacggagtggtacgaaacagtcagtactgcaacattgcgtagtgaggcccaaagtccgggttcggcccgggcagccgggttgctac

SEQ ID NO: 679635 - DNA, 1254 bp, Homo sapiens
tggaggtggagtcttgctctgtcccccaaacgggattgcaggggcccagtctcagcctcacttgcatctccttgcattctctcccaggtttcaagttgatttcctcctgtgccatcagccctcccaagtgagctgagacttacagggcacgcaccacacacactgtggcttaattttccatatttttggcgtagagatgaagattccactcctgtgtgttgacacccaggcgtggtctctctcgaaacctcgctgtgaacctctcaaagagtgaatttccacctgtgccttcgagccctacccaaaaggtgccgtgggacatttattgcaggcgtgtgaaggcccacccgtgtgccccaaaatctctcccctgtgtgtgtcccccccacttacctgtgggtgtcctatggcttctgtgggagcctcctttgtgggaccaaacaagttatcttacaaaacagacgtcttttaagttgacaaacaagagctcttcgtcgacaaaccattcagtggcgcgccacgaaaaacacaccgcatcccccgttggagaagagtcaaattgtccacaggggccgcccctcacccacgctgaagcccaaccgtagcgcccccgacctcctcacatacaaagcatcctttcaacactcatagcagacacaaccaccacacgatattgcccaaaccaccaatatcacagccggcggctattaaaaacagtcgcagatacaacagcacaatcacacgacactcgccgctataccagcgcgcctactaagcggcggcgcccacacccacaccgccaacaaaacccgcccgccacacagcctgcccgcacaaccaacacaagcggcctacccagccgagcaagcatgcagacaaacgcccgccgccagagcacaccaccaccacccaccaacccccacaccgctgccctaccccgagcacgcgacgcggcccacccccaccacacgatccccccccgcccatcccaccacccgctcaccgaacgacacgcgccacgcaggcacaacaacaacgcacatctccagacgcgacaacaccacactaccgagtagcaacaccccccacgcggcgcacaagcgaagcggccatctcctcgcaccgaaaccgcgggccatcacacacaaccggcgcgcgcgagccaaagggcccccagccggtcccagccccaccaccccaccacccaccgccgggcgtcgacccaccttacgtgacccatcatagccaacaccg

SEQ ID NO: 679636 - DNA, 141 bp, Homo sapiens
tggtgtgtataattctgaatattgggggaggttatatgggttaaatagtttttttaatttatttagggggaattgattggttgtctttggatatactacagcgatggctattgaggagtacctgaggcatgggggtcaggg

SEQ ID NO: 679637 - DNA, 189 bp, Homo sapiens
ctagaggatccccctagggatccttataaaatactctattacttttcactttgcgcaatgtaatcttgcatgtatcgcccacggctgtgatctcaaaactcctgagctcaagcaatccttcagacctcaggctgtccctgaagacacctggcgagttataagacatcagccactcacaccgtagaccaa

SEQ ID NO: 679638 - DNA, 275 bp, Homo sapiens
gcttagcagccagttgaaagtacaaaattatttcatcccaagcaagtttctctccaagaaaaaaaattaggcaaaattcagtactctaattttagatattgctgaacaaaaattaaaacgtaacaaacataatttctaagactatgttgacttgactttaagcactcccactgataccagttcacgtaagtaaattacataatgactactttgtcactatattaaaagcctgttctctaaatgacccaattagaccatcccatatataatagaca

SEQ ID NO: 679639 - DNA, 205 bp, Homo sapiens
gcccactccaccttactagcagaacaaccttagcccaaaccatttacccaagtaaaggtttaggcgataccaagttgcaagcctggccgccagtagatgtaggtagccgccaagggaaaagatgcaaaatgttataacccatggcaataattatagccaaggacctgaacccctataaccgtctacataagtgacatgcactaga

SEQ ID NO: 679640 - DNA, 107 bp, Homo sapiens
catataattcagatcttactctcctgtagtgcagcgtttcctagcgtctgacacacacagcgtcagtgatgcgccacttcaggtatgagcctttggctgcaccctca

SEQ ID NO: 679641 - DNA, 953 bp, Homo sapiens
  misc_feature (589)..(589): n is a, c, g, or t
ctgcggatattgcttggtccatgcgcattcaggagaggctttagcgtgcttctgacagtctggtgttgctgtatcgtggccgctgtgggttccgtgtcgatcgtagcttgctcagagaacatctccgataagcattcgcactctcgggatgtaataccgagtattgagttcggaaagttccatgcagtttggtacacgagaaattgcggggagaagaacttgctcatggtcgatacgtttcctcgtgacagttcacagcaatgccattctaggcttgccgatgtttagttacatggaagtcttagacacgtgtctcgattagtcgaagttaccatcttgtgggatgagtacaaatggggaggctggcaagaataacgtaactgctgtaggttgactcctgaccttggggtacgaaagatgctcgagtgcagccacgatatgtcaatgcacgacgttagcgtagcgccacgacgcgtgggtcgcccacgtacggtggcctagccccgcctacctttgctgtcctcgtgtcacctttcttgcccctgtggacgagtactacccttggtatgaagacgccgtcatccatgtnctcctggtgacaagacattgcggttccaaaaattgctctttctaagacattactccgaagtagaatgatcctgaagttatagttttcattgcatgaggtgttttgagaggatgggtaaaaggggacattaaaggtatgttgagagctgaaagtgttagggggatagtatgtatggcatagttgtttacctttaatcgttatgtgacttcgaaatgactaagtaatttatgcaagaagaaaaaactttttttctttcaactgggattagtaggctttcttagaaataaaggctccatgtcttgtttggggcccattatcgaattgcgccagggaacatataggggtggggaagggaaggttggac

SEQ ID NO: 679642 - DNA, 292 bp, Homo sapiens
acagttagattatattgagcgtgctgagttgtgaaggagagctaaatcctcccacagaaagagactctttcatattctctgccatgacagcaacattgtgctgaacttgaatgcagcctcctgctggtgacctgggctttctaggagcaaagctagaaggtgtggacaccactcccaggcagctggggcaggaggatggcactggggaggaggatggcgctcgggaggaggatggagatggtgaggcggatggcaatggtgagacatggagatggggaggaggatggcaatg

SEQ ID NO: 679643 - DNA, 215 bp, Homo sapiens
ggcgacgcgaatcactagtgattacagagccacaagcagagatcctgcatgatggatgccaccacatatgccagctgtcaaaggcatcatatatcagtatatggaagagataaatcatagaatacccgcctcagacccaacttctagcaaaacaaggcagatcatctccaccatccggaggctgaaactatccaactatcagctgatatcccgaa

SEQ ID NO: 679644 - DNA, 342 bp, Homo sapiens
atcgccgggattacaggcatgagccactgcgcctggccagaaaacagaatcttaatacatagatagtgccacctggactctggactcccctcaacccatccaactctacactgcctctcatgggcacacattttgcctgctacaatgttcttcctaaaataagatgtgccttcagtcattcttgatttctctcaataaccttatttcagatctgtccacgaattgattgaaaatgcaactctctctatggatgctacctttggaaaataataaggggagtacttttattacctactatctaaaccttttatattaaatttatctttcagccaccgtgaaaaa

SEQ ID NO: 679645 - DNA, 326 bp, Homo sapiens
  misc_feature (156)..(156): n is a, c, g, or t
  misc_feature (233)..(233): n is a, c, g, or t
  misc_feature (236)..(236): n is a, c, g, or t
  misc_feature (253)..(253): n is a, c, g, or t
  misc_feature (305)..(305): n is a, c, g, or t
gtctttagggactggggtgggctcaggaagctgtattatttcaaaggacgcagtgtttccacagctcagcccagagctgctggagttcacacggcccaccagaacttgcttctttcaaaatcacccccccagagggggccaggagggggggggggncccaaaataattaaatatatatattcccctttttaaggggcaccgcccaccaccccccccaaactttttaaaatttngtnaaatcccccccgtgtgnaaacacctgtaattacatctttaaaacagcgcccaaccacccaacacaaacnctgggaaatctgtgcctttaa

SEQ ID NO: 679646 - DNA, 1280 bp, Homo sapiens
gatacgaggtagaccaggcagggaagtcgattagacaagcgataccgggtgggttaccgtggtggctctgtgcggggggcggggtcttcgttccgagggggccgaggacggtggccgagcggttctctagaggaggaaggggatcgatgcgctatgcgtgggtgaaccagtgattcgagatcctaggcagatggtgggctagcaggagggcatcctagagcattgactatagtcagcctggagtcacgagtgtgctggtgtacagtgaaccggtatgctcgtgcgcgtggtcctagcaagcagaccagttagtgagcagtgactgggttgatagggggcctcgaggcgaggtagctcgggaggcaacgcggtggccctgtagagtcatgccgattgatccttcctggcggatctacttgatcgccgagggaggggacttacatactggtgaacgagcgagcgtggagggcaagccggcattgcctcatggaggacttgtgcccgctgctaagatgctatgggggacagagtggccatgtgggcggcgtgagcccgtgttctccgtggcgggtgaccttagggccgtgtctaggtgagtccttgcttcatcccagtgagcgtatgtgagcccatggcggggcgcgcgttgcgggtgctgtgtgagggtgcagggtcatgtgcgctccgcgggagcgccggggtcccaccgctctgggagctctgctggcgtgtactctgtaccctttgtgtacttcttcctggaatggcgcttcggggcagttgaggtagcggggggtcgaggggaccttgagtgtatacgtgggagcaaagggctgctgggtgcgcctggccgcttaacgggggcggaccagaactaggccgaaaacggatggtgggagggctggtggacagattcggaatcgaggaacaggggccagtggggaccccgagataagagaacacaggggagccaaaaagaacgaaactaaaaaagaaagagcatggtcagatgtataaaaaaaaaaataaaaaagagaaaaaaggggggaggggtaagaaaacaatgagaagtaagggacggaacaatatggagatagcacagaatgttggagaaaaggcagagatggatgataagttttaaagtaaaaagagggggaagcaataaaggagtagataaaaaatatgggtgatgataagagccggtgttggatgaataccaggagaagaagggagaggaataaaaaggatatgaaggacgggcaggtaaaacgtatgaaaca

SEQ ID NO: 679647 - DNA, 1246 bp, Homo sapiens
  misc_feature (259)..(259): n is a, c, g, or t
ggttctgtgcccaggcgacaaattacattgttgtggtcttgctctccccacccttgtagtaatactccgtctcgtggcggttctgctttcgatcgtggaagtgacgagtttttcttatcacggcgcgtcctggcgacgggggttctttgcgccgccagttgtgttgtgttgccgccattttctcggcggggcgcttcttctgtgttggggggccggggatagtctatgttccgccggggtgcaattagggttttgtacncgccccattgttgttgtccgtttcgttgctttgtgcgggatacgccccctgcattgcgttgtttttcgtctttgcagtgtgtccctctctttttctatccacgggccgttatttaaagggcgctgttgtgtggtctatatgcccctcatcgagtaccgcgtggttatcagccacactctgaatggccgtctggttccgcttgtatagacgtgttctcacagccccctgtttgttaattgcccccacgtcatacaaggtttgataagaaatttcccctgggtgcctcccacatgtggtgtcgccaatcataccaacaccgtgcttttttcataagagagtgccggttccacactggatggttgtttgcgttctatacaaggaggaattatactcgtgttacacttgacataccgtgcgtagagatgcagtgtgtgcgcacatttgcgggtgtgggagacacgacactgctatcttttctaagagcacaccttttaaactttcgtgcattataacgatggttaacatgctctctaagccttttctagatggggaaacgaaccccattgtgttctccccctgggatttacaataggggggcgtggacattgtgcgagtagcggccttatttagggaccccacaactgggggcccagtttgtttctgggggcgccctcccctctgtcctcgacgacggggaggcgcctcggtgtgcttataacctgggcacggtgcgtgtctcctcctgagccccacgtggctgcggtgaggggaaccacccctctccctggctgcaccacgtggcccttagctcccgtcaccccgtgccaacccacgggtcccacagctgggctgggtccttttttgccccccaggcccttccccatggggtgtgttggagtgagcacctcctctgtaggcacctttcaccctgtttgtttggtactgattttttttgataaaaagataataaacccggtactttttata

SEQ ID NO: 679648 - DNA, 217 bp, Homo sapiens
aaaaaaaaaaaaaaaaattttcccgttccccccgggccgggggggggggggggggggggtattttttccctttccccccggggcccatgggttaaaaaaaagtattggggttgttttttttttttccctgtttcttttttttccctttttttctttgttttgggggggaatttgccccccccccccccccgcttttttttttgatttttaaaaccca

SEQ ID NO: 679649 - DNA, 109 bp, Homo sapiens
  misc_feature (58)..(58): n is a, c, g, or t
  misc_feature (103)..(103): n is a, c, g, or t
  misc_feature (105)..(105): n is a, c, g, or t
ggtagccctcatcaaactggacgtccaccacttctaaatgccctggaagtacaagganagggtagaccagactggtttggggaggtggcccagcatttgggtnanagaa

SEQ ID NO: 679650 - DNA, 225 bp, Homo sapiens
tgatggcgctgatgacacccactcccacggtacgcggctcggtcatgctcgcttcgataccgcctatcccccggttggtttgcatataggtaggggtgccgttcgtcgaacacgtttttcacgtaggtgtacacctgcacctggtcgctgaagcggtagctcatgcgcgcgtcggccacggtgtagccgtcgatggcatagcttttggtgtcatcagcgccatca

SEQ ID NO: 679651 - DNA, 353 bp, Homo sapiens
  misc_feature (75)..(75): n is a, c, g, or t
  misc_feature (288)..(288): n is a, c, g, or t
gaagatgatgaactaaatgttgaagacaagtttgagatctgtaaaatgtgattttttacttctgcttataatacncatgattggggaggattgtggaaatttaattatgatgaaaaacctctatcttttttgtaatgttggcatacttggggaatttagtggaaaatacattccccagcaggccttttgttggttgcactaactgcaaggttgctgggaagtagagtctgtttggtcgatgagctttgactgccattttggaaccttacctctcctccttagcccagnatgctatctcaggtcctattcttgttctccagctctcagtccaaataaagttatttctcctggtt

SEQ ID NO: 679652 - DNA, 204 bp, Homo sapiens
  misc_feature (12)..(12): n is a, c, g, or t
caagcagttaancagactcaccaagccacagacttgtcttccacaatgcacgttcttaccttagccacgaagtgcccaagccacacgttactaaagggttgaactcaaagatatgtaccggggtataaaacaacttcccagggggacacagttaacttcaatacaagggtcaacaatgagcaaccaagttctcacaactccagt

SEQ ID NO: 679653 - DNA, 116 bp, Homo sapiens
cggatctgtagattatgtgcattattattttttttatatttgcaaaggaaacatatctaatccttcctatagaaagaacagtattgctgtaatttcttttcttttcctcctcattt

SEQ ID NO: 679654 - DNA, 334 bp, Homo sapiens
  misc_feature (101)..(101): n is a, c, g, or t
  misc_feature (197)..(198): n is a, c, g, or t
  misc_feature (231)..(231): n is a, c, g, or t
aaaaaaaaaaaaagcccccccctattaagtgttttagacccaacccaagggggttgttccccccccaaaatacttttccttttccttagagaggcaaaaanaaaacctcgtctttttttgtagagtctggaccatttaaagccaatttgtattgcactggcccagatggcaaataagtgaaaatggtttaatacccnnatggatttttatttcctttttttgattcagctntataccccgggctgaaaaccctcaatttatgttcatgacagtggggatttttttaaatgtctacattctttctaataaactgttggaagacttaaaaaaaaaa

SEQ ID NO: 679655 - DNA, 1403 bp, Homo sapiens
  misc_feature (553)..(553): n is a, c, g, or t
tataaaaaaatctctctctcccccacaacccctctctctctctctcttttatctctctctctccccacaaaggggggcttcctcctctctctcacacacccctctctcctctcccacacaatatatccccgggtgggggggctgtggagaagaagtgttttctctttctgtcgtggggcgggtcttctcctcgggtcgtcctctctctctctcttctctctctctgtgtgtggagagagagagagagagagctcttcttctctctgtgtgtgagcgcgctctctgtgtgagagacctgtgtgtgcgcggcgcgcaccctctcttctctctcctctgtgtgcgtctctctcatcacacgcggcggacgactcgtgtgcgcgcgcgcacgcgcgtcgcgcgcgctctctcttactcgcgcggcgcggtgtggcgcgctgcttttctctctctctctctatttctctctctctctctctccccactgtgtgtgtcgtctctctctcacagagagagaacactcgcgcgagcagcgcgccgcgagagagagctctcntctttctcatctcgcgcgcgcgcagcacgcggcgctctcatagtagagagagagcgctatcaaaccaaaacaacaacacacgcggcgggggggggcgcgcgcgcacaacatctctctgtgtggttctctctatatatatctctctctcttctctctctatatatatatatatatgtgtgtgtctctctctgctgtgtgtgtgggcggggaagataaatcttctctctcccacgagaaatctctctcacaaacaaacaaaagagagcgggggggggggggcgcccctctcagagagagatctcctctcccgcgcgcgagaggggggcgcccccccaaatgtttctatgcgcgcggtggtctaccacccgcgagttcttttctgtggtctacaaccacaagacgagggggggccccccccaaaatgagtgggcgcagccccgcgcattatatataatacacccgcctcaagggcccagagcggtggggcgccccgccgccgttattttcaaccaccaacgcagcgccgcgacgcgctcacgctggggggggggacacaacacacccggtgtcggtcttccctgcgtggggacgagcacccacctcttgtcggggaggagagacaggagaggaccccccccccaccatcacccccgggcgggagggggggggggcgccgacacacacacacatgctgggcgggcgaccccaccaacctccctcccccgaccggcgagacacatacaaacgcgccgccgcctcccagcgggggcagaacacacacatcccaccatctggccgcggggcggcaccaacagcggtgggcaaacacccccacggggccataatcacg

SEQ ID NO: 679656 - DNA, 292 bp, Homo sapiens
  misc_feature (45)..(45): n is a, c, g, or t
  misc_feature (48)..(49): n is a, c, g, or t
gttcagcagatgatgcaagaaccagaggatgcagagaaccctagntannactcagagcagagtgtggtatatcctccaaatgaccataccagctctccaacaagagtttttaaccaggctgaactggctggaataacagaaatagaattcagaatatggataggaacaaagattatcaagattcaggaggatagcaaaacccaatccaggaaaaataaaaatcacaataaagcaatacaggagctgaagtacaaaatatctggtataaaaaagaacctaatggatctgacag

SEQ ID NO: 679657 - DNA, 136 bp, Homo sapiens
gtaccccatcagtggctgtgattacatctccaatacataaattagctagagcgccttgttccaggagtgacccgggaaatggcgagaggctgttcgaagtccttgcgcccacgagcgcaaccctgtgtgccccggg

SEQ ID NO: 679658 - DNA, 170 bp, Homo sapiens
gggatacaaggctggatgactcacatcgagcgggaagacgacaggccgggatccaaggggaacaagaaggaggtggtggaggctgggaccattgtaagagacaccacccatgatggttgggggcattgtggctacggggaaacccctcggggcggcggacttcaagactg

SEQ ID NO: 679659 - DNA, 107 bp, Homo sapiens
ctagtgtcggggctgcatgtgtgtctgtgtgacgagcgtcacttgagctaaatgtgtcaccgatacttcatatccttcgcacgccgatacttcctatccgtcgcacg

SEQ ID NO: 679660 - DNA, 257 bp, Homo sapiens
tcaaagtgcaatcacagtcagccgttcacacccttagttcaggtggccattagggccaggggtggcaatcagtaagctgactcctgcctaactctctttctccagccattctctataggctccagcgtagttgcgagcccctagtgtatccaagtactcgcgggccagactgcggtggccgtggcaggcccccgcttgcctcatctcgacagaaagaagaacgagcatgctcatgcttccaggctttggctctctca

SEQ ID NO: 679661 - DNA, 205 bp, Homo sapiens
gaaaagcctggctagtgtggaagcatagtgaaccccctgattaggttatggtttaatgttccaccaactattttttaaaaaaaacaagttttagaaatttggtttcaagtggacatgtgtgaaaacaatattgtatactcccatagtgagccatgattttttaaaaaaaaaaaataaatgttttgggggtgttttgttttttcca

SEQ ID NO: 679662 - DNA, 385 bp, Homo sapiens
cgcggtggcgggcacctgcaatcacagctacttgcgaggctgaggataaaaattgctcgaacctgggaggcggaggttgcagtgggccgagatcacaccaatccacgagaatccgtctcaaaaagaaagaaagaaagaaaaagaggtcacaatgcctactcttttaagtttttacaatgttgttcacaggcaagacatactcatgcaaccttcatccaagctcctggaacactgcttacgccttcatccatgcactggctagactctaccttataacatagttgtagctgtttgccctgctacctgtgagttccttccttcctacacatgcatgaaaaccagaaaccctccaatctaaaagaggaaacccaccaaccaaccaggt

SEQ ID NO: 679663 - DNA, 165 bp, Homo sapiens
ggggattttttttttgtttattccttaaagcccagacccctttccattaaaatttatttcaaatcccaagttgattacaattgagtgggacatcccatgttgtaaaaggaaaaaagggttcaaaaaggtttttttttcccccaaaaaagccctttatagtgttta

SEQ ID NO: 679664 - DNA, 644 bp, Homo sapiens
  misc_feature (94)..(94): n is a, c, g, or t
  misc_feature (129)..(129): n is a, c, g, or t
  misc_feature (156)..(156): n is a, c, g, or t
  misc_feature (299)..(299): n is a, c, g, or t
  misc_feature (318)..(318): n is a, c, g, or t
  misc_feature (367)..(367): n is a, c, g, or t
  misc_feature (370)..(370): n is a, c, g, or t
  misc_feature (373)..(373): n is a, c, g, or t
  misc_feature (385)..(385): n is a, c, g, or t
  misc_feature (388)..(388): n is a, c, g, or t
  misc_feature (402)..(402): n is a, c, g, or t
gaaggcttctccgcccattctgacccagggcctatgacggatatgcaagaacatacagacacatttacactataggccacggatagaggatatngggtctcagccctaggggaatgggaagcagctcangggaccctgggtgggagcataggaggngtctggacatgtggttactagtacaggttttgccctgattaaaaaatctcccaaagccccaaattcctgttagccaggtggaggcttttgatacgtgtatgagactatgcaaaagtccaagggctgagatttttcgtgtatanctgtgtgaacggtgtatgnccctaggatatgttaaatatatagctggccccttagttgcatgaccacntanaanatgtgtctatcngcntttgcctacgtganaacacaaatatgggagggtgagacactgtacactctgaatttggagtgtctagagtgcgcaacgagtgcgccacagagtgtgtgagactatctatcgtgggtctccacacctaatgtgctgtgtgagacccggggagataatgtgtgaacacgcctcgatgtgcggcgcctccagtataagagagccccctctgcgctagattttttgtggcgccaatgccccgggagttttttttttatcc

SEQ ID NO: 679665 - DNA, 1822 bp, Homo sapiens
gccacgctcccggagccactctccctcccacgccagacatcccccttccagccaccaaacccacgaccggcgccccctccaccgtacaactaggggcgctggcatacctagcccggcatcgcgctggggctcgggagaggggcagtgcagtgaagacgaggcgcactgcagcgggatctcatgacagatcacgcagcgggaggaacaaacatgcacggcgcacaaccgaaccacatgcggcacgcggctccacacagaacacagaaccagacatgacaagcacacgcgccggcatccactggagaccataacaccagaaacaacccaccaataccccactaaccacgacccccactcaagataaccccctcaagaaggctgcggccatcgtcataacagcgccagccgtatacaacgaaccccaagccactacacatggatagaacaccaacagagactggacacaccccaacagcatcgaggccaaaacacatcccatgacaagcccttgggcgagcccgaccacccagaccaccaggcacgcagacaaaacaccagaggaaagggaagccgaaaacactagacgcatgccgaccggggcagaggcacgacactggccgccgagccacgaatacaggaagaaccaacaacgaccagcaagacagcagaacacgaccacacagggaaaaccaccccgctacgaccgacacacgcggcccccaccctacgcaaaagagcagaaccaacagagcccgcataaataaccgcggggcaggcccagtcgcaccaactcccccctggctgaaacccagccactgagcgggagcggggacgcgaaatggactcaataaccaggagacacacacaagacggaccgcacacaaggggaaacaacttcacaagggtgtcgtacatgcgacccatggcacaggacacatgcaagccatacgacgagcaaatgaagaccatgagggcacctacacaagccaaatacaccacacaacaaaacactgaatcagtcgaagaagacccgcggacgaacccatcggagaagagagtgggacacaccaccaacaggcgtcctcaaggagccacaacacgcgaggagacaaacatactagggcagagcagcacattcaggacagaacaacgcacgacaggagccacatgagacaataacaacaccgagcgatgagaaatagaagcaaaggagaccagcataagacgacaacaacaagcaccaacaacaagcgcataaaaagaagaacaacaccagggggaacagacaaaaaacccccactacaaaggagaacagcgatcagcaccaggcggtcagaagggcacacgaaccaaatctacgaactcgggaacaaacaacgcctcggcatgaaacaaaagagcaacaagaggagcagaagacagcaaaccatgaagatgaccaagatgcaatcacacgcaggcgacgaagttgagaaaggcaagaacgaatacagagcatgatcaccgacatcatgtctggcagcgcgcctaacagagacaaaaggtgcaatataagccaggcaccagcagagtgtcgccacagaagaacacacatcaaccagaggacgagcgcaagcaaccgccacaagcacgcacaagcagaagcagaagaaaaaaccagcaaaaacgacagatagaagagagaacagaaagcgaacacacaggaaccagactcccacaagtacagagagacagacgactccatcgtgcacgtgcaacccgtagtgaactaaacggtggcacagtagaccagagacggcaagcacatacaccgaaccacagc

SEQ ID NO: 679666 - DNA, 201 bp, Homo sapiens
gtggtcttacatatctagctccctgctatgctgtacgctctcgtgaggatgaagaacaaggcctcccatcacttcaatatcctccagggcctggaatgtccctgacacaaggtcgcaccacaacccatgtagaatctggactgcaaagaggaagctcttgcagccgaaaagcctatggcaacacgagctaacagcaggcac

SEQ ID NO: 679667 - DNA, 625 bp, Homo sapiens
  misc_feature (94)..(94): n is a, c, g, or t
  misc_feature (129)..(129): n is a, c, g, or t
  misc_feature (156)..(156): n is a, c, g, or t
  misc_feature (299)..(299): n is a, c, g, or t
  misc_feature (318)..(318): n is a, c, g, or t
  misc_feature (367)..(367): n is a, c, g, or t
  misc_feature (370)..(370): n is a, c, g, or t
  misc_feature (373)..(373): n is a, c, g, or t
  misc_feature (385)..(385): n is a, c, g, or t
  misc_feature (388)..(388): n is a, c, g, or t
  misc_feature (402)..(402): n is a, c, g, or t
gaaggcttctccgcccattctgacccagggcctatgacggatatgcaagaacatacagacacatttacactataggccacggatagaggatatngggtctcagccctaggggaatgggaagcagctcangggaccctgggtgggagcataggaggngtctggacatgtggttactagtacaggttttgccctgattaaaaaatctcccaaagccccaaattcctgttagccaggtggaggcttttgatacgtgtatgagactatgcaaaagtccaagggctgagatttttcgtgtatanctgtgtgaacggtgtatgnccctaggatatgttaaatatatagctggccccttagttgcatgaccacntanaanatgtgtctatcngcntttgcctacgtganaacacaaatatgggagggtgagacacttggacagaagacagcagcgagtgtgcatggtcctctctgactatatgctaacaccctcagaatgactctgaattctaggaggtctgactgtgcccaagtgggtccaagtggctgtgacatctacgtatggctccatagctcctaatgctgcctgggtagccagtgatgagagtctagggttccagggcgtggtcca

SEQ ID NO: 679668 - DNA, 418 bp, Homo sapiens
  misc_feature (215)..(215): n is a, c, g, or t
  misc_feature (220)..(220): n is a, c, g, or t
  misc_feature (253)..(253): n is a, c, g, or t
  misc_feature (259)..(259): n is a, c, g, or t
  misc_feature (266)..(266): n is a, c, g, or t
  misc_feature (274)..(274): n is a, c, g, or t
  misc_feature (276)..(276): n is a, c, g, or t
  misc_feature (280)..(280): n is a, c, g, or t
  misc_feature (286)..(286): n is a, c, g, or t
  misc_feature (288)..(288): n is a, c, g, or t
  misc_feature (319)..(319): n is a, c, g, or t
  misc_feature (365)..(365): n is a, c, g, or t
  misc_feature (375)..(375): n is a, c, g, or t
  misc_feature (411)..(411): n is a, c, g, or t
  misc_feature (414)..(414): n is a, c, g, or t
gtgagtgagatcattggccgaaacctgagtggcttccctgcccctcctggagaagagcctcctgcctgaaccacgtgaactgttattacctggcaaccccagccccagcctcagccctgccccctttccctcctttttggagtggtggctacaaaagcttggggccaaccctgggtcctttttccccaggttttgtttgtttcactgttttcccnccccncccccagtaggtgggccctcaggcctggtgctnccttgnagggctnggggaaanantgtntggagnanggaggagggttaaaacttaggctaggtgccnaaatggactggagtgaaggggtgtttaaagtgtgggctggctgttntgctggaaanctggggacaggtttatggtaataaactgctcaatgnccngtta

SEQ ID NO: 679669 - DNA, 405 bp, Homo sapiens
taaataaaaaaagttttaataaaaaagggaaggtgtcccttattgtttacatggtcccttacctgaatataacataaataattatcctttttaataaatttttattggattagatcaaagagccgttttttggaaagtattataaatacctttctgtagaattttccaactccttgtaaaaccatggattttattttccgaatatgattatttgaatggtattgtcatgattattggtccccttttcagatgaaccctggcttccagtcccatgatatattccctatgcccttttattgacttttccctgtaaaaccatgccccctaatttagtaaggatttgggttttgtgatgtggtcagttgcctgctgggggacatgttaaattaactcctcccttaggga

SEQ ID NO: 679670 - DNA, 180 bp, Homo sapiens
ggccaatgtccttagtggacagctcacatgatgccaaaatgctatgggtccagcagtgtagcgatcaagtcatggccagaaaaacttcgctctatctacaatgtcacgataaaccgtccgaaatagtggaagacaaagcctactaaatagccgacaatggacgatcccaagtaataacag

SEQ ID NO: 679671 - DNA, 626 bp, Homo sapiens
cgctgtgggcgtggtggcatgcatctgtaagtccaagctactcaagcggtcctcccacgtgagcctcccaagactacaggtgcacaccatcatacacgggacagggtctcgctatgttgctcagactggaaagttcagatttttaaatcaggtcttgggactccagattctgtttttccacagagtcaccatctatcctgacaatgctccatttcatgctgtttttcctcaccttcaatactgctcccccatccccccacctctaggtgtgaaggttaccaggagagacctgagctcgctggctctgactccaaggtggcctcagtggaaagtttcaaaaggcaaccggtttggtttcactggcagggcagcggcaggcgtttgggttctggaggcccaggaatgtagaagcctccagctaacagactccacgcgcctatcctcccaaacgctctcggagataagctcccagctccctccccttttccaccttcatgcacttcctgctgtattctgtccattccagcactggccctttctgtgggtgggtgggcagaggatacaatttcctgcatgactacttgctcatgattcatacttctaaatgaaagtacaactgatataat

SEQ ID NO: 679672 - DNA, 191 bp, Homo sapiens
  misc_feature (139)..(139): n is a, c, g, or t
ctgaaaacacacgagaagaaatcaaaataaaaagccaagattcttatgaaagaagaaaaacctcctctagtacaagagacccagacgatggaacctccctgccctcctaccagattcaacactcacaatctaaacggcncatcgctcctctacgctcccatcacatttaggcaaaccgacagaacactccc

SEQ ID NO: 679673 - DNA, 349 bp, Homo sapiens
gtgtgtacatatatgtgtgtgttcgctgcttcttacctccttctgattttctgattcccaagtcatatttcaggaaccacacaaatcactattgtcactgcttaagtgtttttcataccaggtcattgttaatatcaagtgactgtagtccagtcagctttctcaatgttctgtattagtaatagtaaagctttgtctcctggtggtgtatagcctcctgatggaaaggggcagatcctgtggttcagaaaatacttacgttaggctgctgtccctcaggatagccagattcaacaaataaaaatgcaggatgcaatatatgggacatctttttatttaaaaattactt

SEQ ID NO: 679674 - DNA, 421 bp, Homo sapiens
gggtacggtaattcccaaggtaagctcttgatctagatcttggggcctatagaaatatttttaagggacatcaaagggtcttgggaaatctgcctagtgagggtaagcaagatgaaagagggaaagttgttatggttaatagtttgttaggaactcccttccaagaggcaagcttttgtcatctctatggaatttgagggcagttggacaatttgcaaggatattctcacctgttcattaaggtccctttcctccagtaagagaatggctagggtctgtgggataatcttaagcacctactgttgcttttttgttgttttgcttatgcaagtgatcatttattttttaggagtgatttggaggaagagtatgaggcaagcttgtttttctccagtgtaattgatggtcaccatgcatggtt

SEQ ID NO: 679675 - DNA, 95 bp, Homo sapiens
cgccgtgctgaccgagagcgtgactcaaggagaagtcggcagatgcatcagaatctgaggccacggactctgactacgaggacgcgctgcccaag

SEQ ID NO: 679676 - DNA, 167 bp, Homo sapiens
  misc_feature (131)..(131): n is a, c, g, or t
gtgtgttagaggatcgcttaggtggttgtgggtagggaggtacactggtctccacagcatcaggttacgcacatggcacacagggtacagcacggtttctgactgagaggaatacagtaggtttttgaaangccttgtttgctgccctgaagaaagtgaccacacgt

SEQ ID NO: 679677 - DNA, 454 bp, Homo sapiens
agtaccatctctccacactctctccacactggctctgcacgagggtttaaaaagtccagtttctcgtatgatttcgctgctccatttagccaaggttggcctggccactgcttggccacaagtgggtcaatgcgcttggataggtcatgtttgtgtcttggcaactaagggtacgagttgcctttagcttaaattgtctttaaggaagaagaagaagaagaaaaaacaaaacaaaataaaaaaacaaaaaaacacaaacgtccaaagggaatactggttggtcctctctttcttcggttataattaggatcatctacggccatcttcgcccttcgtgggaggcctcctcaaggtcgagtgagctgtgtgtagacggtttgtacccagatctgagagctgtggatctgcgggatgaaagggaacccagaggtagtcgagcgaaatagcgagagaa

SEQ ID NO: 679678 - DNA, 165 bp, Homo sapiens
ttgctagctgcgtgaaagttgtttcagaaacatgggcttctaactggctccaaaatattgactcagctgccattgtaatcggggaccgtcagaagagacgagaaatatgttgccacagcatgtcttctttactcaaacatacatcaggcacctacaaaatgccat

SEQ ID NO: 679679 - DNA, 129 bp, Homo sapiens
  misc_feature (64)..(64): n is a, c, g, or t
tcaagcttctaacgatgtacggggacatgtctgaacacaccaatagctaatgacccaaactggngattagataccccactatgcttaagccctaaacctcaacagttaaatcaacaaaaccaaaaaaaa

SEQ ID NO: 679680 - DNA, 411 bp, Homo sapiens
tcagccacatgtatacacgcaccaattttatacatctcagaggcagaggggctgaatcttctccctgctccttggagaacgtgctctattaccgcccaggaggggccggcagtgacaccttggtgaggtattttgcaaattaatccatttgctgacgttccaccgagtggaaggattgcaaggcgtctacatcgctactctgatttatggttctgatcaacttaggagaacacttatgatcggtcactcaccttcgacatagggggatacctgggtgtttcttctggctcccgccttcacgtgatatggtggagcatatcgattgtgagctttcccagggttgttcccttcatctggctcagcgcctcagtcagcttctcaccctccagctccggagaatggccatcctgt

SEQ ID NO: 679681 - DNA, 493 bp, Homo sapiens
cttcccccggtctgtaagaattcggctttagggtcgctctttcagagtctgcatgacagacttggcatcaggtaccccctgtgaggaacactgaaatggatcacgacggaacccccgaaaacgaaggcgaagagactgcgcagtcagtaagtcattggtgcccgctcgggatttccaagttcaggggaattctcaagctagggtttcatcatgggacaacagctatccacacaacagaaacagtatataaaagtattgaaacaactgcttaaagctagcagagcctcggtttcgcaggctcaattaagggacccagtgcaaactgttgtttcccataacccatggtccccagaagaaggcacgctggacctagagctttgggaaaaagtggggagaaatcttcgatatcatgcacaagggcaatgggtcccagttctttaaccgtatgggccttagttaaggctacttttgccttgctctacacagggccttt

SEQ ID NO: 679682 - DNA, 168 bp, Homo sapiens
agaatatccccggcggttgccgatcggagtcgacgtcagagttccgacagaagggtgggccgcatgtctctcttctagtggcatcaagacctctgtgtgccgtctccagaactttctcacctcgactgtgcgcttcacccggggagacctccatgactcactactcct

SEQ ID NO: 679683 - DNA, 930 bp, Homo sapiens
  misc_feature (67)..(67): n is a, c, g, or t
  misc_feature (70)..(72): n is a, c, g, or t
  misc_feature (74)..(74): n is a, c, g, or t
  misc_feature (77)..(77): n is a, c, g, or t
  misc_feature (82)..(82): n is a, c, g, or t
  misc_feature (84)..(84): n is a, c, g, or t
  misc_feature (88)..(89): n is a, c, g, or t
  misc_feature (93)..(93): n is a, c, g, or t
  misc_feature (97)..(100): n is a, c, g, or t
  misc_feature (106)..(106): n is a, c, g, or t
  misc_feature (112)..(113): n is a, c, g, or t
  misc_feature (115)..(117): n is a, c, g, or t
  misc_feature (119)..(119): n is a, c, g, or t
  misc_feature (125)..(125): n is a, c, g, or t
  misc_feature (127)..(127): n is a, c, g, or t
  misc_feature (133)..(133): n is a, c, g, or t
  misc_feature (160)..(160): n is a, c, g, or t
  misc_feature (164)..(164): n is a, c, g, or t
  misc_feature (171)..(171): n is a, c, g, or t
  misc_feature (181)..(182): n is a, c, g, or t
  misc_feature (184)..(184): n is a, c, g, or t
  misc_feature (198)..(198): n is a, c, g, or t
  misc_feature (200)..(200): n is a, c, g, or t
  misc_feature (206)..(206): n is a, c, g, or t
  misc_feature (240)..(240): n is a, c, g, or t
  misc_feature (253)..(254): n is a, c, g, or t
  misc_feature (268)..(268): n is a, c, g, or t
  misc_feature (275)..(275): n is a, c, g, or t
  misc_feature (288)..(288): n is a, c, g, or t
  misc_feature (291)..(291): n is a, c, g, or t
  misc_feature (323)..(323): n is a, c, g, or t
  misc_feature (359)..(359): n is a, c, g, or t
  misc_feature (370)..(370): n is a, c, g, or t
  misc_feature (383)..(383): n is a, c, g, or t
  misc_feature (390)..(390): n is a, c, g, or t
  misc_feature (419)..(419): n is a, c, g, or t
  misc_feature (477)..(477): n is a, c, g, or t
  misc_feature (538)..(538): n is a, c, g, or t
  misc_feature (549)..(549): n is a, c, g, or t
  misc_feature (551)..(551): n is a, c, g, or t
  misc_feature (693)..(693): n is a, c, g, or t
  misc_feature (793)..(793): n is a, c, g, or t
  misc_feature (917)..(917): n is a, c, g, or t
ctatttaatgtttgaaagaaattaaagaaataaaaaaaattaaataaagatgcaaaaaaaaaaatcnttnnntnccncatcntntccnntttncagnnnnttgtanataaanntnnntntggggngngggacnccatcagttgtgcacatcagtgatggngagnggggggntcaccattgnnangggagagatcattnangggaangggtcacagagaccgtcctagcagcaagggtttntaacctcaaaagnncattactggggctnttttatnaagattgctaatnatntagagggctttacctaccaactagcaattaancatgaaatcaatgaatgcaatcactgtttccaagtngaatgtgaccnatgacctcatgcntaggggnaacatctataccttttgctgattggggcnctgacatatgcgggtgtggttaggaacagaaatcaaccccacctccccttggctagtnactgtgaaaagcgtgcgttagggaattgaatggggggttaagggttcatcttgctaatgtnaaaagtgacantnacaagattcttagcctcatccgccagaggaggggcctctgcgtccaggtctccaggagcaagctccgcctccttcaccagaaaacgggttataacctcctccccgcaaaggctttctgtccgatttccgtttcaggacagangaagtggaaggcccaggactgttttcctcctggggcttctttgcatttcctttgtaactttttccttcttgcatgctgtcccacatttcaatcttctgtntccttttttcttcttcaagttgtttcagtttttccttatgcttttcaacttgcgcatttagttcttcttgcattttcagtcgagcagctgctaaagcttcttgtcgtttaacaacaacatcagnctcacagcagcgg

SEQ ID NO: 679684 - DNA, 244 bp, Homo sapiens
gatacgaatactcatttctcgacagcagcatggggacgatctgatgtgttggtgtgggtgtgaaagcgtaggagatgtgtggcattcctgctggtagtagctatccacggcatacagcacccacacagatgactgaagcagttgccgtagaaattcctccgagagcccctgtgctgccatgtggtctccgttcccagatgctcagatgtcctgggtgatcctcatagatgtctgaccttgcatg

SEQ ID NO: 679685 - DNA, 502 bp, Homo sapiens
tagcaagtgtcaccagccgggttcagtgctcgtccactgggccagactccgagctgggcccactcgctggcccaacgaatgtcatggcctcttggccgtccaggccctgatcctcattcagccgggggccactcgtggccacaaactgggcgaattcacccagtggtacatttggtgcctactccacttgtggcgggcgtgtttgtgtgcctgctggagtaccctccggaggagaagacgcgaagaagcggctccaccatggacgccgctgcgcggacagaagcacatgacacgccgtggtgaagctgttcgggccctttaccaggaattactatagttcgggcacgtcctgcatctcactcgctctcggtgcccgccggcttcctgctgcccaccatccttgggaccgcctgcctggccattgcgagcggcatcgagcctactggcgtctgtgcgtggacagagcagatgacgcccatcgagcccaagccacacagaggag

SEQ ID NO: 679686 - DNA, 183 bp, Homo sapiens
acgtgtagtgtaactggggaatcagcttcttgatctgaaatatgggaacaatgaagccaacttcaagaagttagcaatttaattaaaagtttaagaaaaattatcggccaggcatggtggctcacgccgtgtaatcccagacactttggggaggccgaggcggcgtggatcaccatgaggtca

SEQ ID NO: 679687 - DNA, 121 bp, Homo sapiens
tgatctccgtgccccatgacctttttagcatacaatgttgtgttaagaaaaatgaatggtcttcatagaagagaattataccagagcctaaggaaaaactatgattatgatctgaatttga

SEQ ID NO: 679688 - DNA, 158 bp, Homo sapiens
atcgagctcggtacctcgcgaacgtgtatcctgggcacaagctcgtgaagcaagagcgatgacatgtgcatgatatgtttcaccgaaggcgcgtctcggaagcaccagccgattcagcgggatggtagtcacatattccacttgacagtgctgtcggc

SEQ ID NO: 679689 - DNA, 748 bp, Homo sapiens
  misc_feature (27)..(28): n is a, c, g, or t
  misc_feature (199)..(199): n is a, c, g, or t
  misc_feature (233)..(233): n is a, c, g, or t
  misc_feature (274)..(274): n is a, c, g, or t
  misc_feature (429)..(429): n is a, c, g, or t
agtggtgggactcgcgtcgcgccgcgnngacgtgaagctctcgaggctcctcccgctgcgggtcggcgctcgccctcgctctcctcgccctccgccccggccccggccccggccccgcgcccgccatggagaagactgagctgatccagaaggccaatgctggccgagcaggccgagcgctacgacgacatggccaccntgcatgaacggcagtgaccgagcagggcgccgangctgtccaacgaggagcgcaacctgctctccggtggcctanacgagaacgtgtggtcgggggccgcagggtccgcctggagggtcatctctagcattcgaggcagaagaccgacaactccgagcagaagttgcagctgattaccggactatcgggagaacagtggagtcctgaggctgagcatccatctgcaccancggtgtctggcaattggtctggataaccatagttcaattagtccaactgcaagctaatccaagagagtagtggtctggctatctgaagaatgaagggtgattacttgccggtacctatgctcaaagttgcggtgtggtgatgatcgagaactgaaacggtagaatactcccccaaggagcttgaccaagcagggcatttcgatggtaaggcaacaagaggagatgctgacccaacatacccaaatccgtcctgggggcttgccctttcacttccctcgtatcgtactatgagcattcttaattaagccagtagttggcc

SEQ ID NO: 679690 - DNA, 172 bp, Homo sapiens
tgggccgagcctggttaaagctttaaaaggtaccttttcaaggggaaaatgtggggggccctgttttggccgatttaaaagggtttccttccctggggaaaaaaaaaaatcctgttttgtttataaattggcaaaggccattaatttaaaaaagggtccctggttcttttta

SEQ ID NO: 679691 - DNA, 154 bp, Homo sapiens
atcccatgtcatggcctcttgtggatagggctatcagtctatatgaatcctgtattccatgtcgtcccttccagaaccccgggggtacagctacaaatatagtccttctttcgctgatgggggctagtgagagaaagacaatgaagtggcaccc

SEQ ID NO: 679692 - DNA, 525 bp, Homo sapiens
acgctgcaccgctgtcacagttaagaacgggaagaatgggtggcaatggtggttcctggaatagctcacccagcacagctgccctgagctcgggccttggtttctagtccctgggcatacttatatttaataaatttttatataaatacactgagaaatagaaaatataaaatctgaggggttggggaagaaactgtgaggacatcagcaggacagccagagctaggagaggtccattcaggcccaacttgaccatcctccttgaccccttatggattctgggcttctccttccttggttttctacctcttcggtgacttctttcttctcctctagggtctttctctttttcatcctctgtttggactctcttggctttattgaagttggaagagttcttgcgtgccccctctccctcctcttcagaaatcggaaaactcttcctcacaggcaattcgtttgtcagaggagcagatcgagatgcgcttgtcagggtcgtcttcgtcctcatcgccactctcctca

SEQ ID NO: 679693 - DNA, 136 bp, Homo sapiens
tggatggagaactatgagagtgctcaattccagttccatctcctctttgctggatgacagggtttcagggatctggagaaaagtccatcacccactccagtaatgcggatctcccaggtggtgacccattttaaca

SEQ ID NO: 679694 - DNA, 332 bp, Homo sapiens
tgttttttcatttaatccttacgactctctgagataggtattagtcttattatagccatttcatatatgagaaaactgaggcacactaaataattttcccaaagccacagagcctcagtggtaagcccaggatttgaacccagggagttctggccccagagtccagcaagtgcttgttgcacatgcaaccaattcactagtacatttcccctgaagacgcaaagatgactctggcagtgttcaggctccagacagtggtctcagaccaacctagcagagctcatcaaagcacactgtgatgaggaggtgtcttatcatctcctgccttcctc

SEQ ID NO: 679695 - DNA, 1545 bp, Homo sapiens
  misc_feature (882)..(882): n is a, c, g, or t
ttctctttcgatgtctctcctcgctcagcctgttgtgtgtgtcgtgctgttgccactcttctctgtcattggctcggtggttgttctgactggcatgtacgccggcgggttgattgataagaccaagttgtttgtggggagacgacgccagtattgtgtattcacgttgtggtgggacacgaggagcacaccattgtggagcaacgtgccagcaagcaacaattgttggctggcgcgctcccaaatgagttggggtgtgtgttatgaccccctgcaagagtgatcctccggcatgttcttccaacacacgctgggatatttggggttggtctctcttaagggggagaagcaccaaacgaggagagaggattttgaagaccaccagtgttctgggggtggtacaaccaacgtgccccgcccttctcattgggaattctttttcttgggggaagaaaaaggacctttttgcccagtatccccactgggaccacagattttgaagagggagaaaaaaaggtcatagaaagcaaccacgaggggttctttttataccttggcgcataggagggagaaatgttggagaatagacgttgcgctcccagggacacaaatcccccgttttgtccgcttatggggcttcggcccatagccaagaaatgtatagcctgggcacccgtcgtttcccccccgataaaaaccccggcggttttggtgaatagggagcgtgaacacatgcgtgttgtcgtcccgcgtcgtgtggcagcccagcaaaaataggtctttaggagatagtgcaccccgcagagaggagatatatcaccacagcctcgtgctgttgaacctcttgtgttgttatatgcccccttccacgcctattgaganttccacggcggttttctaaatttgggcacacgtttctggggccccaataaatttgagatgagaagagaaaatggctcccccccataaaagccttcgccctctcgcacgagaacccccacacgagttttcttttttgtgagattcactgtaggagaaagggaaatgtgagaatatataggacccgcggtcccactcttgtacacgcgtgtctccccctgaggagtttttctgcccacaaaaagagtttgttatagagatgagactctagtttttctcgccaccacactctctcctcgtgagattaataataatatatgaggctgtgccaactgctcttcaccacgaggttttattgagatataggctgctatactgtgttggaggagaaagagtatgacccgcaactggagaaaaatatttgtagaaggtgaacacacatgtgggcgctatatgtctgctatatgttgaaggccacgtagctgctgtcatggcccaaggggtttgatatccctgggagattaaaccctgtcccaaggaatgtaatcccttctataggtttgaacccctgtgtgtttttacccaaagtggcccattggcccctgtttgcgttttttaccatcaagtggacaccagcataagttaagaaaatttctccacccggga

SEQ ID NO: 679696 - DNA, 189 bp, Homo sapiens
ggtgagatttcatttgctagtgccatgctccaacaactggcttggtagaatttcgctgggccagcagagacctgacaactatcaacctattccccaacttgggccaggaaccactactcagagagggggctgagccctagctacaaggtaaaaaaggcagcagaagggaccgggaggattgtgtctcag

SEQ ID NO: 679697 - DNA, 366 bp, Homo sapiens
gctcgaccgccttcttcaaggcatcaatcgccgcaacatcaacgccgttcgccgccagactcgcgaccttgcgggtcttgatatcacccgacagcaaattggcctggctcagcgctggtgaacgttccggagacgtcttgcgctctggcaccgtgcctttcttcggtgccggcaagcccaggttctgcgccacgcgttggccagttcgaggtcgatgttggcgaggatctcgttcacctgccgagcccggatgaattcacgctccaccttgcccagctcgaagctgtaagccgcgatgatgtgctcttgctcgtgcttgctcatgctgcggaaaaacaagcgcgcctgggagaagtgatcaccgaa

SEQ ID NO: 679698 - DNA, 113 bp, Homo sapiens
caggacaaacattatcatcatcaatggtgtttttttagaatacattttataacacaaggaagaaacacatgcacagcatgttaccattcaacattcattaagcagagattaag

SEQ ID NO: 679699 - DNA, 206 bp, Homo sapiens
ggtcgatctagagtatccccccgcggtcatgtcttacgtggctaatggtgtgcacaccaattttacctgagtacaacaaaagacgtactccctctttgcaaagggcaaggcagaatgaacaccacgaaaacaaaagaaaagaaaaaaaaagtcttaagaggaattatttatctatcgttctatttccccgtaagacataaccgcgg

SEQ ID NO: 679700 - DNA, 639 bp, Homo sapiens
ctaccgttaaggctgcagtgcatgcggctgtgatgaccgactcgtgcgcgagcacgaatgcgagctgttcacgtggcatagcggcaacgttagcgccgagtgacgatgacgcctgggaaatagatggcgccgccgtcaatggttttggtgctgacaaaaacatctacatcatgcatctccattttgttgaccagctcatcaacgagcagcgagtgacgaaacggctttgcgctttcgaccaatgccttacggaataggtcgatttcaggagaaatcttctccagggtcgactgctgagcttgcgccagcgtcgatgccaatgccagcatgagtgcaaaaataactttcatgataattcctaattaagttgacctgtctcgtatagggaccaccacttcatgcactgcgtcgtgtacgccgacaggtcgctagactgtgttacagggcgtgcaagcccttctcggtcggggccttcgggcttaggtaaatcttgcgcactactcgtttgctgaacacgtgactttcaaggtccgggcccagcagacctcacaagccgacctctgaggacactttcccatcatcgggctgggcccgattcatacggcgtaacacatgactgacattcaggccactaaagac

SEQ ID NO: 679701 - DNA, 863 bp, Homo sapiens
  misc_feature (1)..(1): n is a, c, g, or t
nctggccgatctccatttattacattcctctcatgctttttctttacttaggcatattaccccacaatgcttcattcttctcagatgtacgacgaaaaccatcccagtttagctgtttcttcaaaacttcatttcctttagaaggctcctgggtcacataacacatattaaataaatttgcgcacctttctcttgttaatctgtcttttgacacaggcgtcccacccaatgaacctaacatgggtacaaatggggtaggaggcggtaccgtatatcaaattatactcaagactaactaaaacagggttggggcagaagcagctttccataagacatgtatgggtgggtgactcccctgatacagcagcctatgaataaatggcctttgcttggtctaccctggttgggctctaccacagcctataacttcacacagctcgagtgggagctggacacatcgataggcaatcagatttttaaacatccctttggcccttacatgctaagttaaactctgtgaacacgtgttcttggagcacacattctactccacctcttctttgtgaaaaagcgaaaaggaagcctttccacttaacgaccgagaggggccggcctaaaagttccccgagttcaggggggccctttcaggcttagataaggggggtggggcggctgaaaaaccagggcttgaggggagaaccctcaccggttgggtgacggggcaccatcccgaaaacaaaatatcgcccaccttgccggggggggattttgggagtgacagtccctatctttccgcacttgggtggaagacaccgactggggaacgctatcaccgggttaaggctcccaggcatatagagctt

SEQ ID NO: 679702 - DNA, 174 bp, Homo sapiens
agatcctgtctctactaaaagtacaaaattagccagatacagtggcacatgcttgtaatcccagctattcaggaggctgaaggagaatcgcccgaacatggaaggcggaggttttcgtgagccgagattgtgccatcgcactccagcctggcaggaagagtgaaacttcatctc

SEQ ID NO: 679703 - DNA, 142 bp, Homo sapiens
gaccaacgtttgctgtattgccaggcaggttcaactcctgggctcagctatctcccacctctgcctccctaagagctgggattacaggtgtgagctgctgcgcctagcaatttaagtactttgaagaacagaacacaaagga

SEQ ID NO: 679704 - DNA, 192 bp, Homo sapiens
cttgctgtctgcggtcgcctctagacggactcccctccgtacgacgcgcccggccgtatcttacaatttgtttatccatttcatccattgataaatgtttgggctgttacggaagcgctcgttacggacggcgctcgttacggaagcgctcgttacggggcgctcgttacggaggcgctcgttacggaggcg

SEQ ID NO: 679705 - DNA, 955 bp, Homo sapiens
  misc_feature (1)..(1): n is a, c, g, or t
  misc_feature (62)..(62): n is a, c, g, or t
  misc_feature (92)..(92): n is a, c, g, or t
  misc_feature (100)..(100): n is a, c, g, or t
  misc_feature (119)..(119): n is a, c, g, or t
  misc_feature (124)..(124): n is a, c, g, or t
  misc_feature (164)..(165): n is a, c, g, or t
  misc_feature (171)..(171): n is a, c, g, or t
  misc_feature (173)..(173): n is a, c, g, or t
  misc_feature (185)..(185): n is a, c, g, or t
  misc_feature (187)..(187): n is a, c, g, or t
  misc_feature (191)..(192): n is a, c, g, or t
  misc_feature (248)..(248): n is a, c, g, or t
  misc_feature (359)..(360): n is a, c, g, or t
  misc_feature (363)..(363): n is a, c, g, or t
  misc_feature (367)..(367): n is a, c, g, or t
  misc_feature (370)..(370): n is a, c, g, or t
  misc_feature (374)..(374): n is a, c, g, or t
  misc_feature (380)..(380): n is a, c, g, or t
  misc_feature (462)..(463): n is a, c, g, or t
  misc_feature (466)..(467): n is a, c, g, or t
  misc_feature (481)..(481): n is a, c, g, or t
  misc_feature (489)..(489): n is a, c, g, or t
  misc_feature (496)..(496): n is a, c, g, or t
  misc_feature (504)..(504): n is a, c, g, or t
  misc_feature (511)..(511): n is a, c, g, or t
  misc_feature (524)..(524): n is a, c, g, or t
  misc_feature (534)..(534): n is a, c, g, or t
  misc_feature (538)..(538): n is a, c, g, or t
  misc_feature (547)..(547): n is a, c, g, or t
  misc_feature (551)..(551): n is a, c, g, or t
  misc_feature (558)..(559): n is a, c, g, or t
  misc_feature (562)..(562): n is a, c, g, or t
  misc_feature (571)..(572): n is a, c, g, or t
  misc_feature (597)..(597): n is a, c, g, or t
  misc_feature (650)..(650): n is a, c, g, or t
  misc_feature (943)..(943): n is a, c, g, or t
ngggggggaggatggggggggggggggggcgtgggcgaaacagtgaaagggaggagtgcgtnacaggcgtgggcgagagcgataggggtttnaatgaatntcctttgtgctcaaacagngtatntttaacttatcggacaggagcgggtgggagcgggcttaannaggagngngtgtgtgtgtgnanagtnnagtgcttcgaaggaatgtctttctccttgaacacggtgtttacagataagacagcnggtctcgccctgagcatgcgaacatgatggcaattaggaggctttcctcctcagaggcctcttgtggctttccacaacttattgtcccatattttcatggccagtttatannggnattncanaagngctttncccaacaattagcagtgtgagagcggactaatacagggtgccatcgggaaggactgcagccaggcggctccaattctccgannggnntgggcacgggggtncaaggtcnaggtgtnaccagggntggttcntgaggcctctgcncggggcttgnaganggcattgcntccntgtgtcnncanggggctgtnnctctgtgtgtgtgtgtgtgcgtcanctctgcttcttacaaggacaccaagcagcttggatcagggcccacccagagcnctgatggcgctgcttttaacctgctgacctctgtaggggctccatctccaaacccagtcccacactgaggtgctggggttaaggctgcaacatgagaatttggggggacgtaattcagccataacagccatgaggaaggggagacgtccagcacttggccgggtctcagacacaggccccaggccctctgaggcccagcttcctatcgaaacagagggcatggtcttgcacctcttggtggcctcctgcccactgtgggatgtgggatgggccagagccacaagaacttctcnaacaggggaggg

SEQ ID NO: 679706 - DNA, 1366 bp, Homo sapiens
gcctacatggcggattacgtccggtgcagcggggtgggcccggggtgccctgtgctggccctgaggcatgggggaaccgcgtgtggtttccgcgtgagtgtttcgagccaagtgttgcatccggaggaccggagtcgcggccggtgtcacggggccggggccagaagccgtggagctctcaggaggcccatgcccgacggaataaaggaagttggaattgccctgtacctgctagatgtttgggtcgcgcgttgtggtccaacggacattgaatgagtcacatgtcccgtgagagtgcagatctaatcgtcgtatcatcccttggcccaattaagagaattcaagagatcacattgacttctcgttcccttgggggggccctccgtcctccaagggaattgacggctctcggtagacacgaatttactagccccaggtgtcaccgaaaggcaatgacccactgcttggccaggcgtcaacgcaggcaaccgagggtgtcaaagggccatttgtcgattgcggcctatcgggcggaaccgtaccaaattgggccaacgcatcggctctagagagttgtctgaagggtagctcccacacggaaaccagttggccagccttgcccaattcccaggtgcggatagccattccattcctttgtggccaaagcctcctcccaatcgagtcccccgttgcagcaatgcagaggttaccttggggggaaacgaaacgatctgggcaaaagaccccccaacaacttgtccccttggcaagtggtgaacagggcgcggctggcagcgctcttgtagcctgggtaccgcccttcatcccccttgcatcccaaggggggcaacctggggacattcggtcttccccggcaaccccttgttgccctaaagaaaaggcttgcctctattgaatggcgcgggtcattcggaagtgaactgcgtaacaaccctcaaagctcccggggcggcttggcatttgtgacccccccttgggagcaagctctccgctcaaagggggccgccctttttggagttgcccatttatacataaagaaaagcctatcaaagaccgtattccttggaacaccccgccggaccctcttggcgcagccggacgaaccatgggagtatcaaacacaagagtttctacccctacttccaacggaacggttcacattagaacacacctcggggtacagagaacgccccacaccgcacgagaggtcaccccgtacgcacgggacactccaccgcgctcccccaggctgatggctaaccaaccactacgggggctttaaactcccacggcagacaactcacagcgtaacttcaacgcgctggacacaaaccacacggacaac

SEQ ID NO: 679707 - DNA, 265 bp, Homo sapiens
  misc_feature (60)..(60): n is a, c, g, or t
  misc_feature (136)..(136): n is a, c, g, or t
  misc_feature (143)..(143): n is a, c, g, or t
  misc_feature (182)..(182): n is a, c, g, or t
  misc_feature (220)..(220): n is a, c, g, or t
  misc_feature (239)..(239): n is a, c, g, or t
gtgctggccgagctgcccaaggactatcgggtaccgtagaccaccatggtcttgcctttnacctgtaccaggctgcgctcttcgaggtccttgaggacgcggccgaccatttcccgcgagcaaccgacgatacggncgatttnctgcgggtaatcttgatctgcatgccatcgggaatggtnatggggtcaggatgcttgccagtttccagcaggcaacnggtacttgaacggcacttnaaaaatgccagttgcccaacttttcc

SEQ ID NO: 679708 - DNA, 323 bp, Homo sapiens
tcggggcgtgcctccctgagccttctgccggtgctgcacctgtcctcttgctcaagtgtcgtcatgagaggcatcgtcgtgggtttccttaggagaccacaggaggttgctggagccagttcacagattctgaactcgcaggtgagtggcaactgagagagatatctgtgacgctgtcgaacattctcagacatggagtatcctgcatgtctccagcacagttgctgagatcttctcggggctcctctccgggctgccgtactcccgcacgaggcagcgcacactcatagggtgcaggaacataagctgtccacgtccattat

SEQ ID NO: 679709 - DNA, 1025 bp, Homo sapiens
ggctctttggtagcttttttgcactaaccttcaggaaccagctcaatgatctcaggactgtatggaaaaactaatctttgatattactactctgtcagccaacttgctgacgcaatatcacgcacttaagctaccacctgaggctggcacatgccaacacattcaaccctcatatcttcagctcacaacagcagcttacaatctcaatcacacgacacaactgactcacgcaccacaacgagagacaccatactgccagcccacatccctagcaagctccatgcaagctttcacgacaacttctcttgctctagcaaacctgccttctaccccctcccagcaacgcaaggacacacccgagagcacacacgcggctaccaacctatgcccccactccactctctcttctgccacaccccagcaggcacttcaccaccctccaatttacttctcactccggcgcgagcctggacttggagccctgggccttgctttcactcatgggtcaaacccgcaccttccccattccttccaacaccttatctccatctaacccggcgcctaaccttttcccgacacccgcaaacccgttggcaacgttaacacacacaacaaaaagaacaacgcacccgcccaacttcccatatgccaacttgactttaccacacaacaacccaccccacatcattcccccacgaccaatatcccaaccaccccataggaaaaccacaaccccaacgccacaccacacctagaccccccactattcacctgtacaaagcgccatatcataccccctttggacacccacgcccaccaccaacgcttatcccgcacaaacacgaacccactattccccccccaacggccaacagacaacccccaacacccggccctgtggaaaacttcccccacacgcccagggcaaacgacaacaccccttccctctcggagcccaccacacaaacccaccccacacagacaccaccccacaaaacacagctatggacactagcgcgccaaac

SEQ ID NO: 679710 - DNA, 976 bp, Homo sapiens
gaagatattcaagacaagatgaagtccatcatcctctatgtcctttccctgctccttatcttggagaagcaagcagctgtgatgggacaacaaggtggatcaaccaggccaatagccaagcggatcttcccaatttccacatggacaaaagggccagcactatcttggacaacaagatcaacaacatactaaatccaaaaggcagattttcctattcaacacacatatcatgtcgacatcaactgactcatgactggacccgaaacaagatcacgcaatatgaataagaatgccctacataaaggcgaacaacaatcacaacacacaactacggtcggaagttccaccaacgggctcaaatctatacaaccacagcaagggccagcagcaccaatgattcactccaaaaacggtcactccaaacaccactgactagataatcacattcaataaaagagacggacctaggcatcattctatagcgtacaacaaacactcctttcatcgaagtactcaagtgggtcactacgcccccattcttgacacacagaggatttatcaaagatacaaacgattacacaaataaacaaagaacaaaccaaaggggccttactggagttatacaaatggtattataacagctaactagaagccaaataacgttccagacacgtccttgggatgacacaccaaaataacaagaggtaagaacaccactaaactagtatgggtcaccccctcaaaataacgacacgagtaaaacattacatactaattacaaacataaacgttaggtacggaaaacacacataaggtaatgaggttatagcgcatcaaagggaagctcacaccacggataggaaatcatattttagacctcaagaatatcatcacaatcccacactcactatcaaaagacgggcggagcaatttatgcaaataacatttggtagtgattgagacggttggaaacagg

SEQ ID NO: 679711 - DNA, 178 bp, Homo sapiens
cctcgggctcgacttcgaggagtgcatggtcttgccagtcaggggtcttcacgaagatctgcatcccacctctgtagtacggtagtaccaggtggaagatggtctgctaccctgtctgtcttcgtcatccaggagatgagtccatcttcctcctatggtgctcggggggctcctctcg

SEQ ID NO: 679712 - DNA, 320 bp, Homo sapiens
gccagacgagggtgggcatacactgcggaaccctatggcttctcttcccctgccggatcagagaaaagggtgccgctcaggctggaggtcgctgaaatccaactgggtccccagacttccatttctgtgggcaagggactctggctccaaacccatgcacaagtggctgttctcatagcaacgctgatccctgcgcctgagggcactttcgccttgcctggctgctggttgtgttgggtcatgtgagacaggtgcacctgcagaacgagtttgcctgcttctcatgccaccacactcatttaacatttgatgctccagat

SEQ ID NO: 679713 - DNA, 379 bp, Homo sapiens
ttgttattataatatgtatactataataaaagctggttatcctgagcaggggaaaaggttatttttaggaaaaccccttcaaatagaaagctgaaggacttttaatatactgagggaagtataatatgtggaaccaactctccaccaaatgtttattgatgttgatgaaacagatcagtttttccacccggagttaatattgggtccatgattttaaatgggaaaaagtaaaaaatgttctgccattttataaatgttcatgtctttttttaaaaaaggggctattgaaattctgtgtttccagcaggcaagaaaacttgactaactctttttgtctctttatgggattttcagaaaaaagtctgacttgtgtttttga

SEQ ID NO: 679714 - DNA, 237 bp, Homo sapiens
aggtcagacttaacgatatatggaggtcagcacggtgctcacgtgtcgacggaacttgtacagggaggcatgcaccgcataggtaaatacacgtcgaccaggctccatgtttaacgtatatttggtggtcagcacggttctcaagtatcgacggaacttgtcccagggaggtcatagcaccgcagtggtgaatacacgtcgagctgcaggacatgcatgcatgctcgtggtactgaa

SEQ ID NO: 679715 - DNA, 137 bp, Homo sapiens
gagtaccttcaccaacaacctggtgtatgacacctcggacagtgatgactatcacctcctgaaggacctagaggaaggcatccaaatgctgatggggaggctggaagacggcagccacctgactgggcagaccctca

SEQ ID NO: 679716 - DNA, 200 bp, Homo sapiens
ttcgtgagacccctgaggtggagagtccctagcctcccagcatacacacacacacacacacacacacacacacacacacacacacacacacacacacacacacacacacacacacacacacacacacacacacacacacacacacacacacgcacgcacacacacacacacacacacacacacacacacacacacacaca

SEQ ID NO: 679717 - DNA, 264 bp, Homo sapiens
gcgacctgcacgtcattagagtcacagaaagaacggctcctgtcgaatgggtgggagacagcatcgagccgtcgaccatgatggagttgtacaaccaggttacctcgacgctgaagtgagcaggatagaatcacttgaatacctggataaaatggagctgctggagcacctcatgcggcattactgcctttgctgggcaaccacaggcggaaaaatgcgcttgggctgcaaggagataacttatcaaatctgtcactcataagg

SEQ ID NO: 679718 - DNA, 90 bp, Homo sapiens
accagtgcaccttcatttggtacaaccagtggcgggctctttgcagataatctcagtgataccttgaagaagctgaagataacagctgtt

SEQ ID NO: 679719 - DNA, 399 bp, Homo sapiens
  misc_feature (398)..(399): n is a, c, g, or t
cacctgaggtcgggagttcgagaccagcctgactaacatgaagacaccccatctcttctaaaaatacaaaaggagctgggactacaggcgcccaccaccacccctggctaattttttggtattttttagtagagacagggtttcaccatgttggccaggtgggtctcgaaatcctgatctcaggtgatccgcccgtctcagcctctcaaagttctgggattataggcgtgagtcaccgcgccgggccagaaccttttcttaatgactctaggagaatacaaaaagaaaactaaggctgaggcaggagaatcttttgaacctgggaggcagagattgcggtgagccgagatcgcgcctttgcactccagcctgggcgacaagagcaggactctgtcttnn

SEQ ID NO: 679720 - DNA, 739 bp, Homo sapiens
  misc_feature (280)..(280): n is a, c, g, or t
  misc_feature (286)..(287): n is a, c, g, or t
  misc_feature (290)..(291): n is a, c, g, or t
  misc_feature (324)..(324): n is a, c, g, or t
  misc_feature (360)..(360): n is a, c, g, or t
  misc_feature (656)..(656): n is a, c, g, or t
  misc_feature (663)..(663): n is a, c, g, or t
  misc_feature (668)..(668): n is a, c, g, or t
  misc_feature (680)..(680): n is a, c, g, or t
  misc_feature (682)..(682): n is a, c, g, or t
  misc_feature (692)..(693): n is a, c, g, or t
  misc_feature (696)..(696): n is a, c, g, or t
  misc_feature (699)..(699): n is a, c, g, or t
  misc_feature (710)..(710): n is a, c, g, or t
gagtctggggctgcggcttcccagaggcgcgagtcgcttttccaggagccgaggcccaaacggggccgggcctgaagggtcccccgccagcccgcggccgcgccatcaatcgccgccgcctcgtcccgcttctcggctgaggctgcctgcgcggccaggcatgctgggtccatggcctcatgcctgctgctgcccatgggtgcctccgtgtggccctccctgggtcatgcatgccctggggtgaaactgaccacccaggcctacttgcaaggatggtgcntgcacnngcnnccaatgtaccctgcacttgcgcctgtcaacggngctcctggtggcctgagaagcagaagccgctgtaanggagcacctccccctgggcggccccggctgcccaccacaccctcttcgtggactgcatccccctcttccacggcaccctggccctcgcccccatgctggaggtggctctcaccctgattgattcatggtgcaaagatcatagctacgtgattgctggttattatcaagctaatgagcgagtaaaggatgccagtccaaaccaggtttgcagagaagtgtggcctccagaatcgccgagggcttcagcgacactgcgctcatcatggtagacaacaccaagtttacgatggacttgnggtacgnctagnaccaagtgtacnancacctgaganngantgngtgcaaaaccnaacaagacatggaaatggcaagcaaggct

SEQ ID NO: 679721 - DNA, 696 bp, Homo sapiens
tccctgaggggtacgaagaagctaacaagctcttaaaactgggtgaaattctgaaactgcggctgtgacttcatacgtggtgaaaacactgtcttctggtgactaaatgacttcatactgtcacatgaaatctacaaacagtatttcaaagagttaattttcctgctagagactgcttaccaagttgctgctttacccaaaggcggccgacattgaacattggaggcagttagctatccaaggaccactgaacaaacggcatcactataaggtgggcccagtgctgtgtaagtctggaaattgttcacacattttaattttacaatttgatgtagacattcttaattaaaaccttttaatttctcacacgtgatgacaggtcgagcttgatgaacactatctgacagctatatggaaataccatgtatcgggaacagtgacatgatatcacagagactccgtactgatcacaatacactgtgtccccggtctaccggatttggaagcatcaccctcatcttcaccgacaacacggcaaaccggtgcgaaagagacatccggacaaactgacaccttcaatcaaaacatacaacgatgagagctaaatcttgtatagcacacggcaacgcgacaaatacgacacgagcacacatctcgccacgtccacactcacccctccctcctatctcgcgtatc

SEQ ID NO: 679722 - DNA, 587 bp, Homo sapiens
  misc_feature (208)..(208): n is a, c, g, or t
  misc_feature (504)..(504): n is a, c, g, or t
  misc_feature (511)..(511): n is a, c, g, or t
  misc_feature (516)..(516): n is a, c, g, or t
  misc_feature (528)..(528): n is a, c, g, or t
  misc_feature (530)..(530): n is a, c, g, or t
  misc_feature (540)..(541): n is a, c, g, or t
  misc_feature (544)..(544): n is a, c, g, or t
  misc_feature (547)..(547): n is a, c, g, or t
  misc_feature (558)..(558): n is a, c, g, or t
ccctcttaacggttgaagcgcctcgcggcctgtcgttttaaacagaactaaaacgcactcctaagggcctcctgcgtcactatgcgtcaccatgtcttgtgtgaaactgagcatgcatgcctactgggagatggtgctgcacggtgcccacagcccggactgctccgcaaatgggatctgtgtggccatgaagaaaaagacgtgtaanggagcacctccccctgggcggccccggctgcccaccacaccctcttcgtggactgcatccccctcttccacggcaccctggccctcgcccccatgctggaggtggctctcaccctgattgattcatggtgcaaagatcatagctacgtgattgctggttattatcaagctaatgagcgagtaaaggatgccagtccaaaccaggtttgcagagaagtgtggcctccagaatcgccgagggcttcagcgacactgcgctcatcatggtagacaacaccaagtttacgatggacttgnggtacgnctagnaccaagtgtacnancacctgaganngantgngtgcaaaaccnaacaagacatggaaatggcaagcaaggct

SEQ ID NO: 679723 - DNA, 770 bp, Homo sapiens
agtggggcggagggatattttagagttgcccctataaaatggggggccgttttccttcacaatataatacccccctccagaaagggtttatttttttaaaccaaaaattttggaattttaaccaaagaaaagaaaccttgtggtaattattcctggttgtccccacttttactaaaggacagtgctccaaattgataaagagcgagccaaatttctactccctttgtgctgtgtagaccccgctagtttcctgggcctattttaaaagctgtggtagaaatatggcccttagagaggaaaggcccgggtttcccttctggaaccatcatcttccaccagatgggcatatggcatgttagttgcctccaaatctcccctgcttcaaaagtcctccacctccacctccaacaaagagtaccttctttgagcatctctggagctttttcttcaatctgattctatctgtttttccctgctaggattcctcccagtttatggtccatgggaagattcctagtctagtctctgaatacatacatgtggatatatatgtatgaacatgggtgggcaaatatggatatggatgtatgcccacggatgtgtgtgtttctatcatttctaatgacctggaacaggggaaccctgtgtgtgcttagtcccccctcttgtaactctcagagcttagtttcaaataatgacataaaggagctgcccaaatggaaagcaaataaaaggcctataattaaaaccagtgtattatttcggctgta

SEQ ID NO: 679724 - DNA, 386 bp, Homo sapiens
gagagagatagagagagagagagagagcgagagagagagagacacttagagagacacccattctgccaccggtttttcacactgccctatgcctaacctccttcattctccccacacctgttacctacttttatctctccctccactcctttctttctttgttgcctacgcactttcttttactctttccctcccttgttgcccaccctgatctttctttttcctctcttcttgcatctggctcctccctttcctcatcactttgtctcctcctttacttctttttccccccttcctctttcggttttctcttttcatccattgtctcttatcttccccatccctctcctcttccatttcctttttctttctccctttccctcccc

SEQ ID NO: 679725 - DNA, 174 bp, Homo sapiens
cactgagtcgcgactgcttcagagagatgttcagatcattctggagagctgccacaaccagaacattcttggtaccatccttcatccaaatggcaacatcacagagtctccttctggaaggtaagggttcgcacgctgtgtggactctgtcgcattgcagattaacaccccggg

SEQ ID NO: 679726 - DNA, 140 bp, Homo sapiens
  misc_feature (28)..(28): n is a, c, g, or t
  misc_feature (104)..(104): n is a, c, g, or t
tgctgagcgagcccgccaaactcccctnccccccctcagtcctcgaccccccgcacctcgccccttccccaccccctcctccgcctcggtgcccggcgctgctnaggaccactatgaccatgagatccgcggtgttcaag

SEQ ID NO: 679727 - DNA, 168 bp, Homo sapiens
gtggtgagccaggctacaccctaagacaaacctacgccaaaatccatatcactatcatattcatcggcgtaaatctaactatctatacccacaacacttatctcggcctatcctggaatgccccgtacgtatactcgtgactcaccccagatagcatacactcacata

SEQ ID NO: 679728 - DNA, 817 bp, Homo sapiens
gtcagagcagtgtccatgtgcgtttctgtggcagcagtgccgtggggtgggtggggggtgcgtacggtggggcttgtggttaagatgtctctgcggtggtgttgtggggctggaggccgaagccagtgcacggcagataggaacactcacagagcgcatggaggaattactaccctattgacgaaaccaaggaatagccgcacgtctcctcacctgtgggacctccctgggagggtcagacaaaaaactaacaaagggcagcgagtcctcagtggctgcccgggagacaaccagatcagcatctcgggatctattcagactagcgccaaaaaagtctcactgcggacaagactcgccatcatgaccgcacctgtgggctcaggacactccttcccaatatggctcctcttcctctctttaaaattcaaagttcattcaaagctttggaaaacaaaaatatgacgcttaatgccacaaagtaaagacgggagtagtataactggaagtaaatatcattgaggcgcatttgaacatctgtgtaagaacccatcagaaagcgtagacgtcagtagacaatcaaagcaaggacccgagtggtgtagagctggggattgtgcctttcacatgaggcttgcgtataaatctttagggtcagagagtcttgtgacacagccccggtgcctaccaacatggcagcaaattacattgattggtgcctgtgcacctgaagtgaaccactccgtggaattgcctgaaattctccacaggggcaaagaccaggtcatctttcccgggcaagtcctacaagggcaagaag

SEQ ID NO: 679729 - DNA, 468 bp, Homo sapiens
tctcttagaggatccccgctgggcagcagacggtgcccagaaagagggtaaaaataagctcagaagatgcaaagtctgttcattttgagatccatgcacctcagtagtcctctagtgctatcaagtcctagtccagagagtaccttggttaaaccagagccgattggcataaccctccctggtatctcttcagatgtgccagagagtgcccacagaatccttcggaaggatactgtgggcagtggaagataaagtcctatttgcaactagcctttagttttcatgggaagagctttcacaggattcagcagatgcttcctgatccgacgattttgctgcctttgctttatattactattcttggaaaagctctcgctctaggacaagtttgatggatcgccaggctcttttaccagctcctatacattatctgggtgacagttattatgatttaccctaaacacatcg

SEQ ID NO: 679730 - DNA, 412 bp, Homo sapiens
gggggggagtgtggaggggggtgggcttttcccccaggttttttgggcccttttcctaagttggaaaagggggccagccccctccttaggggggggggggggggcttttgggcaaacccaaaaaccatggggattggggggggtggggggcacaaagggaagccccccccgcccctttctttaaaggggggttcccccaattggggggggtggggaggggaatggccccccccccgggggccgtgttgggtttatggggggcaagggcagccagggggggggggattttggggttggttccccggcgggggtggggggtttttggaatttttttccctttgaaatcctatttaagaattttgggggggttagcctttttttttttttaaaaaaaaaaaggcctttttcccca

SEQ ID NO: 679731 - DNA, 137 bp, Homo sapiens
gacggggggtgtctgcgtggtgaacgttggcgtcgcgacgtgcgcggttcgctgcgccttcgacccaggcgacgcatctgaatgtcatgccgaaacgggtttcgttggcgccgccgtacagctcgcccagaacacca

SEQ ID NO: 679732 - DNA, 1023 bp, Homo sapiens
ggggcatgcaagtagcccagcaccagttgtgcaaaagcatccagccatgtggcacagcatcaacagcaacagcagcatgcatagcatgcatgcaagcatggcagcatggcgcatggcagcatggcagcccaacttgggcacacagcacagcacagcacaacacagcacagcacagcaagcacagcagcaggcacccaacatcagttccaacaccagcaccgctccactccagatataccaatcatgtagcacactgtcatccttcacatgtgcttgtcatattccccaacagtgcacccaagcacatagcgcacaatcaccgcacgacacgccaccacacacagcatgtggcttgcacacgcagcatcgcctgtgggccaagcacactcaccacagatgcaacagcacacacaaggcacacagccatattcaggcattccaagggcccacagtgggcaaagccagcaatatttgggcacatgcaatatgataccgcaggcacagccttggcccagacacagacggaccaattctgacacgcacaaggtatcgaagcaccataccatccactgttcaacattaggcaagccttaggtgccagtcgcaaaagactccctatgacgggcaaattaggcaccacacaattgacaaattccaagcgacaccagtcactaggtgacaacacacaacgttgcaggggcacaagccaacctggatactcgcacacgcccacaacctgggtttacacaccttcaagctacactaggcagtcagaatttgggggacatttagcaccaacctggccacgcgcgggcaccgttggggacacaattatgaacgcccattacaccatggaggcaactaggttcgcccatcgcttccaaacgcatataaccttaatgggaatgaggcattggacccgccaattgtacagttacgtaattcgcccgtaaaaaaggagtgcctggaggatatggcacctacgaccacacgctccataggatcaactatcaacccaaaaga

SEQ ID NO: 679733 - DNA, 633 bp, Homo sapiens
aaaatgtatgtagtaattactacttttatattaaattatatgtaatttttaaaatatgccaatgcttaaataccatttgccagcaccttcttttaagttcagaaatagagtcagacataacctccaaaaagggaccaaataataggtcctgagtctgaaggagtggaagagctttacgattccaatggagacattcctgccgaaaacagaattcctagaattatcgaagctggttcacagggtcactctaggctttctaggcagatttccaggaggtacaactacgctccatcctgtattaccatcgtttcctcattcataaaatacaggtaataactgtacccacttcaaaggagagttatgaaatcatttaacatatacaaaacatttaaaatggtgcctggtaaatggaaagtactgtaaaagcttagctattttgtcgtcattcttttattactattatttttactactacaattattactatctttactactactactaccaccaccaccaatgctagcatcatttctaagactattgctactacagaaacaagcaggcaatagagtgtccctccctcatgtgaccattttccaaagagactatgtttgccaatttgacctcaaagaa

SEQ ID NO: 679734 - DNA, 974 bp, Homo sapiens
  misc_feature (944)..(944): n is a, c, g, or t
gagtcccaaaaagcctctcaggcacaacaaaccagcacagcaaggcagtgacaccaagattcccctcttcccgcggctcgccatgacgacccaggacagacttgcgcgcgtcaatgtgtattcctccatcatatgctgactcttgggcaactgcgtgcccgagatatttgtcaacaaaggatctggtttcggcgtggggtgaacactggcatgtgcacacacaccaaacgtcttgcaagtggctgtgccaatttcgcaacgtgccggtagcatctaagtacaggatcactgtggtaaagttacgtgggatgcttggagaccacaataccacagtggtgtgagtatggtctgactttcagcagaaacgtggaacagtgatcccaggtctggcaacagaaatcggaggtgtgaaagaccaggatgtgtcagaggtttgaaatggtgacaatttgatacctagcgttctcaggcagagcatcagggataacgaaggagggtggtagaatcaaagtcttcttacaaagagggagtgtattaagctgtggttgtgagtgtggacttggtgatgggtgctggactgcaatccgaatggtttcagggtgtcttggtcatgagggctggttgtggtggtaccaagatgagtgtgacaggggcagaatcaaaagttgacaggataacttgcagtggctaccggagatgggacttcaggtacttgctagtgtcactgtgggaccgatgggcgtcagttctcccacagtcggcgaccatctgacgttcagtaacttggtgcagtcagttcaatgccccgtgggtagcgtaataagcgatcccgggcccttggcaagagccactatggaggcgatcaccgggggggacccctcgggggggacatgggaaaaggcgcgggaaaacaggaacagggttttaggcaaaaagatatttantctccttacatcacccgactcgctgtgggg

SEQ ID NO: 679735 - DNA, 124 bp, Homo sapiens
ctagtttagaagtttcaatagcatgcagtagtacactctcagtgtctctggtcatctagtaaatataagttaaaaccacagtgaggcagctgactacatacctatggaaacttctaaaactagg

SEQ ID NO: 679736 - DNA, 322 bp, Homo sapiens
atacgaaggggggtgctttctagcgcctgctgatcggttgagatgatgaacaggtggcagtgatgtccctatcctcctccctgtatcccttcagttccatctctcctccaatcgttggggggggatgagtgcttcacaaggtcaaacaaacaatttttcagttgtaagtgcaatgacccgagtcctccacatgcccatgtgagctgtgtgctaaccttctcttcactgtgagaactgagtggtacttcagtgtccctccccctgtattgttgcaaggtaatgcggttgtatcagattaaacggagttgttttaatcaaccta

SEQ ID NO: 679737 - DNA, 364 bp, Homo sapiens
gagagaactagtatagggcagttgtttgcctttactgggcccttctgctgatagtgtcaaagatgttctgcttggggattacactggcgctacacgttggcaggacctgggacgctgcatatactgaggaacatgctagcaagcctgatcatgcccaaagacctaggtggagctgcttggtacagtcccatcatcagaggaagcagaacttttaagatgatgggacttatcttcatcatttcgacattagttaactacaccatgagctgctctagtagtggacatcccacatggctgcagaacgattggacactgccatgagtgggtacacataatgtcttgcttgcaggttacagcgctcctg

SEQ ID NO: 679738 - DNA, 155 bp, Homo sapiens
ctcaggatggattccctggttctctctaaagaggggctgcctttgtgcccaagaggtcttgcttgggcacagccaagagttgggagggcccggcccacagttacgcagtcctaaccacccagcccagggtgctcacgttaaccactcctgtggct

SEQ ID NO: 679739 - DNA, 996 bp, Homo sapiens
  misc_feature (224)..(224): n is a, c, g, or t
  misc_feature (703)..(703): n is a, c, g, or t
  misc_feature (776)..(776): n is a, c, g, or t
  misc_feature (804)..(804): n is a, c, g, or t
aattttaataaggttgtatgcatacagtgagcagccaaagtggtaggcttcctagatcgtgtctcaataggcactgaaatccaattcccctaaatcctaattccatttttctgtgtcatgttgcagctgcctcactctagtattctggatgtgatttggggtccaatgagatgcacttactaatatctgcagtgtacaatgcaggcagcagcagcgccagctanaagctgagctctggtagagttggattggatgtttacagtgacctacctcttcagtgtgatatttcctcacggtcatcagctacaggctgtgagacagcctgggggagacaggatagccatgtttcccactacctcccaaccactggctggtgcaccagcttcctggccttaggtcgcagccacagtgacgtgacctcctacaatccctggcaagctggaggagcagccctgcaaccaagcctgctctaagataaggctttctgtttactaacctggagctgctctattctttcacccttgttcccctttcagctgtctcgcgcaagtactaattttgccattaaatacgcattttgttttgcaaaatgagaagagcttataaatacttcaaattttctccgtctgtttcactcctttccatttctttctaaaattacagctaaaatattaactatacaaaatattgttgtatttatacnaaacaacaataccataaaataaaacactacatagttgaagccctctgaggatctctccatttcttccagcatnacgaatacctgaacttacgtctcttttncctttggcggtgctttaattttctacatctgaattttcttcccgttttacactttctgaatttccctgatacttttccgtgattgccttgccggttgtggacaccatggacggtaccccgagataagccgaaaacggggggttccacaatcggcttgatagataagggtccctaactggtctggaagggcag

SEQ ID NO: 679740 - DNA, 703 bp, Homo sapiens
ggtaaccggtgttgcccttcttcttctctctagctttgcttgttgcaccggtgtgatggacttggatgcacacgagagtgacgtggctcctcgccggagacattggggataagatcacactagaccctcggtgtggatcgcctgtgctcttatctctcccaccgtccgtcctaagatcatgtcacctaagtgactgagggaacagaatttgctgaacatgtgtagctgatgagtcagctgaaaattgtggcgactgacttcataccctatctggagacatactatgcacagactgccactctacgcgatacctatggtgaaacggctgactgctgtgcagaacatgatcctgagagaaatgaatgcttcttgcatcacatatatgacaacccatacctccctcgattggcgagaccaaaagtagatgtgatgcgcgctgcttttcatgacagtgaatagacgttgctgacatgatgcttatctgaaattgccagaggacgtccttacttttatgacccggaactccttctctttgctagaaggcataaagctgctgttacagaatgctgtcaagctgctgataaagctggctgcctgtggccaaactctatgatcttctgcatgtacggatggcttggactgcaaacagcacttaagaggggcagctccatcggggacttgcgcatgtgcttgctgcctggcc

SEQ ID NO: 679741 - DNA, 113 bp, Homo sapiens
tgatccttagcgcgacgcttccatcaagtgtctcacccttatccatgggcacacacattcctttaatgagggttaatggtctggtatgagagtctgatggaagcgtcgcgcat

SEQ ID NO: 679742 - DNA, 325 bp, Homo sapiens
  misc_feature (250)..(250): n is a, c, g, or t
  misc_feature (270)..(270): n is a, c, g, or t
  misc_feature (310)..(310): n is a, c, g, or t
tttttttgtgttcaaaatagttacaagatgtcagcagagagattgacatcattaactatattttatagatgaggaaactgaaattcagagtttctcaaattatactgctagtagagaatggacttgcactgtagaccagggtattcatttgagtccttgaaccttttaggcatcagggaaactccctaggaagtacatggaaatgtttgtgtattaaggactatggcagggtgcatttttttttttcccngaggaaaagggatacaaatncatgtggattttatccaggttttccaagggagtctgtggnccctaaaaccattac

SEQ ID NO: 679743 - DNA, 214 bp, Homo sapiens
ggattttttacttatttcggttttggaatccccccccagattcccgggcccctttggaaaaattctttattcctttgcctttttaaaaaaaaattttgtttcctatttaaagcccctggattaggccatgtttcgtgttcccccttatttgaaccctttgcccctcccaaaaaaaaaaaacctgtttgtgtttttaataaaactgatgtaggga

SEQ ID NO: 679744 - DNA, 145 bp, Homo sapiens
gtcaaagtgaagaaattcaatgaagcgcgtgacccggccaagtacttcattcgagatgagtttctgaggatcagcacttccagttgagattggcgtcactacttctaccctcatttcacctctcgctgtggacacttagaacata

SEQ ID NO: 679745 - DNA, 960 bp, Homo sapiens
  misc_feature (16)..(16): n is a, c, g, or t
  misc_feature (75)..(75): n is a, c, g, or t
  misc_feature (142)..(142): n is a, c, g, or t
  misc_feature (235)..(235): n is a, c, g, or t
  misc_feature (254)..(254): n is a, c, g, or t
  misc_feature (275)..(275): n is a, c, g, or t
  misc_feature (283)..(283): n is a, c, g, or t
  misc_feature (292)..(292): n is a, c, g, or t
  misc_feature (294)..(294): n is a, c, g, or t
  misc_feature (296)..(296): n is a, c, g, or t
  misc_feature (306)..(306): n is a, c, g, or t
  misc_feature (311)..(311): n is a, c, g, or t
  misc_feature (314)..(314): n is a, c, g, or t
  misc_feature (394)..(394): n is a, c, g, or t
  misc_feature (399)..(399): n is a, c, g, or t
  misc_feature (435)..(435): n is a, c, g, or t
  misc_feature (465)..(465): n is a, c, g, or t
  misc_feature (477)..(477): n is a, c, g, or t
  misc_feature (493)..(494): n is a, c, g, or t
  misc_feature (500)..(500): n is a, c, g, or t
  misc_feature (608)..(608): n is a, c, g, or t
  misc_feature (627)..(627): n is a, c, g, or t
  misc_feature (629)..(629): n is a, c, g, or t
  misc_feature (650)..(650): n is a, c, g, or t
  misc_feature (663)..(663): n is a, c, g, or t
  misc_feature (667)..(667): n is a, c, g, or t
  misc_feature (675)..(675): n is a, c, g, or t
  misc_feature (677)..(678): n is a, c, g, or t
  misc_feature (688)..(688): n is a, c, g, or t
  misc_feature (691)..(691): n is a, c, g, or t
  misc_feature (696)..(696): n is a, c, g, or t
  misc_feature (869)..(869): n is a, c, g, or t
  misc_feature (890)..(890): n is a, c, g, or t
  misc_feature (958)..(958): n is a, c, g, or t
cgaatttcccgaccancctgattcgctagatttttttaaggaaaagcttgaaagccaggacacaacgctgctgcntgctttgtgcagggtcttccggggctcagccctgagttggcatcgcctgcgcagggccttctggcgntcagccctgagctagtgtcacctgcacagggccctctggggctcagccctgagctggcgtcacctgtgcagggccctctgggctcagccctgngctggcctcacctggttcnccaccccgggatctcttgccntgccctcntgcccgccntncntcctgcctgngcagntcnttccctaggtacctctgtgctgcgtcccaccagcctgagcaagacgccctctcggggcctgtgccgcactagcctccctntcctntgtccccatagctggtttttcccaccaatcttcacntaacagttactttacaattaaactcaaagnaagctcttctcntcagcttggggcagcnnttggcntctgtctcgttttgggaaaccaaggtcaggaggccgttgcagacataaatctcggcgactcggccccgtctcctgagggtcctgctggtgaccggcctggaccttggncctacagccctggaggccncntgctgaccagtactgaccccngacctcagagagnactngcaggggngnntggatgactnaanacccntcgagattaacggtgctaaccccgtctgctcctccctcccgcagagactggggcctggactggacatgagagccccttggtgccacagagggctgtgtcttactagaaacaacgcaaacctctccttcctcagaatagtgatgtgttcgacgttttatcaaaggccccctttntatgttcatgttagttttgcnccttctgtgtttttttttgaaccatatccatgttgctgacttttccaaataaaggttttccctccccnaa

SEQ ID NO: 679746 - DNA, 295 bp, Homo sapiens
ctgaggaggcctcagaatcatggcaggaggcaaaaggtacttcatacgtggtggtggcaagagaaaatgaggaagaagcaaaagcagaaacccctgataaacccatcagatctcatgagacttattcactatcatgagaatagtatgggaaagaccgccccccgtaattcaattacctgcccctgggacccttccacaacatgtggaaattatgggtgacacaattcaagttgagatttgggtgtggacacacagaaactgtatcacatatgttcaataaaataagtaaattcca

SEQ ID NO: 679747 - DNA, 220 bp, Homo sapiens
cgattcttgccctagtcagagactatagcagcccccagacgtgaaccaattggccatctccagaaagtttaacaaaacccgaccaggttgcccccttcactttcttacaacctcttccccttccccaggggctctgctcctcactccagatcatcctttagtttagagctgcgcagtgaagtggatatcactgaaggagataggacgccagactacactg

SEQ ID NO: 679748 - DNA, 110 bp, Homo sapiens
tgctggggtcttgtctggtttcttgtgctggatggacactgctcaaggccacactggtgggcagtggaagcctggctctgtgtggtagggatgtactgtgacacacaatg

SEQ ID NO: 679749 - DNA, 144 bp, Homo sapiens
tggggggggggaaaaaaaagtcctctccaggcttgcagaacccttgtgggtcagagttgtttacttttggtaattaatgtacctgaactctgctggaacgctctctcgcgtttcagaaagcgctgtttgggctattgtacagtc

SEQ ID NO: 679750 - DNA, 449 bp, Homo sapiens
  misc_feature (25)..(25): n is a, c, g, or t
aagcttggcacgaggctgaaggtcnaaaggccattaatcagttaaaacaagccttgcttaaagcaccagcccccagtctttctgtagggaagtcctttaatctttatgtatcataaaggaaaggaatgaccctgggagttttaattcaagttcaaggcccagctcaacagccagtaggttacttaagtagagagcttgacttggaggctaaaggatggccagcttgcctctgagcagttacagtagtggccctgctagtcccagaggccaccaagttaaccctggggaataacctgtttatgcctcacataaataatgtggcaggcttgctgtcctctaaagcgagtctctggctaacagacaggtggctcctcaagtatcagactttggtgctagagggaatcttgcagtccaggttaaaaacctgaccttggcctgatccccagaca

SEQ ID NO: 679751 - DNA, 447 bp, Homo sapiens
ctttacctcgttcggcaattccatggggacgagataaagtcggaaaatgacacaaggcaaagaatcgtctatacacgcctaatcatgagtagagacaaagcgacgtgttcaagcagtaagtcctctcaatgaaaataagaaggaactattacttttgtttggtttgggaaacggatgtggcagatatgttgctggaagtagcactgcgggaggttaagtttaactattcaggatggacgaagcaaggggcaaggtctgcagccataaacttagcaatgatagttccatggcaacagttctttggagtgattgggctgtttaccctagcatcattcaagccggcttatctagctctctgaaatattctgtaagctacctaaaagtttaaataaagtatctgtctgttaaactaactagggtgggtttaacagacaaggtagagccgag

SEQ ID NO: 679752 - DNA, 425 bp, Homo sapiens
agcaggatctccccagctactcaggaggcaggtatcagtctgcttgaactgagtactctgtatggcaaaggaactgatatattcatcctctgtaaatggtatcccaagaaagggaggcatccctgattctgtgggagaagcagccatatttaaccacaactacgttgcccatatactcaaagtagcaagcatacttctcagatatagcttcaactatattggagcttcacaaaaacaaaatctatagtatgctttggatttaatatgctttaactttttttttttgttttttttgaaatggagtctcgctttgtcgcccaggctggagtgcagtggcgcggatctcagctcaccacaagctccgcctcccaggttcacaccattctcctgcctcagcctcctgagtagctggggggtacccgagc

SEQ ID NO: 679753 - DNA, 1309 bp, Homo sapiens
  misc_feature (863)..(863): n is a, c, g, or t
agcggagtcgacggtgccaactctcgcactctgttcttccgccgctccgccgtcacgttgtctctgccggctcgcggatggatacgaagagatcgccgaagctggatcatatgacaaatggcatccggcatgtgcaaacgcttggtattcgctggtgagacgacgctccccgagccggtgtttccgttccagtccgtctggacgcaccctataacaaccatgggggtcaatgactggagtattggcgtacatgaacggagctccatacgatgtcgcagatcgaagagcaccaagaagactacgaccgtggagctattcgcatagtagccccttgcaaaagattatcgccagtattatgaaagaccaattggggcatccagatgcgatccccataacttgtgcgcacacagcagccatttgcgccatggagaggaaatacgtcgggtcatcctagccaagctcctattccttatccacattctggatgacgtaggccggaccgattgggaactcgccccagagtaagtgtatggcaatcgccaccaagattggccttggacttggaagccgaaggggcacacacacccctggagagcgctccgcgaaaggcacgcatatacaggtaaggacgcaaaggactgcaacctgcaggtactttacctgcttggtgacggacaccatatcagaaacaagcctcgcgggctccacatgcatatgcgtttgtgtcacacttcgccaagtggaccccgatgtaacctggtaacctcttcatagcgtaccatcttgcgcggtcggcaacacaatttagtggacactttgtcctatgagggatcttctgggcgacagaaccggggtgtgccacnccacaaccagtcgagatttgacttcccaaattcctgaatcctgagaagtgagagctgtaaccgccaccctttcacccccgacaaagtgtccctaatacccttggtctgattcctagtgagacttcttggggccttggagggccccgtggggagccctttggtaaccctggaccctctatccttgcctaattgtaaaatagaattccctttccactttgtaggcctcaacgggtctttacgaggttttgcaaccccaagcgcacacgggctgccggaaaccggggaggaaacatcctgtgttggccggctgtaaacagttccacaaggggtgaccgcacaatcccgtttgttggccttaccggttctgcctcacttgtgtgacttttccgcatcctatggcaaaaattgtggcgccacacccgaacccggggtttccgtttccctgc

SEQ ID NO: 679754 - DNA, 304 bp, Homo sapiens
ggggacttgcctttgtctacagtccatggtttctgtattggctcaagccttgaaatcttgaaacaagcctaaattaaaattttctcttagcttaagaaaaaaagttacatattgtcaagacccttatgtgtgtggtcattaaaaggtcttgatattagaggatacagcaaattgtttcttatccacacagctttgctttcagtgtctttgtggtggtttcgtagtcagtggtacacttcacactctccataggcatatatattgtggcacactgttatacacaggctgctgggtcatctataat

SEQ ID NO: 679755 - DNA, 787 bp, Homo sapiens
  misc_feature (673)..(673): n is a, c, g, or t
  misc_feature (690)..(690): n is a, c, g, or t
  misc_feature (718)..(718): n is a, c, g, or t
  misc_feature (747)..(747): n is a, c, g, or t
gtggcaaagttactactggaaaaacactataagtacaaagtttttggggttttatctttgctttagaagtggatgtgtacttcacctcttggctgtggaggaacttagttgccaggaaatttttttttttttttccaaacggagtttcgctcttgttggcccaggctggggagggcaatgggcaccgtctgggctcacttgcaacctccgcctcccggggttccagcgattctcctgcctcagccttccgagtagctgggattacaggctcctgccaccacgccgtggctaggaaatttttggtggttaatatgacatttgggattaatctccagtttcaacagtacttctttggtccataaatctcaggaatgtttaaggcagaaaacgggtttaacccgtgtggataatcagaaggagtgtgcttaaggattaatggcataatactatccttaaatggcaatcctaggtatctatagcatgaggtggccttagggagttggtggaagtgcccatgtttttccaagagtaaaattttaagattaaaattttatcctatatatagatttctagaaaactgggttgggggtcgcacagttaaagtgtgggatcactaaataaccatggcgggtaccgtttggtgtaaccttactcattcggatatatccctttnatggggaaggatctttngccagggtaactaaaacttttcagtccnacttcatgatgggaactgactgcacgttnattacatattaccaggtcagcactaattttatactttata

SEQ ID NO: 679756 - DNA, 274 bp, Homo sapiens
ggttttaagccaaaaagcaggtcccccatgggggtccctttttttgccctgccctttcagcttgtgagccacccgggggccttttttggtttgttgatatgctagatttgggccgttaatgggcttggtttttcagcctgaggggggttggtttttgggttcctgtagtcccaggggggaaaagcttttttaaaaatggccatgtttgggggggtgggggggggggtaaatttttagtttttggtaggggcgggaataaaaaaattccttctta

SEQ ID NO: 679757 - DNA, 115 bp, Homo sapiens
  misc_feature (31)..(31): n is a, c, g, or t
  misc_feature (60)..(60): n is a, c, g, or t
  misc_feature (83)..(83): n is a, c, g, or t
ctttcctcctgtccacaatggccccggctcnttctacccatccatgtttctacctccagnactggggggattgacgctgcctngggttcccagcattggcaaggacttcagaatg

SEQ ID NO: 679758 - DNA, 245 bp, Homo sapiens
  misc_feature (24)..(24): n is a, c, g, or t
  misc_feature (198)..(198): n is a, c, g, or t
gcgtacggacacacgcacggagangggagcttggcgcacaggctctgccccacactaggggcaagaagaggagcagacctgagaccccgcgagatggtcgcctcttccgccctgtcctcccacctatatctcgaacctcttggtcccgcataagctgattcctctactgggagtgttcttcactttctcatcctgggnaacccagaccagcccttcaagaatccacccttctccggtggcgtggt

SEQ ID NO: 679759 - DNA, 781 bp, Homo sapiens
  misc_feature (435)..(435): n is a, c, g, or t
gagaaaacactctggatcttatatggagaatgacattgattctcctgtccttgtacatgtacctgactggggtcattgtgtaagacttattattttatcctgaaaccttaaatatcaaacctctgcatctctgatcccttccttgttaaaagttaccagggttggccaggcgcggtggttcatgcctgtaatcccagcactatgggaggccgagacgggcggatcacgaggtcaggagactgagaccatcctggctaacacggtgaaaccccatctctactaaaaatacaaaaaccaaaaaaaattagccaggcgcattggctcatgtctgtaatcccagcactttgggaggtcggaggggtgggggaggatcaccgagtcaggagatcgaaaccatcctggccagcatgatttatccctatctctactgaaaantcaaaacattattcgagcatggtggtacaacgccttaggaccaactactcaggaggctgaggtatcgaaatcgctttaactcaggaggcatatgttgaaatgagtcaagtttgtgccaatgcacttctaccatggtgacagaagcaagaacctcttaataagggaagatgtgcccatgggttaaaaaaatccggttttaaagtccattgatgcaataggttgccttttagtacattatatgggaaccctaacttgtttaactggtttgaacgttttccggttaaagtaagttatcgtaataatcaacttactttcctcaaaggcatttgttaatgcttcttaatta

SEQ ID NO: 679760 - DNA, 856 bp, Homo sapiens
ggcgacacgtgagtctagggagcgagaaggagaaggagtgggatgctgctcgagtgcgatgcgagataacaccgtcgagctcgcgagacttgagagctctaggccccggaatggctgatggagcccgacagctcggatctgatgctgcggcccaggcccaggctgccttgagctgcgactgtgtgcctgcaggcctattgcccggatatccggtggatgcgagtgcatagatccagctgcagcatgcatcttcacgaactcggtggggaacgggatgcagatatatttaattatcattataccacttcacatttcacataaattccatttccaaactatccttccttttccattcaccacatatacttacatttacatttattatataatataaacgatgaagaaaaaaaaaatggagacatctgcgaatccccaaaagagaagcgaaaaagcgcagcagcacaccgaaaccatggagcacacaacaacctaccagcgcccggtacatacaacgaggaaaagtccatcgcgtgcacacctcgaaaagtgctcgaggaaagagataatgaggactaaataaacaggagatattttggaaaaacaaacaatctcgggggggaacaaattacaataagggatcttataaaagatagaaaaaggagttattacgagaaaaaataagggatgaggggagttaagaataaaaaaaaggctatagaatacaaaaaaatacagagggagcgcaattagaggtaagcgagaaaagtggagtgtaaaaaaaaataagggagatagaaaaaaaagaggtgagtatgggaaagatatagaaaggataagaattagagggatagaagag

SEQ ID NO: 679761 - DNA, 130 bp, Homo sapiens
tcgtaataatttagtatgctgggaatggaatagaacagatgtggttaatatcttctacttatacttctcatacaaagtgctgggtttacagacatgagccaccactcttggcctttatttacttattttt

SEQ ID NO: 679762 - DNA, 232 bp, Homo sapiens
cgggataacacttaacagatcaaaggaagcagtcccagagccatgcgggtggctctacctttccagatctttctcatggtgccaggtcacctccagaccagcgggccttttatttattattattatttttttggagacggagtctcactcggtcgcccaggcgggagtgcagtggtaccatctgggttcacggcaacctcggcctcccaggctcaagtgatggttcccggcg

SEQ ID NO: 679763 - DNA, 116 bp, Homo sapiens
taacctggtgacacacgggtgtcacgaccggcgctgttcttactggacgacgggtacggggggggacggggacgcctaccgttccacgtcgcccctgtatgggacttgtctcggga

SEQ ID NO: 679764 - DNA, 840 bp, Homo sapiens
  misc_feature (454)..(454): n is a, c, g, or t
tttcaagtgtcgcagtttccttataatgacccccatctccctgaaagggcaggtgccgcccgctaggtaatggcaaaagatgtctcatttgaaaatactgtgccctgatggaaggtttgtgcccaattgctggaaggcccccttcccaaggaaaagtactcgtcgagaaccagcgtttggggttcctccctcgcttgcagaggaactccacgttttccccgccagtgtgtgttttgacctcagtagttcacaccgtgcacagatcgtggaactcagcgagaaaggccaagtctctgtggcctcggaagacccagaattccagaaaattgggatgtctctgctatttggtgtgggcgttcccacaaaagtgggatgagactcatctggtggcagagagggctatttctcttcctctcacacgttttttgtgccccatgtccgtctgggacacatntcccaggtgagttgagacaacttgcgcagtctccatgagaagggtcctagagaggtgagacgtctctctcaccaggaggaagggagaataaatctcctgagatgtccccaagtaggggacacacccccggtgccttttatgcaaaaagtgtgcgcccctcccaggaatatgtatgggcggtgtgccccaccaaaagtatgttgtgtgtgccctccattgggggagtcaacttggccccgtaaaattttgctatccaaacagcaaaggggtcactcctttggggccagcggtccaagccaaagggctcccttgtggccttgggggcccaaggcacgccagggcctggttaccatttcattccattctccctcctgcaggagcaaggg

SEQ ID NO: 679765 - DNA, 144 bp, Homo sapiens
gtggacctgtcgtgtggcagcgacctcccggttcaattcttcagtccggctggtgcaccaggcttcagcatccttccggttctgctcgcgcatgccctcatattggcttcgcatgtcactcaggatcttggcgcgatcggtgcc

SEQ ID NO: 679766 - DNA, 941 bp, Homo sapiens
tttatgtattcttactctagttgtttattaagaatgacaagcacgtcttttcaacatgttagtgaacaacgtctctttattttggggaggagcccggcgggacagtagaagtaaacccttgcctgttaattgaactggccgaggtcctgcggggagtgtggggtgggacgtgaagtggcagctcctcagtgacaaggccactatgtgctatacgcatgcgctgtttcttcagcgccagctccgcccccgccgcagcgaggcgggtaggttccgcccgcgcgcactacgccctgacgtcagcgtcgcgcgcagcgcagtgacgaaatcggctggtttatattggcgcggcccagacggcagaggtctctgcggcgcggtcctcggagacacgcggcggtgtcctgtgttggccatggccgactacctgattagtgggggcacgtcctacgtgccagacgacggactcacagcacagcagctcttcaactgcggagacggcctcacctacaagtgcgggcctatggggctcacctgggcgaagagaggggcggcaccctggggaaaaggccagatgggggcttccgagagccgccttgggcgtgggcgtgggggacaggtttcgggaattggccacccacctccggggctcactttgagacatctggagcggtgcttggggtacggagaagcatctcagtagtgcttggaatctcaggccggagattccatgctccagacacatggaattgtcagggtgccaggagcactgatgacagctcggtggcagaaaaggtcccctgtacccatttccaccttgtgctgtgcctgtgacacacagactctgtcagtgccactctctgctcacatgcgttacgggttgattggtacatggggatggagtctcatgctgccctaagctgagagctttactcccaattcac

SEQ ID NO: 679767 - DNA, 1012 bp, Homo sapiens
  misc_feature (25)..(25): n is a, c, g, or t
  misc_feature (959)..(960): n is a, c, g, or t
  misc_feature (962)..(962): n is a, c, g, or t
  misc_feature (965)..(967): n is a, c, g, or t
  misc_feature (977)..(977): n is a, c, g, or t
  misc_feature (979)..(979): n is a, c, g, or t
  misc_feature (984)..(986): n is a, c, g, or t
  misc_feature (991)..(991): n is a, c, g, or t
taggctaggtacgaggctggcgtgngaatcggccgagctcggagacacgcggcggtgtcctgtgttggccatggccgactacctgattagtgggggcacgtcctacgtgccagacgacggactcacagcacagcagctcttcaactgcggagacggcctcacctacaatgactttctcattctccctgggtacatcgacttcactgcagaccaggtggacctgacttctgctctgaccaagaaaatcactcttaagaccccactggtttcctctcccatggacacagtcacagaggctgggatggccatagcaatggcgcttacaggcggtattggcttcatccaccacaactgtacacctgaattccaggccaatgaagttcggaaagtgaagaaatatgaacagggattcatcacagaccctgtggtcctcagccccaaggatcgcgtgcgggatgtttttgaggccaaggcccggcatggtttctgcggtatcccaatcacagacacaggccggatggggagccgcttggtgggcatcatctcctccagggacattgattttctcaaagaggaggaacatgactgtttcttggaagagataatgacaaagagggaagacttggtggtagcccctgcaggcatcacactgaaggaggcaaatgaaattctgcagcgcagcaagaagggaaagttgcccattgtaaatgaagatgatgagcttgtggccatcattgcccggacagacctgaagaagaatcgggactacccactagcctccaaagatgccaagaaacagctgctgtgtggggcagccattggcactcatgaggatgacaagtataggctggacttgctcgcccagctgtgtggctgtcggggttggctcttcccaggaaatccctcttcccgatcaattgttcacagttcttcaaacaaatcccattccaatttgggcnntnggnnnggtgccggcnanccttnnnggggngccccgggcgggagggcccct

SEQ ID NO: 679768 - DNA, 771 bp, Homo sapiens
gagtatgggatatcgtcgaccacggccgtcgctgaccatgaaggacagcaaccactaatctccaagtcattggaggcaatgtggtcactgctgcccaggccaagaacctcattgatgcaggtgtggatgccctgcgggtgggcatgggaagtggctccatctgcattacgcaggaagtgctggcctgtgggcggccccaagcaacagcagtgtacaaggtgtcagagtatgcacggcgctttggtgttccggtcattgctgatggaggaatccaaaatgtgggtcatattgcgaaagccttggcccttggggcctccacagtcatgatgggctctctcctggctgccaccactgaggcccctggtgaatacttcttttccgatgggatccggctaaagaaatatcgcggtatgggttctctcgatgccatggacaagcacctcagcagccagaacagatatttcagtgaagctgacaaaatcaaagtggcccagggagtgtctggtgctgtgcaggacaaagggtcaatccacaaatttgtcccttacctgattgctggcatccaacactcatgccaggacattggtgccaagagcttgacccaagtccgagccatgatgtactctggggagcttaagtttgagaagagaacgtcctcagcccaggtggaaggtggcgtccatagcctccattcgtatgagaagcggcttttctgaaaagggatccagcacacctcctcggtttttttttcaataaaagtttagaaagaaa

SEQ ID NO: 679769 - DNA, 878 bp, Homo sapiens
cccacgcgtcgatgatgggctctctcctggctgccaccactgatgctggcctgtgggcggccccaagcaacagcagtgtacaaggtgtcagagtatgcacggcgctttggtgttccggtcattgctgatggaggaatccaaaatgtgggtcatattgcgaaagccttggcccttggggcctccacagtcatgatgggctctctcctggctgccaccactgaggcccctggtgaatacttcttttccgatgggatccggctaaagaaatatcgcggtatgggttctctcgatgccatggacaagcacctcagcagccagaacagatatttcagtgaagctgacaaaatcaaagtggcccagggagtgtctggtgctgtgcaggacaaagggtcaatccacaaatttgtcccttacctgattgctggcatccaacactcatgccaggacattggtgccaagagcttgacccaagtccgagccatgatgtactctggggagcttaagtttgagaagagaacgtcctcagcccaggtggaaggtggcgtccatagcctccattcgtatgagaagcggcttttctgaaaagggatccagcacacctcctcggtttttttttcaataaaagtttagaaagaaacaaaaaacaaaacaacaaaaaaaacaaacacacaacaaaaaaaaaagcaacacaaaaaaaaaaaacgcgagagaacacatacgcgggagcagcacacagcgaggggcacacgagggagacagcagagaaacggagggcagggcccacgacgtgagcgaacacgcggggacccacagcgcggaacccaaaacaggggagcggcccgacgagcagagaaaagcaggggcgacccgggacacct

SEQ ID NO: 679770 - DNA, 411 bp, Homo sapiens
atcagcgacccatgagggacctcaagagaccgagatcgcaataacgcgcaagaggatcgcaacaaaccggccagcggactctagagggataaatgctcaacgtataagagcgatcggctgtccttagaggtggaggcattccggctatgcatttgcggaggtctgcgacctactaaagacggtcagagtgtcgtcctctacctcttccatcctcatgaccgaggcccgtaacatggttcaggtaggtaacccttgcactgagcgagagtcgtagttccagtcaagcatcagtagagagggatcgtctacatcccgtggatcctcaaagtccagagaaccaaagcctcgttacagatcaatatctcgttatccgtgcatatgccttgaagaatcgtgccacgtactactgcc

SEQ ID NO: 679771 - DNA, 2012 bp, Homo sapiens
tttatgtattcttactctagttgtttattaagaatgacaagcacgtcttttcaacatgttagtgaacaacgtctctttattttggggaggagcccggcgggacagtagaagtaaacccttgcctgttaattgaactggccgaggtcctgcggggagtgtggggtgggacgtgaagtggcagctcctcagtgacaaggccactatgtgctatacgcatgcgctgtttcttcagcgccagctccgcccccgccgcagcgaggcgggtaggttccgcccgcgcgcactacgccctgacgtcagcgtcgcgcgcagcgcagtgacgaaatcggctggtttatattggcgcggcccagacggcagaggtctctgcggcgcggtcctcggagacacgcggcggtgtcctgtgttggccatggccgactacctgattagtgggggcacgtcctacgtgccagacgacggactcacagcacagcagctcttcaactgcggagacggcctcacctacaatgactttctcattctccctgggtacatcgacttcactgcagaccaggtggacctgacttctgctctgaccaagaaaatcactcttaagaccccactggtttcctctcccatggacacagtcacagaggctgggatggccatagcaatggcgcttacaggcggtattggcttcatccaccacaactgtacacctgaattccaggccaatgaagttcggaaagtgaagaaatatgaacagggattcatcacagaccctgtggtcctcagccccaaggatcgcgtgcgggatgtttttgaggccaaggcccggcatggtttctgcggtatcccaatcacagacacaggccggatggggagccgcttggtgggcatcatctcctccagggacattgattttctcaaagaggaggaacatgactgtttcttggaagagataatgacaaagagggaagacttggtggtagcccctgcaggcatcacactgaaggaggcaaatgaaattctgcagcgcagcaagaagggaaagttgcccattgtaaatgaagatgatgagcttgtggccatcattgcccggacagacctgaagaagaatcgggactacccactagcctccaaagatgccaagaaacagctgctgtgtggggcagccattggcactcatgaggatgacaagtataggctggacttgctcgcccaggctggtgtggatgtagtggttttggactcttcccagggaaattccatcttccagatcaatatgatcaagtacatcaaagacaaataccctaatctccaagtcattggaggcaatgtggtcactgctgcccaggccaagaacctcattgatgcaggtgtggatgccctgcgggtgggcatgggaagtggctccatctgcattacgcaggaagtgctggcctgtgggcggccccaagcaacagcagtgtacaaggtgtcagagtatgcacggcgctttggtgttccggtcattgctgatggaggaatccaaaatgtgggtcatattgcgaaagccttggcccttggggcctccacagtcatgatgggctctctcctggctgccaccactgaggcccctggtgaatacttcttttccgatgggatccggctaaagaaatatcgcggtatgggttctctcgatgccatggacaagcacctcagcagccagaacagatatttcagtgaagctgacaaaatcaaagtggcccagggagtgtctggtgctgtgcaggacaaagggtcaatccacaaatttgtcccttacctgattgctggcatccaacactcatgccaggacattggtgccaagagcttgacccaagtccgagccatgatgtactctggggagcttaagtttgagaagagaacgtcctcagcccaggtggaaggtggcgtccatagcctccattcgtatgagaagcggcttttctgaaaagggatccagcacacctcctcggtttttttttcaataaaagtttagaaagaaa

SEQ ID NO: 679772 - DNA, 2259 bp, Homo sapiens
tttatgtattcttactctagttgtttattaagaatgacaagcacgtcttttcaacatgttagtgaacaacgtctctttattttggggaggagcccggcgggacagtagaagtaaacccttgcctgttaattgaactggccgaggtcctgcggggagtgtggggtgggacgtgaagtggcagctcctcagtgacaaggccactatgtgctatacgcatgcgctgtttcttcagcgccagctccgcccccgccgcagcgaggcgggtaggttccgcccgcgcgcactacgccctgacgtcagcgtcgcgcgcagcgcagtgacgaaatcggctggtttatattggcgcggcccagacggcagaggtctctgcggcgcggtcctcggagacacgcggcggtgtcctgtgttggccatggccgactacctgattagtgggggcacgtcctacgtgccagacgacggactcacagcacagcagctcttcaactgcggagacggcctcacctacaatgactttctcattctccctgggtacatcgacttcactgcagaccaggtggacctgacttctgctctgaccaagaaaatcactcttaagaccccactggtttcctctcccatggacacagtcacagaggctgggatggccatagcaatggcgcttacaggcggtattggcttcatccaccacaactgtacacctgaattccaggccaatgaagttcggaaagtgaagaaatatgaacagggattcatcacagaccctgtggtcctcagccccaaggatcgcgtgcgggatgtttttgaggccaaggcccggcatggtttctgcggtatcccaatcacagacacaggccggatggggagccgcttggtgggcatcatctcctccagggacattgattttctcaaagaggaggaacatgactgtttcttggaagagataatgacaaagagggaagacttggtggtagcccctgcaggcatcacactgaaggaggcaaatgaaattctgcagcgcagcaagaagggaaagttgcccattgtaaatgaagatgatgagcttgtggccatcattgcccggacagacctgaagaagaatcgggactacccactagcctccaaagatgccaagaaacagctgctgtgtggggcagccattggcactcatgaggatgacaagtataggctggacttgctcgcccaggctggtgtggatgtagtggttttggactcttcccagggaaattccatcttccagatcaatatgatcaagtacatcaaagacaaataccctaatctccaagtcattggaggcaatgtggtcactgctgcccaggccaagaacctcattgatgcaggtgtggatgccctgcgggtgggcatgggaagtggctccatctgcattacgcaggaagtgctggcctgtgggcggccccaagcaacagcagtgtacaaggtgtcagagtatgcacggcgctttggtgttccggtcattgctgatggaggaatccaaaatgtgggtcatattgcgaaagccttggcccttggggcctccacagtcatgatgggctctctcctggctgccaccactgaggcccctggtgaatacttcttttccgatgggatccggctaaagaaatatcgcggtatgggttctctcgatgccatggacaagcacctcagcagccagaacagatatttcagtgaagctgacaaaatcaaagtggcccagggagtgtctggtgctgtgcaggacaaagggtcaatccacaaatttgtcccttacctgattgctggcatccaacactcatgccaggacattggtgccaagagcttgacccaagtccgagccatgatgtactctggggagcttaagtttgagaagagaacgtcctcagcccaggtggaaggtggcgtccatagcctccattcgtatgagaagcggcttttctgaaaagggatccagcacacctcctcggtttttttttcaataaaagtttagaaagaaaaaaaaaaaaaacaaaaacaaaaaaaaaaaaaaaaaaacacaacaaaaacacaacaaaacaaaacaaaaaaaaaaccacggggagcccccagcggggggggcacacagcgctacacgggcgccgacgcggtaaaacagtggtctcagaagaccacctttgtgtacgaacgagtggatatagcggggtcccaaaaagggggacaacatatgtcagaaagcgcagaccgctatagcccacagcaaaaggt

SEQ ID NO: 679773 - DNA, 2489 bp, Homo sapiens
tttatgtattcttactctagttgtttattaagaatgacaagcacgtcttttcaacatgttagtgaacaacgtctctttattttggggaggagcccggcgggacagtagaagtaaacccttgcctgttaattgaactggccgaggtcctgcggggagtgtggggtgggacgtgaagtggcagctcctcagtgacaaggccactatgtgctatacgcatgcgctgtttcttcagcgccagctccgcccccgccgcagcgaggcgggtaggttccgcccgcgcgcactacgccctgacgtcagcgtcgcgcgcagcgcagtgacgaaatcggctggtttatattggcgcggcccagacggcagaggtctctgcggcgcggtcctcggagacacgcggcggtgtcctgtgttggccatggccgactacctgattagtgggggcacgtcctacgtgccagacgacggactcacagcacagcagctcttcaactgcggagacggcctcacctacaatgactttctcattctccctgggtacatcgacttcactgcagaccaggtggacctgacttctgctctgaccaagaaaatcactcttaagaccccactggtttcctctcccatggacacagtcacagaggctgggatggccatagcaatggcgcttacaggcggtattggcttcatccaccacaactgtacacctgaattccaggccaatgaagttcggaaagtgaagaaatatgaacagggattcatcacagaccctgtggtcctcagccccaaggatcgcgtgcgggatgtttttgaggccaaggcccggcatggtttctgcggtatcccaatcacagacacaggccggatggggagccgcttggtgggcatcatctcctccagggacattgattttctcaaagaggaggaacatgactgtttcttggaagagataatgacaaagagggaagacttggtggtagcccctgcaggcatcacactgaaggaggcaaatgaaattctgcagcgcagcaagaagggaaagttgcccattgtaaatgaagatgatgagcttgtggccatcattgcccggacagacctgaagaagaatcgggactacccactagcctccaaagatgccaagaaacagctgctgtgtggggcagccattggcactcatgaggatgacaagtataggctggacttgctcgcccaggctggtgtggatgtagtggttttggactcttcccagggaaattccatcttccagatcaatatgatcaagtacatcaaagacaaataccctaatctccaagtcattggaggcaatgtggtcactgctgcccaggccaagaacctcattgatgcaggtgtggatgccctgcgggtgggcatgggaagtggctccatctgcattacgcaggaagtgctggcctgtgggcggccccaagcaacagcagtgtacaaggtgtcagagtatgcacggcgctttggtgttccggtcattgctgatggaggaatccaaaatgtgggtcatattgcgaaagccttggcccttggggcctccacagtcatgatgggctctctcctggctgccaccactgaggcccctggtgaatacttcttttccgatgggatccggctaaagaaatatcgcggtatgggttctctcgatgccatggacaagcacctcagcagccagaacagatatttcagtgaagctgacaaaatcaaagtggcccagggagtgtctggtgctgtgcaggacaaagggtcaatccacaaatttgtcccttacctgattgctggcatccaacactcatgccaggacattggtgccaagagcttgacccaagtccgagccatgatgtactctggggagcttaagtttgagaagagaacgtcctcagcccaggtggaaggtggcgtccatagcctccattcgtatgagaagcggcttttctgaaaagggatccagcacacctcctcggtttttttttcaataaaagtttagaaagaaaaaaaaaaaaaacaaaaacaaaaaaaaaaaaaatcttcgcgagagggattcttttgttggggtgtggggagaaaaagggggtgtaatgaaaaggggcaagtgtgggtcacataaggctgtttcgctctgaaccaagtttttgttgttcaaaggtgggaaaaatctgcgcgcggtttcccttatatagggaggcggtcggtatttaatttccgaataaacccccggggtttacccctgtgctttttttgaagcatccttcggagtataagaagagacagcggggaagaagatacaacacgagagccataaaagacgaggggggatgaataataggcatagccgaacagcgactcaatacgtagaggagacacatatcgttgtcgagcaagaagaagacgatactatcacagaccaaacaaaaacccccggcactacaccagagtggaatgttatggcaggatacaagaaagctcacgac

SEQ ID NO: 679774 - DNA, 434 bp, Homo sapiens
acccaacaccgcaatctagttcatcaaagaagcgccggttctttcccatcagtactttgatgggggcaggcaccagcacatttggtggcaacacccccgttgactcaacagagaagatataatgatctcgaacccgggcaagcctcacaaccttctttagcttctcattccggaagatttctctgctgaaggtatccagccgggggttggcaactctggccacctttttaccttggacttcctgcacctcaataacaccaggtgagaagcacctgctcaactcctcagctgcctccccttccacgggctcaagcagggtgatgtctggcaggagcctgtaactggctgttgccactggtgaaaacttggcatggatctttgccaatgcccttgacacagtgcatgagcaagtcaatttcttggccaggccgcag

SEQ ID NO: 679775 - DNA, 2374 bp, Homo sapiens
tttatgtattcttactctagttgtttattaagaatgacaagcacgtcttttcaacatgttagtgaacaacgtctctttattttggggaggagcccggcgggacagtagaagtaaacccttgcctgttaattgaactggccgaggtcctgcggggagtgtggggtgggacgtgaagtggcagctcctcagtgacaaggccactatgtgctatacgcatgcgctgtttcttcagcgccagctccgcccccgccgcagcgaggcgggtaggttccgcccgcgcgcactacgccctgacgtcagcgtcgcgcgcagcgcagtgacgaaatcggctggtttatattggcgcggcccagacggcagaggtctctgcggcgcggtcctcggagacacgcggcggtgtcctgtgttggccatggccgactacctgattagtgggggcacgtcctacgtgccagacgacggactcacagcacagcagctcttcaactgcggagacggcctcacctacaatgactttctcattctccctgggtacatcgacttcactgcagaccaggtggacctgacttctgctctgaccaagaaaatcactcttaagaccccactggtttcctctcccatggacacagtcacagaggctgggatggccatagcaatggcgcttacaggcggtattggcttcatccaccacaactgtacacctgaattccaggccaatgaagttcggaaagtgaagaaatatgaacagggattcatcacagaccctgtggtcctcagccccaaggatcgcgtgcgggatgtttttgaggccaaggcccggcatggtttctgcggtatcccaatcacagacacaggccggatggggagccgcttggtgggcatcatctcctccagggacattgattttctcaaagaggaggaacatgactgtttcttggaagagataatgacaaagagggaagacttggtggtagcccctgcaggcatcacactgaaggaggcaaatgaaattctgcagcgcagcaagaagggaaagttgcccattgtaaatgaagatgatgagcttgtggccatcattgcccggacagacctgaagaagaatcgggactacccactagcctccaaagatgccaagaaacagctgctgtgtggggcagccattggcactcatgaggatgacaagtataggctggacttgctcgcccaggctggtgtggatgtagtggttttggactcttcccagggaaattccatcttccagatcaatatgatcaagtacatcaaagacaaataccctaatctccaagtcattggaggcaatgtggtcactgctgcccaggccaagaacctcattgatgcaggtgtggatgccctgcgggtgggcatgggaagtggctccatctgcattacgcaggaagtgctggcctgtgggcggccccaagcaacagcagtgtacaaggtgtcagagtatgcacggcgctttggtgttccggtcattgctgatggaggaatccaaaatgtgggtcatattgcgaaagccttggcccttggggcctccacagtcatgatgggctctctcctggctgccaccactgaggcccctggtgaatacttcttttccgatgggatccggctaaagaaatatcgcggtatgggttctctcgatgccatggacaagcacctcagcagccagaacagatatttcagtgaagctgacaaaatcaaagtggcccagggagtgtctggtgctgtgcaggacaaagggtcaatccacaaatttgtcccttacctgattgctggcatccaacactcatgccaggacattggtgccaagagcttgacccaagtccgagccatgatgtactctggggagcttaagtttgagaagagaacgtcctcagcccaggtggaaggtggcgtccatagcctccattcgtatgagaagcggcttttctgaaaagggatccagcacacctcctcggtttttttttcaataaaagtttagaaagaaaaaaaaaaaaaacaaaaacaaaaaaaaaaaaaacccgcgggggcttcttttgtgggggggggggaaaagaggggtgtaagagaaagggcccagtgtgggccattggcggtgtttccgcgtggacccgagctttcttttgtaccaaggggggaaaactcgtggcggggatcccacataagaggagaaggcggaataatgttgccgaaaaggcgcggggttaacccgtcgctatatgaacgcgggggggaaacaacacgggggaaataaaaacccgcactatagaggggccacaaaagggagagaccacagagcaccagcgaagacccagaacacaggagaagctgggcgcgcaacacaaacgac

SEQ ID NO: 679776 - DNA, 2285 bp, Homo sapiens
tttatgtattcttactctagttgtttattaagaatgacaagcacgtcttttcaacatgttagtgaacaacgtctctttattttggggaggagcccggcgggacagtagaagtaaacccttgcctgttaattgaactggccgaggtcctgcggggagtgtggggtgggacgtgaagtggcagctcctcagtgacaaggccactatgtgctatacgcatgcgctgtttcttcagcgccagctccgcccccgccgcagcgaggcgggtaggttccgcccgcgcgcactacgccctgacgtcagcgtcgcgcgcagcgcagtgacgaaatcggctggtttatattggcgcggcccagacggcagaggtctctgcggcgcggtcctcggagacacgcggcggtgtcctgtgttggccatggccgactacctgattagtgggggcacgtcctacgtgccagacgacggactcacagcacagcagctcttcaactgcggagacggcctcacctacaatgactttctcattctccctgggtacatcgacttcactgcagaccaggtggacctgacttctgctctgaccaagaaaatcactcttaagaccccactggtttcctctcccatggacacagtcacagaggctgggatggccatagcaatggcgcttacaggcggtattggcttcatccaccacaactgtacacctgaattccaggccaatgaagttcggaaagtgaagaaatatgaacagggattcatcacagaccctgtggtcctcagccccaaggatcgcgtgcgggatgtttttgaggccaaggcccggcatggtttctgcggtatcccaatcacagacacaggccggatggggagccgcttggtgggcatcatctcctccagggacattgattttctcaaagaggaggaacatgactgtttcttggaagagataatgacaaagagggaagacttggtggtagcccctgcaggcatcacactgaaggaggcaaatgaaattctgcagcgcagcaagaagggaaagttgcccattgtaaatgaagatgatgagcttgtggccatcattgcccggacagacctgaagaagaatcgggactacccactagcctccaaagatgccaagaaacagctgctgtgtggggcagccattggcactcatgaggatgacaagtataggctggacttgctcgcccaggctggtgtggatgtagtggttttggactcttcccagggaaattccatcttccagatcaatatgatcaagtacatcaaagacaaataccctaatctccaagtcattggaggcaatgtggtcactgctgcccaggccaagaacctcattgatgcaggtgtggatgccctgcgggtgggcatgggaagtggctccatctgcattacgcaggaagtgctggcctgtgggcggccccaagcaacagcagtgtacaaggtgtcagagtatgcacggcgctttggtgttccggtcattgctgatggaggaatccaaaatgtgggtcatattgcgaaagccttggcccttggggcctccacagtcatgatgggctctctcctggctgccaccactgaggcccctggtgaatacttcttttccgatgggatccggctaaagaaatatcgcggtatgggttctctcgatgccatggacaagcacctcagcagccagaacagatatttcagtgaagctgacaaaatcaaagtggcccagggagtgtctggtgctgtgcaggacaaagggtcaatccacaaatttgtcccttacctgattgctggcatccaacactcatgccaggacattggtgccaagagcttgacccaagtccgagccatgatgtactctggggagcttaagtttgagaagagaacgtcctcagcccaggtggaaggtggcgtccatagcctccattcgtatgagaagcggcttttctgaaaagggatccagcacacctcctcggtttttttttcaataaaagtttagaaagaaaaaaaaaaaaaacaaaaacaaaaaaaaaaaaaacaaaaaacaaaacaacaaaaaaaacaaacacacaacaaaaaaaaaagcaacacaaaaaaaaaaaacgcgagagaacacatacgcgggagcagcacacagcgaggggcacacgagggagacagcagagaaacggagggcagggcccacgacgtgagcgaacacgcggggacccacagcgcggaacccaaaacaggggagcggcccgacgagcagagaaaagcaggggcgacccgggacacct

SEQ ID NO: 679777 - DNA, 210 bp, Homo sapiens
acagactataccgcagttgcctgtgcatacaccactttctactccaacctgacggagaacgcccgtggggtgaagctgctagctgccttgctggaggacgaaggcgggagtggacgacctctgttgcaggcagcaaagacccttgcggcagcagagtcagaactgctgcgcagtgcccaaccagccagtgctgagccccgtcagaacctg

SEQ ID NO: 679778 - DNA, 107 bp, Homo sapiens
tgtttatcgatgccacccacttggcttcccaaggtgctagcattacaggcatgagccaccacgcccagcctgttctattaaaaacatcttgacctttttttgtttaa

SEQ ID NO: 679779 - DNA, 2253 bp, Homo sapiens
tttatgtattcttactctagttgtttattaagaatgacaagcacgtcttttcaacatgttagtgaacaacgtctctttattttggggaggagcccggcgggacagtagaagtaaacccttgcctgttaattgaactggccgaggtcctgcggggagtgtggggtgggacgtgaagtggcagctcctcagtgacaaggccactatgtgctatacgcatgcgctgtttcttcagcgccagctccgcccccgccgcagcgaggcgggtaggttccgcccgcgcgcactacgccctgacgtcagcgtcgcgcgcagcgcagtgacgaaatcggctggtttatattggcgcggcccagacggcagaggtctctgcggcgcggtcctcggagacacgcggcggtgtcctgtgttggccatggccgactacctgattagtgggggcacgtcctacgtgccagacgacggactcacagcacagcagctcttcaactgcggagacggcctcacctacaatgactttctcattctccctgggtacatcgacttcactgcagaccaggtggacctgacttctgctctgaccaagaaaatcactcttaagaccccactggtttcctctcccatggacacagtcacagaggctgggatggccatagcaatggcgcttacaggcggtattggcttcatccaccacaactgtacacctgaattccaggccaatgaagttcggaaagtgaagaaatatgaacagggattcatcacagaccctgtggtcctcagccccaaggatcgcgtgcgggatgtttttgaggccaaggcccggcatggtttctgcggtatcccaatcacagacacaggccggatggggagccgcttggtgggcatcatctcctccagggacattgattttctcaaagaggaggaacatgactgtttcttggaagagataatgacaaagagggaagacttggtggtagcccctgcaggcatcacactgaaggaggcaaatgaaattctgcagcgcagcaagaagggaaagttgcccattgtaaatgaagatgatgagcttgtggccatcattgcccggacagacctgaagaagaatcgggactacccactagcctccaaagatgccaagaaacagctgctgtgtggggcagccattggcactcatgaggatgacaagtataggctggacttgctcgcccaggctggtgtggatgtagtggttttggactcttcccagggaaattccatcttccagatcaatatgatcaagtacatcaaagacaaataccctaatctccaagtcattggaggcaatgtggtcactgctgcccaggccaagaacctcattgatgcaggtgtggatgccctgcgggtgggcatgggaagtggctccatctgcattacgcaggaagtgctggcctgtgggcggccccaagcaacagcagtgtacaaggtgtcagagtatgcacggcgctttggtgttccggtcattgctgatggaggaatccaaaatgtgggtcatattgcgaaagccttggcccttggggcctccacagtcatgatgggctctctcctggctgccaccactgaggcccctggtgaatacttcttttccgatgggatccggctaaagaaatatcgcggtatgggttctctcgatgccatggacaagcacctcagcagccagaacagatatttcagtgaagctgacaaaatcaaagtggcccagggagtgtctggtgctgtgcaggacaaagggtcaatccacaaatttgtcccttacctgattgctggcatccaacactcatgccaggacattggtgccaagagcttgacccaagtccgagccatgatgtactctggggagcttaagtttgagaagagaacgtcctcagcccaggtggaaggtggcgtccatagcctccattcgtatgagaagcggcttttctgaaaagggatccagcacacctcctcggtttttttttcaataaaagtttagaaagaaacaaaaaacaaaacaacaaaaaaaacaaacacacaacaaaaaaaaaagcaacacaaaaaaaaaaaacgcgagagaacacatacgcgggagcagcacacagcgaggggcacacgagggagacagcagagaaacggagggcagggcccacgacgtgagcgaacacgcggggacccacagcgcggaacccaaaacaggggagcggcccgacgagcagagaaaagcaggggcgacccgggacacct

SEQ ID NO: 679780 - DNA, 464 bp, Homo sapiens
atataaaaatccccagatgtgttcttctggtttgggatttcttagggcaagatattcaagcactgtggctttcactgtcttatcaaagtatgcttctatcaaacatcccttgcttaaactgtttttgaatttgaggataatattgctagtaaaagaaacaattcttggctgggcacagtggctcacgcctgtaatcccaacacttggggaggctgaggcaggcggatcacctgaggtcaagagtttgagaccagctggccaacaataaaattagttgggcatagttgcgcacgcctgtaatcccagctactcagcaagctgaggcaggagaatcggttgaacccaggaggaggaggttgcagtgagctgagatcacgtcactgcactccagcctgggcgatagagtgagactcagtctttaaaacaaacagacaaacaaacaaacaccaagaaaaaaaaaccag

SEQ ID NO: 679781 - DNA, 214 bp, Homo sapiens
  misc_feature (206)..(206): n is a, c, g, or t
agttttgtggtctggtaattttgggtccaggttacaggatgatttaaatcatatccccatctggaaatacctggacaactggacattaactggagtaaccactaacaccactgaattttcaaagctcggacagaaaagtcagctgaagtggttaatcatggtgttacaactagacaaatagtcctgcttcaattcttgcaggtagnctaaactc

SEQ ID NO: 679782 - DNA, 127 bp, Homo sapiens
  misc_feature (1)..(1): n is a, c, g, or t
ncagtggggcaattttggacaatgggggcaccctgcatccagcaatgccgcgatgtgtgaagaaggcttcgggttgtaaggcacttttgtccggaaagaaatcgcacttactaatattaggtgcgga

SEQ ID NO: 679783 - DNA, 205 bp, Homo sapiens
gcttaaacatcccattttgacacttgtcttgcagttagtttgacattttgtagttaatgattccaaattggtttagttgggccatctcatttttcacttcctgtaaaccactccatagatttgtcttttttcaagaaattagttttctttcctttatttgattgatggtcattgactactaaaatcaactatgcattttaagata

SEQ ID NO: 679784 - DNA, 637 bp, Homo sapiens
gcttgcatccagccaaaaagaatgatgccagcgtcatcaacgcgtatttacgccacggtgagcaggtacaatttttcctcagttttcactgtccggtgccgttttgtgccggctgcggactgagctgatacctgtagatcggcggtgccggccaggtaatttcgcccggatggatcacggtcgacgccggcgaattaccacattcatcaaagatcaacagtgatagttgccgtctttctctttgcacaataatgtttcaggcagattaatcgatggtttgtgacgtagagctgtgaggactgcgtctggcagactggccggaatatcgttataagcaatcacttggacaccatttgccgtcactgaagatttcacccggcacggtgtattcacagttgccgccgtttgggcgcgtgcctaggtcgacaatcacaactgcccgccttcatggagtccgaaccgatttcacgggtaattagcttcggcgctggttgcctggaataagcgcggtggtgacaatgatatcgacctcttttggcgtgggcggcaaacgagttccatttccgcttgatgaaggcgtgcgacatcactttggctatagtcatcgccgctgccagcgttgctctttaaaatccag

SEQ ID NO: 679785 - DNA, 757 bp, Homo sapiens
  misc_feature (17)..(17): n is a, c, g, or t
  misc_feature (178)..(178): n is a, c, g, or t
  misc_feature (180)..(181): n is a, c, g, or t
  misc_feature (196)..(197): n is a, c, g, or t
  misc_feature (209)..(210): n is a, c, g, or t
  misc_feature (212)..(212): n is a, c, g, or t
  misc_feature (217)..(217): n is a, c, g, or t
  misc_feature (229)..(231): n is a, c, g, or t
  misc_feature (319)..(319): n is a, c, g, or t
  misc_feature (358)..(358): n is a, c, g, or t
  misc_feature (371)..(371): n is a, c, g, or t
  misc_feature (385)..(385): n is a, c, g, or t
  misc_feature (404)..(404): n is a, c, g, or t
  misc_feature (468)..(468): n is a, c, g, or t
  misc_feature (470)..(470): n is a, c, g, or t
  misc_feature (478)..(478): n is a, c, g, or t
  misc_feature (546)..(546): n is a, c, g, or t
  misc_feature (749)..(749): n is a, c, g, or t
ctccacttgggtgcganaccgagaggggcatatccgttcacgccgatccatgaaaatgctttggaaattgacggataatatcaagtacgaggactgcgaggaccgtcacgacggcaccagcaacgggacggcacggttgccccagctgggcactgtaggtcaatctccctacacgatntnnccgccgctcttccannttcccaatgccnncntccanttcccatacttnnncccaccctaccagcctatctacccccagtcgcaagatccttactcccacgtcaacgacccctacagcctgaaccccctgcacgcccanccgcaaccgcagcacccaggctggcccggccagaggcanagccaggagtctnggctcctgcacacncaccgggggactgcctcanaaactaatcggagcctgaaaatcattcgacatgggacatacaaagcggcacgaggacctcctananttttttanacgcactcaactcaggactcggagacctctcgatccactccttacctcacgccatcgaggaggtcccncatgtagaagacccgggtattaacatcccagatcaaactgtaattaagaaaggccccgtgtccctgtccaagtccaacagcaatgccgtctccgccatccctattaacaaggacaacctcttcggcggcgtggtgaaccccaacgaatcttctgttcagttccgggtcgcctctcgctcctcagctccacctcgaagtacaangtcacggt

SEQ ID NO: 679786 - DNA, 1361 bp, Homo sapiens
ggacgcttctggtttccgggtcggttctggcgaggtctggagctgctccgacttccatgaggagactgctgtgtcgacgtgcgtatgcaacgcagcgggggtactctgggcgagcccgtgacctccctgaaccctcattgttcagaagagcctgagtgggccttgagggcggggcccaggtaatggctggcgggccgtgtgggcccgtgaatcgtcacgcaccatccgtcgtgcgagtcatccatctgacaaaagaagggattccaaatgcgctcgccaggtcttggacaacgaatttcacgggggacctcttaagatgggctaagcctagtccttcctgtttcacaccacgtcgagttccacaccgctaagactcctaagtagttactatatgctggaacttcctagagcgtacgtgagggatgtgcaggcgcaatatcgggaaaggatagaaaatattcggcacgcaaagattcatttggccatggagtttggccgtgggtgcaattccaggcaatgcaaaagtaggtggggaggtcaatgaggtataggcagaagagatgttttgaggacaatcagggggtggctggcctgggagagggggaacgatcatttcacgtagagtgaatggttaggtagatggcacagtaatggagaattgtttgacacagataagggcgttcttggtcgaggctgagtgatgtgcgtgtaatggacatgagtgaagaagaacagaggggaagtgtacccaggtgggggcagtaagagaatgtagcttgcctttggtgataatataacgaagtcctaaagagaagtcgttggaaatcggggcggagtttaggagcgggaacattgatgagtcacacaggggaatgtcaatggcgggaaggtcgtaatgtcacttaaggataatttggatttactaattaaacaaggacgaacaaggaccctaaggttgctgggaaaaatttttattcgattaaaaatgccgcgccatgaggtgaacattgttatatcgccggagaataccgccgaagttggaagccgaggattccacggagtccagaatccagtgacaatagactgagagaaatgacttcgttgcaggaagagcaattgtttctcgatgggctagatcttggcagggttgtcagggaatcgaagtggatccgcaatgtttgaaagagcttgcttaggaagaaggacagggacttgggaagggttgttctttgctttgggtgtgcccgcagaaggaagaggaacatggcgcattggaagtggtttgccgagagggagggagggctctttgggagataggcctcggatagtgagagaaaattgggggcgtggaattgagaggg

SEQ ID NO: 679787 - DNA, 567 bp, Homo sapiens
  misc_feature (82)..(82): n is a, c, g, or t
caggtttttttcctccccagcttattcatcacaggctggttagaggtgtgctttctccaatctgagacacccacgacttcanaacgccaagaatccttgcagttgatgtttcctaaacttctttaggattttgcagtatccattcattttcagatctacttgccttttctctggttcattattggtattctttaggaaataaacccagcatctgaaaatatttccctctgtggtgtttcattacatgaaactacacgtgatacacagaccctgggcttttttatttctcacgttttgcagctagtgtaaataaagaagtcactaggcgtcgggccccccaacgccaagacccgagcccctgtccgaaaattgagggctttttcggttggttggttgaagaaagcagcaccgtcaccacccaggtggcctcgctgcttacaccaaaggcgaactggggataatgggaacagtcaggccagggccccacttggcaggcgtgttgtgtaacagtcgcgcctggaagtgagcagcttcgcccgcaaaggtgccgcgtcccgcggcggccgc

SEQ ID NO: 679788 - DNA, 107 bp, Homo sapiens
  misc_feature (12)..(12): n is a, c, g, or t
ctagctcggtanccccctgaaatggtcaaggtataagtcttggactcaacgttggaaggtctccacctttgctatggaagtcaaacgatctttctttgaaatgaaaa

SEQ ID NO: 679789 - DNA, 386 bp, Homo sapiens
atcatctgggtggatcttcaaagatgagtgaaatacagttctcaaacagatacagaaacacacacacgacagcacgacacagatataaaaacatgactcacatagagtgactacatgtcaaagatttatgtgactcattagtgagggacctagcaagattgtaaatctgattttgtgcaagtatatgttctcttagttatggtactaggtggtaggtatgaaggagatggtcattatagaatacttgctgatgtgtctagggatgagggcttataacatctaacttgagtctcatgtagttctgcaataaaagaagctatagtacttaattatgtgtgggtatgggacagggatagataaagcatatgtggcctcgataaacacag

SEQ ID NO: 679790 - DNA, 528 bp, Homo sapiens
tgggggtaaaaattctcggtgtttttttttccccgcgggtaatttttttaggggttccccttttttctctcttataaaaagtgagaaaaaaatatttcccaaagtgtatataaaagggggtctctccgtggagccctctttctcttttctattttctctctctctctccgcgtgtacacaatagagggtgtggcttctctcttatatgagcgcgccgcacattactctctctctgtgtgtaggtctctgtgtcagcgtgtagtagggcgtctcacacacacatatctctcttcacagcctctctatactaaacacacactatctcttctgtgtgtgtgtggtgtctctctatccctctcttatctctctgcacgagaaaagagagtagtgagagatgtagtagcgtctcgcgcgcacacacacacacacaacaccaccctctactactcgtgtgtcgtctcgtcacaggatcacaccactacgtcggcgcgcgactctcatctctctctccgcgtgtgagatactctc

SEQ ID NO: 679791 - DNA, 136 bp, Homo sapiens
catcgagctcggcccgaatttagaatctcaggtttaggtacgagtcctatagtctagaaataagagggtttgaacctctattttttactctatcaaagtaactcttttatcagacatatttctatgattagtgggg

SEQ ID NO: 679792 - DNA, 433 bp, Homo sapiens
agcaatgtactgacttttcctctctagctcagatacatcttcttccaggagaaggctgtttggtctgtgttgaaaatctgttgattagtgtagccactttcgttaattatcttagctggtcttctgggtaactgcgtgcagcttctacgtcaaccctgtcgcttttatggtatggagacgtcttcgttccataaggctcatgaacagacctctgctactgtcggacttttctcctgcagctttcttacgtctattagcctacatagaatttaagggttagggctttactctggattcagccttggcttaagggagtgttgtggctagttcgattgtctatccagaccactcaaaattcctccatatcaacaggctgttttacttccttatcacttgtgtgtacaattttaatttccttcaagactttttcttt

SEQ ID NO: 679793 - DNA, 338 bp, Homo sapiens
  misc_feature (24)..(24): n is a, c, g, or t
acaatctgtgcctcaaaagctgtntataaaaaaaatatttaacaaagtaccacttgactggggcacggtagcaacacttggggaggctgaggcaggctgatcacttgaagtcaagagtttgagactgggcaggtgctgtggctcatacctgtaatcccagcacttggggaggctgaggtgggtggatcacctgaggtcaggagttcgagactagcctgaccaacgtagagaaaccccgtctctactgaaaatacaaaaaaaattagccgggtgtagtggtgcatgcctgtaattccagttacttgggaggctgaggcaggagaattacttgaacctgg

SEQ ID NO: 679794 - DNA, 622 bp, Homo sapiens
  misc_feature (16)..(16): n is a, c, g, or t
  misc_feature (28)..(28): n is a, c, g, or t
tgggactcggcccccntcagtataaaancaagtagtcgatgtctatactatccacaatgtgatagcatgaacatgatctcgcgaagtctattagcgtatactgtagcttcaatagacattgtgctttagataatgcagttagacacgatgggcatagtctttatcatagagattcacacatccctgattatataagtcgtagcatgtgtaatcacatgtaagcacgttgtcagctcatacattgaagtaattgtagttgttaatatgcccctactgtctaggctttaaacagattagatcattcatatatcctaatcgccatgccttttttcacgtcgatggtctgggccatcatatactttgtatgccatatggactgtccccaagtagttgcatctgttatgagcaagtgatcatgtctgaattcagcccggtaacacagttcacaacatttggttcacgttttagtacttaaggcagtgcagtgcaggcatagttcatgcttacatttcaatgacacattatagatggcgcagtggttaatctatgtatgtccagccatttgcaagtgccatgagctacgatcacactcgatcgagagagcacagtcagttcagtcaat

SEQ ID NO: 679795 - DNA, 612 bp, Homo sapiens
taatcccagcgactttccagcaggccgcaggcggcacggcatctacgcagggatcaggcagcatcaagcaccatcctgggctcaaccatggtgcaacaccccaatctctgggtggagtggccgcagccacccatgtaggtccccccagagatcacgtcccaaggccaggcgcctgcaggcgcccaagggcagccaacatgcaaccggttgcacaccccctgtggtggacagggttgcggccagacctattggcgcccaggtgtgcaaggcggcccgccacgccactgggcgttcggccccaacttgcgcataacttttaccccaaaggcccctatggggcgaccggaaaaccacaagggcaacgggaacgcgaaacgcgggaccaacttccacccgggcggccccaaagaaagagccgccccacgtccagcagcacgcaagcacgcaacaagaagcacacacaacgcaagcagacagcactcagaagcaacaccgcacgaccccaacacacaccagcccagattggtgcggagagacgaagcgaaagcccccgccgcggacagcactcggctgcgagcaggcacccccgcgaacgcgcaagaacgaaagaca

SEQ ID NO: 679796 - DNA, 218 bp, Homo sapiens
  misc_feature (8)..(8): n is a, c, g, or t
  misc_feature (20)..(20): n is a, c, g, or t
  misc_feature (24)..(24): n is a, c, g, or t
  misc_feature (60)..(60): n is a, c, g, or t
  misc_feature (91)..(91): n is a, c, g, or t
  misc_feature (101)..(101): n is a, c, g, or t
  misc_feature (123)..(123): n is a, c, g, or t
  misc_feature (132)..(132): n is a, c, g, or t
  misc_feature (139)..(139): n is a, c, g, or t
  misc_feature (142)..(143): n is a, c, g, or t
  misc_feature (154)..(154): n is a, c, g, or t
  misc_feature (157)..(158): n is a, c, g, or t
  misc_feature (167)..(167): n is a, c, g, or t
  misc_feature (178)..(178): n is a, c, g, or t
ctcgtgcnaattcggcagangctnaaatcccctagaagtcccactccctaaacacatccntattactcgcatcaggagtatcaatcacctnagctcaccanagtctaatagaaaacaaccganaccaaatanttcaagnacnncttattacaanctnnacctggganctctattttanccctcctatcaaagcctcatgagtaacttcgaagtactcc

SEQ ID NO: 679797 - DNA, 174 bp, Homo sapiens
aaatctgttcgcttcattcattgccccacaatcctaggcctaccagccgcagtactgatcatctatttcccctctattgatccacacctcaaatatctcatcaacaccgactaatcacaccacaatgactatcaactacctcaaacaaatgatacacaacacactaaggacgac

SEQ ID NO: 679798 - DNA, 263 bp, Homo sapiens
ctagaggatcccctgtgggagagggggtctcagcatgggtcctcaggcacccagctctgagcagtttctgaacataatcccaggagcctcatttccctcgcaggccttgtccagtggatcatgtaaaagtctgggggactggggcgcgggggctcatgtttgggaatcccagcatcttggggacggtggacggcgggagcatcattgtgagcccagaaagttaaagaccatgctgggccaaggtgggtgagacccgtgtctcc

SEQ ID NO: 679799 - DNA, 1408 bp, Homo sapiens
gcgtccgcttcttgtgctgcagtccagcggccagatggcttctacctgctctgtccaaacccaccatctcccccagacacaggccccgtagaaagctagtcggatcactggagcaccgggactccccattggaaccagatgccccgtgcccatgcgcaggcctaaaatgctggttatcagtggaggtgatggctatgaggactttcgattcatcagctagaggagtgcggctaaccacgcaagtcgagactcgtgggtgctcgagacgttacacgtgacgaggagacgcatgcacactcctggtggagcggtgtagacccttgtcatgcactgttgggcgccgaaggaccatcagccacggaccacgactcgtgccttgtccagtccgtgccttagccctttctccacgtagactcactacagacggcaagatcgtctatgcagcgcgatgggaccgtattcgcaaggccaggggatgcacttgcaatgattgctcatgacgttggcgacttcgtgcgctctgatcattcggcagtagaagatagattccttagagtgacaaaggacaccaacatggagacatcctcagatgaccattggagactgcttcccacagaacccgcgtcgtgcgcgttggacacccggggttgcctttcacatagttcaattgacgtcgcgaattggggagggaccaattgttggtacctgaacaacatgcgagatctccaaaggataaccccttgcaaagttcgttttcgggtaaccgaccaatggagcgagccaaggcatttgaaggtctcttatggtagaactctcggcgaacatgggtgtgtcgctcgccaggggaacgtggagccccacattgcgttagctgaaaattacttcttcgctcgacgcagatgcttttgtcccatttcgcattggagcatggcctcgaggaccattgggcattttggacgggaaagtcttacgggcgaaattggttaccccgccttgtttccaccatgatagccggtgtgatgtgggcacccagattggttaccacgtgttacagccgcagggacacgatcgattcgagatgtagggcccgttggatatcggtgtggtgcgaaaccatggcccagtttgagtcgattccttaactaagtgagggccgggagcaagccactacctcgaaggaaagtgtgcgagaggacagtaacgtggcctgcgctgaggcgcgggtgagcgcgagcccgtgtgttgacccactgtgtgccgcggatgcctcatatgtctgggcgtgtgaggccacccccggggggctggctttgaacgggtcattttcacccttagtacgcttgggtgtgcaacttggtacacgttctgagcgcaaatgcgcctatggtatctagagagacccacctac

SEQ ID NO: 679800 - DNA, 154 bp, Homo sapiens
tgtggcctgtgccttggctctcctttccctggtgtttcatcattatggacccccacagctctccttcagtcacatctcctgctccttgccgagtgcattgctccatctcatttccttttgtattcctggccctacgtgtccggccgtgttcttc

SEQ ID NO: 679801 - DNA, 429 bp, Homo sapiens
gtgtgggaccccggaaattcggccataatgcccggaaattttaggaataattgggccggataaggtttaccttaaaataaaggccaatggaaagggctggaaaaaaaaaaaaaaaaaaaaaaaaaaaaaaaaaaaaaaaaaaaaaaaaaaaaaaaaaaaaaaaaaaaaaaaaaaaaaaaaaaacaaaaaaaaaaaaaaaaacacagactccctccaagagccacctccttaaaacagcccccaccttccagcgccccctcacccgtctcccccaaaacagaccccctatccaacatcaggctccgttttgtaaccctgtgcctccccctatccattaaccacgtcccaaccaatatccactgccaccctggcgccttcactcctggatcccaccccctgcccttgccaattccaaaaagtcccctcccc

SEQ ID NO: 679802 - DNA, 101 bp, Homo sapiens
ctcggagttcgcaacacccagacccaaaccctgacatgctctggggcgagagaggagccaggagctgagcgcgccgggggctacttcgcctccggctcggt

SEQ ID NO: 679803 - DNA, 483 bp, Homo sapiens
taggagactaggataaggactacatttattaagacggtcagattaccatatttaagtcgtcgataatggctggtgaagtaggtgggattattagttaccatattacagatgaggcggtattctagctgtcatgctacttcctcgtgtctatgatgttcttctcccttgtatctttccctgctttgaggctattataaagatattctcctgagtcttctaaatagcttgaacgtttgacagtatttcagaagtgggtcttgggtatatctggaattaattttatatatagtataagatcggaatctagtcctaatttggccccatatatggaaagacatttatttcaagagtcaatttattgtcattgctattcttctgcaacttcggcaggtatgagatttgtgtcagattctctgtatgctttgagtactgcttcccggaagccaatatgggagttggtttgggtatagatatgtattgaga

SEQ ID NO: 679804 - DNA, 356 bp, Homo sapiens
tgtggtggctcatgcctgttatctcagtactttgagaggccgaggtagacagattacctgaggtcaggaattcaagaccagcctggccaacatggcaaaactccatctctacaaaaaatacaaaaatagccaggtgtggtggcaggcgcctgtaatcccagatactctggaggctgaggcaggggaagtgcttgaacccgggaggcagaggttgcggtgagccgagatcacaccactgcactccagcctgggtaacagagaaagactccatcgcaaaaaacacaaataaccggaagccttgacagactgatataattatgtaattaggccgtgcgccgtggctcacgcctattccc

SEQ ID NO: 679805 - DNA, 125 bp, Homo sapiens
  misc_feature (40)..(40): n is a, c, g, or t
  misc_feature (87)..(87): n is a, c, g, or t
  misc_feature (105)..(105): n is a, c, g, or t
atctaccacctcacccctcactcgaagcagcagcaagttntccagcctgcgccagaggaagacccagagctgcctcaagagcagccnccagaagactctgctggnaggggagactgtggacctct

SEQ ID NO: 679806 - DNA, 435 bp, Homo sapiens
tagaacctggcgagcaccatttctcggacgctaaagaccgtgtcggagcttcagtcatctccaccacacaggtacagcagcgcttactggtattcgcgcttagtgtcttgctggatataatagtacagggacttgccgtactttctcttgaattcagacctaattttcaacatgtccactatcactagcgggagaccatgattctgatcaggaccttatctcgcgtccccttgcccttcatggatgtcatatcaaccgatcagcaaaatacaggggcttgttttgaatgcacttgaaccaagagttcaggacaagcattttccaggtctccgtttaacctcttgcctgatgcgttccaatatgtcataagggctgtatctcttgtacctatcaaatactttctcggaggtggggcacgctccgcacccttggaga

SEQ ID NO: 679807 - DNA, 476 bp, Homo sapiens
  misc_feature (384)..(385): n is a, c, g, or t
ggtgcgacacgccggacggcagtggcccggacgaccgccctaccgttgaggacatggcttcaagcctggacgaagtggcccgggtgatccgcgacgaacagcccgacatcctgctgttgcaggaagtcgacgaaggcgccaagccgtccagctaccaggaccaactggccttgctccaggaacgcctggccgacctctacccgtgcagcgcccaggccttcgactggaaagccgacttcgtgcccgacctgcacatcttcggcagcgtcggtcgcaagctggtgaccatgagccgctatcagatcgaacacgccgagcgcctgcaattgcccgtggcccgcgccaacctgatcagccgtcaattccaggctaaacccgcgttanngctgacctacctgccgttgagcgacggcggccagctggccgtactcaatacccgcctggacggcacggcccccgggcacaacgcggtgctg

SEQ ID NO: 679808 - DNA, 207 bp, Homo sapiens
gcgatacgtccaaagcattcaggtttactcacgtcatccagcagagcatggaaagtcaaatttcctgaactgctatgtgtctgggtcatcatccatcacgacattgaagattgactatactagaagaatggagagagtaatagaaaaacgtggagcattcacgacttgtctttcagacaaggacctggtctttctcatctacttgta

SEQ ID NO: 679809 - DNA, 728 bp, Homo sapiens
  misc_feature (16)..(16): n is a, c, g, or t
  misc_feature (50)..(50): n is a, c, g, or t
  misc_feature (581)..(581): n is a, c, g, or t
agggttcgcgttcaangagtttagcctcatgatgtatgcacttcgactcnatcggatcacccacccatgtgccgctcccagaccttaggagttactgggaaatacaagttatcaggccgctgtggagtgcggtttctaaaagtaggattaatacagaagaggcggccccaaccctgcctctgggagcaaaaccaaaaagagccacagccacagcagagaattcagaaaagccacctgcacaaaaggccagagcagccaagggaagctgggggcccaggccagtgagccctggggccaggtatcaggcccctcaaagagcagaaaacagattttttaggtgaagccgacggtctgaggaaatgagatgagctcacacacctgatgacagcttccctcagcaattccacccgcctccacaggactcagaccaagtcctggtgttagaataaatcactaggctacaagaaagctcaaacccccacaggttctagcactcctagccaccaacacaactctgttcaagatccacctatcaacaggggtggggtgggaaggcggtccccatcctcaggccattcttnctccgtgggttgcagccagggtttcctgtgggtcgtcttgtgcacgtcacggtcctgcccacagcataaaaacatacaggtgtgagggagatgagcaagacagctagctttttacaagaaccaggaaggcttggtgcttcgacttat

SEQ ID NO: 679810 - DNA, 186 bp, Homo sapiens
tcgtggtcgccaactgaaaacctcagacgaaattgcagcggaaacttaccctcgcagcgggcagcgcgcgagatgggcgttgcttccctgccccacaaaactgtgtacgaggacaaactccgtggcagtccaactcagtgtttcgatcacgtgctcttccacgagttgtctgtcgtaaagcagcgt

SEQ ID NO: 679811 - DNA, 130 bp, Homo sapiens
aagcgtgccatctctttgaaagtgagcggcacagtgataatccattttattcattgtaaccccgcagggtatgtattccgcctttaataataaaagggattaatgctttaatcaaaatggaaatccaaaa

SEQ ID NO: 679812 - DNA, 151 bp, Homo sapiens
acgttctcgtagatgacggcacagtcgatggctgacggttgtcacatctcggacacagtagatgccggaagatgtagatcattcctactatctctccaggaagctgcaccctgaccggtgaaatcgtgggtaccgaagctacgaaattcgt

SEQ ID NO: 679813 - DNA, 346 bp, Homo sapiens
  misc_feature (24)..(24): n is a, c, g, or t
  misc_feature (34)..(34): n is a, c, g, or t
  misc_feature (47)..(47): n is a, c, g, or t
  misc_feature (51)..(51): n is a, c, g, or t
  misc_feature (100)..(100): n is a, c, g, or t
  misc_feature (103)..(103): n is a, c, g, or t
  misc_feature (113)..(113): n is a, c, g, or t
  misc_feature (152)..(152): n is a, c, g, or t
  misc_feature (204)..(204): n is a, c, g, or t
  misc_feature (207)..(207): n is a, c, g, or t
  misc_feature (211)..(211): n is a, c, g, or t
  misc_feature (214)..(214): n is a, c, g, or t
  misc_feature (228)..(228): n is a, c, g, or t
  misc_feature (266)..(266): n is a, c, g, or t
  misc_feature (270)..(270): n is a, c, g, or t
  misc_feature (292)..(292): n is a, c, g, or t
aaagggccccgcccacggggcccngcccaccccnggccaaatccccncccntttggaagtgaaggcccagggattcctccaacaaacaagggagggaggnatnccgttggtgntcagaaaaagttagtcccttaggtgggggaaggcaggantcccgcttgaaaaaaaaaggagggggatatgccccccctgccccatttgcangancctnaanatccagttcaagtnccatcctgccaggggcccccaaattgtggggttgggangccnggcctttgtgtccaaaaagggnccctcctggggttttttttttgattttttttaaaaaagggggctatccccccca

SEQ ID NO: 679814 - DNA, 1146 bp, Homo sapiens
gaccaccagtgagccccaccttcaccagccccagcccgcttcactgcccggggtgggcgatgtcttcactcccagatgtggtgtgccatctcgcctggtggccgaggaggagggaggccccctcctcaagtttattgcccagtgctggagccctccagcacaatgtctctggctcccaagaaacctcccacaggcccttatgccaccaagtaatggagcctttgaacgagaagtttgatcccagtggcctctgtcccctgtgtgcgctgcggaggcagcaatggaggtagcaatgtgggcctggacagatgggtgagcgaccccgcaaggaggcgaccatgggcagggctcagcagcatgtgataacacgcctcgatttcctggaggctgcacagccaggaacgggagcaatgccagcaagggggtcatgacgggcaaagccctcgcctaacccattccagcactccgcatccttggaccttgaaggaggccctcacaaacacgtcacagatgggcacccaagcaccgtcgaccgggcagactgccaagtactccatgatctgtccacaccagcaactcagaccaagccaatgaggcatgggcagactgcatcagaaagcagtgacttcacccagtgcagcgccggaggggacaaaagaggcagcccccaccaagtactgctgcacaaccaaggcatgcgggacactcctgagcgaaggtggaagcgtggacggccgcagccagcgtaacaccagccaatgtacggaggagaaccagagcagagacgccacgaatatgcatcacaccggacgccacgaacagagcactgaggaccgcggactggcaacgggaagcaacacggagccacaggcacaccgcgagaccacaggctgcccaagcgggccacaagcacatgtaaagaaggcggaggaggggagacagagagtgcaggaggggggacagggaggaggggacagacggagagagagacggcgagagagaacacaaggactaccgagacgagaaaggacaggagagacgagacgagaacccacgacgacagaacgagaaaatcgcgaggacagaaaaacacgccgaggggagaacacgagagggacagaagcaccaagggagcgatcgagagga

SEQ ID NO: 679815 - DNA, 343 bp, Homo sapiens
tccctgttcaaggaagtctcactctgttgcccaggctagagtgcaggggggcaatctcggctcactgcaatctccaactcccgggttccagcgattctcctgctcagcctcccaagtagctggctttacaggcacccaccaccacgcccagattattttctgcatttttatagcggggacagggttttcaccattgtcggccaggcgtggttcttcaacttccgtgacctcaagttgactccgcccgccttcggcctcccaaagttgctgggaccacaggacttgagccatgtgcgcccagcctgctcttgcttgatttttaaatttgtcagatcactaatgg

SEQ ID NO: 679816 - DNA, 125 bp, Homo sapiens
tgctatggaggatggttgatccatgagttgtagttgcagtgagcgagattgcaccactacactccagcttgggggattcattctcaaaaggtgattgcattgactgacatcctccatggtgctga

SEQ ID NO: 679817 - DNA, 557 bp, Homo sapiens
  misc_feature (14)..(14): n is a, c, g, or t
ggcaaatcctgaanactgtgttcaatgtcatacattcaataaatatttacagagcaccacattctgttccgggcactggggataaatcagtgaaggaattcaaagagccctgattggctgggcgtgatggcttacgcctgtaaatcccagcactttgggaggccaaggcaggtggatcatgaagtcaggagatcgagaccattctagctaacatggtgaaagcccatctctactaaaaatacaaaaaattagctgggcgtggtggcgtgcacctgtagtcccagctactcaggaggctgaggcaggagaattgtttgaacccgggaggtggaggttgtggcgagccaagatcgtgccactgcattccagcctgggtgacagagtgagactccatctcaaaaaaaaaagaaaaagaaatttcaggtatggagcaagaagttggtctacattagaggttataaataaatgtgtagcttgaggctaaattcaacgtgtctgtacatatgggttcactagcaaagtggttatgtatgaaaaatgcgggattaattgggggc

SEQ ID NO: 679818 - DNA, 838 bp, Homo sapiens
  misc_feature (321)..(321): n is a, c, g, or t
  misc_feature (323)..(323): n is a, c, g, or t
  misc_feature (332)..(332): n is a, c, g, or t
  misc_feature (343)..(343): n is a, c, g, or t
  misc_feature (359)..(359): n is a, c, g, or t
  misc_feature (403)..(403): n is a, c, g, or t
  misc_feature (421)..(421): n is a, c, g, or t
  misc_feature (432)..(432): n is a, c, g, or t
tcttgcgtccccgcgtgtgtgcgcctaatctcaggtggtccacccgagaccccttgagcaccaaccctagtcccccgcgcggccccttattcgctccgacaagatgaaagaaacaatcatgaaccaggaaaaactcgccaaactgcaggcacaagtgcgcattggtgggaaaggaactgctcgcagaaagaagaaggtggttcatagaacagccacagcagatgacaaaaaacttcagttctccttaaagaagttaggggtaaacaatatctctggtattgaagaggtgaatatgtttacaaaccaaggaacagtgatccncntttaacaanccttaagttcnaggcatctctggcagngaacacttttcaccattcaggccatgctgagacaaagcagctgncagtgtacccgcatcttncccttggtgcnggattagtcctgactagtttaaggagactggccgaaggctctgcccaaacaatctgtggactggcaaaagcaccacttgctactgagagagggatgatgaatgactgaaaggttccagaatcttgtggaggaattttgaatgaggcttccacagaatgaggcaaagctgaattgagtcaacttctgaagataaaaccttgaagaagttactggggagcctgctattttatattattgactggctttttaagaacacttttgttgagtggactctgataaaaatctaggatctctaatatttttaagcccaagccccttggaccactgcagctcttatcaggtattggcttattccaccaattcattctttgcggcttattaagccgcgagaagcctggcgaatcaa

SEQ ID NO: 679819 - DNA, 394 bp, Homo sapiens
  misc_feature (153)..(153): n is a, c, g, or t
  misc_feature (213)..(213): n is a, c, g, or t
  misc_feature (330)..(330): n is a, c, g, or t
  misc_feature (369)..(369): n is a, c, g, or t
  misc_feature (372)..(372): n is a, c, g, or t
aggcggggtctcactttgtcacccaggctggagtgcagaggtacaatctcagctcaatgcaatctctgccttcctggctcaagcaattctcccactgcagcctcctaagtagctgggaatacaggtatacacgagtacacccagctaattttngtatttttatgtggagacagggtcttgctgtattccccaggctagtctcgaactcctggnctcaagcagtccgcccgcctcgggctcccaaaatgttggtgttatacgtgtgaagcctctgcacccggcgggcaaaactgggcttttaaattcaaccttttgggctaaaggatttcncctttttaatttatttttaaaagggattcccatttttanctntctttttgatattaaaatgttg

SEQ ID NO: 679820 - DNA, 553 bp, Homo sapiens
  misc_feature (10)..(10): n is a, c, g, or t
  misc_feature (34)..(34): n is a, c, g, or t
  misc_feature (52)..(52): n is a, c, g, or t
  misc_feature (62)..(62): n is a, c, g, or t
  misc_feature (120)..(120): n is a, c, g, or t
  misc_feature (214)..(214): n is a, c, g, or t
  misc_feature (295)..(295): n is a, c, g, or t
  misc_feature (514)..(514): n is a, c, g, or t
atgaagtgcncctggtagagggagcacttttcanccccaccccggattaagngaaaagtaancagcaactgggctggagtacctccgggaaaaaaatttacccccccaacccccattttntcccttaacaatattggtttccctgctgaagcccatgttccacagggttaaaaagaattcctagacagaaatatagctataattaaagcattantcagtctgtgctttgaccccacttcccttgtaactgaaagtcacataacactggatactgaccatttgcatccctggttgntcctatagatagtatttctggccttagattggatctctggtgttagaatcatgaggcttttgtttaagaattgtttaagtagatcctgaattccaatttaacagctgaggccatccagtttaaagaccctcacagaagaaccgaatcagcctaagaatagtttcttcatttccctgtcctatggctttaccctgcattcgttgaccgttcaatctttanacttcaacccactccaaaacccctgaaacgcttgagagg

SEQ ID NO: 679821 - DNA, 636 bp, Homo sapiens
aagaaataaagtacatttgaaaccttaaaaaaaaaaaaaaaaaaaaaaaaaaaaaaaaaaaaaaaaaaaaaaaaaaaaaaaaaaaaaaaaaaaaaaaaaaaggggggaggaaaaaaaatatattataaaaggggaaaaaataaaaaaaaaaattttttttaaagggctccacctaataatgtagcagtataaagtaaaatctgccgcccctccgcgcgatatacacacacgacgggcagcagagagagacacacagcagcacatacaacaatctttggacagagcaccacttcttgaggggcacgcaaacacttggagaaaccctactcatctaggtatattataaaagctgatagggggaaaatcattcaagataattacaagatgggatctagtgggttagaagaaaagagagagatattaggtgacgggagatcagatgaaataatttggctactagagtggtattgatgtattgagaacagataaactaaatttttatacagaagaggagggtagtatgttattgaaattcactagcaaatctagaagagagagtaatgcatcagaatgataaacatagtaaataatgagaaagcagcagacagaaagaatctgtagataattaattatacg

SEQ ID NO: 679822 - DNA, 936 bp, Homo sapiens
gtcgcgcacgggtggagtgcggtggcacgatctcggctcactgcaacctctgcctcctgggtgcaagcaattatcctgcctcagcctcccgagtagctgggactacaggcacacactgccacgcccagctaattttttgcattttagtagagacggggtttcaccgtgtgcccaggctgttctaaaactcctgaactcaggtaatctgcctgcctcggcctccccaagtgctaggattacaggtgtgagccaccacgcccggcctttttttttttttttctttttggagagggagtttcactctgtgtttgcccaggttggagttgcgtgggcgtggtctgggttcagtgaacctcgtgcctcctttggttcaagcaattctcctgcctcagcctctcgagtagcggggattataggcgtccgccaccatgccgggctaattttgggggtgtcttagtatagacacggttccaccatgtgggccaggcgggtctcgaatgccgggcctcaggtgatccacctgcttgggcctcccaaagtgtcggggattgcgggcatgaaccaccgagctggcctaaaattgttttaaataactgtacttgtactcatcaccctactccaggtaatagtccaggctgggggtgagaaccccaatgatcagatttgggggaagcctgaaaggcaatggtgggtggaccattgcggcaaacgtgggacaataggtacagcacctcaaatggtcaagagctggcgagaggtgaatagctatgcgacgacccggccgccataggggaaaacttgggggtgcaccctgggcaaacggttaaatacgcacgagggcccggaaccgcgtggagagggggcatgacaggggcgggagaccccaaataacgcggggcgcgctcggcgcgctgacagaggcacacgagcgaaacg

SEQ ID NO: 679823 - DNA, 487 bp, Homo sapiens
  misc_feature (22)..(23): n is a, c, g, or t
  misc_feature (290)..(290): n is a, c, g, or t
  misc_feature (356)..(356): n is a, c, g, or t
  misc_feature (373)..(373): n is a, c, g, or t
  misc_feature (407)..(407): n is a, c, g, or t
  misc_feature (422)..(422): n is a, c, g, or t
atggggaccaggctgaggtggnnatcaccttaggtcaggagtcaagaccagcctggccaacatggtgaaattcaatctctgctaaaaatacaaaaattagccaggcatggtggtgcacgcctgtaatcccagctactcaggaggctgaggcaggagaatcgcttgaacctgggaggcggaggttgcagtgagccaagatcgtgccatagcactccagcctaggcgacaagagtgaaactccgtttcaaaaaaaaaaaagaaaaagaaaaaaatttaataagaaaaagggnggcaaatgatatgaatatgcatttcccaaagtgcggggattaccggctaaaagttattttttttanatacggtttttggtggngttgggcaataaaaatcggtttctttagcttaangcgaacgggtgattngaaagagatttacctcaaatgcctggtcagccggggtctccattcagataattcctcagcctggg

SEQ ID NO: 679824 - DNA, 817 bp, Homo sapiens
cacgccgcagtgttaaacaggaacgaggaccgccacctggcctatagagtggtcttcacaatacaggaacaacatctaatgtgacatggagagttgactgaagttggcccacaggattgtgagctgggcagtgccttcatgaaggcttgccaccttgggacgccccagtttactggggtgtcttgcggagtgcagaaggctttctggcagctgcctgggttaggacagaccctgcctcccctcccgccggccaacccctattccccttcctgtctccacttgcattcagggagtggctgctgttctgagaacattagaactgggaagagagatggagtcacatggattaaaggtgggcataattctaaactttcgtatccaagtatagtcccccttattccacatgtggcatagacgtaactaagcagtatacctgatgcctgctgctgaagagctgctcacaggaggcggcggcggacctggcactgccccttgcattaggtcttgtgtacgatgtgttcttgtgaatctacttcgtcagaacaaacatatttacagcgatcgggtccaggaattctaattagactccccatctggctgtgaaatcaaggaaaccatcccgtatgccctagtatatcacccccaagtaaggtgtacatgtagacaaacgtgcatctgaccactacggggccccctggtgacccacagcacattcacagcgtgatcaccgcctgcatcggccgatcggctggccatcggcctccggaacacggctccccacaatcgaggagctgcgcccaatccgccgagcgccacc

SEQ ID NO: 679825 - DNA, 447 bp, Homo sapiens
gaggaggaaggagagaaaggatataggaagagagggaagcatgtaaggggggcattgttctatttaccgcacaacaaagttatttcaaaaaaaatctgtattatgctgggatatgtcattggcaagaggaagaactggtgtttagaaagcagtatggatgctttaaatgcctctcactcttacaagatagtaggctttgagataataaacttacccgtgtcaattaacatttaaactggcatatagaagaaaaggaggatttttctgcattgtaaaataatcagtatggtttatatgttgaatttgacatttgtgtgtaatttcatggtggcctagtgttgtggtgcttctggtaatggtaatagaagctcaactattttttttgtggatttcagtttttatcatcagaagtcctagacagtgacatttcttaatggtgggagtcca

SEQ ID NO: 679826 - DNA, 738 bp, Homo sapiens
cagcgccgcaggaagctggcacgcgggcccaccacgacccttgctgccgcgcgctgcgtgcgcagcagcccccaggcaaggagcgctcccgcgatcgtgccctcatcggtgccttgcgctcagccgcatcaccacggggcgctgggtaccaggagctcaacgccgaggacgcagatcgtgcgcgtgcgcaggcgttgctgcttcagaatggctagccgcgagggggcctctcggcgggtcgcagaggcagacggcggagcccctaggccggacgctctcaggacacagcgtgccagtctcacggaggtagccggagcgagcactatggccacactacgcgtgtcccgttggcgtatgagcaggctcttggggggcccgtcgcgcggcagcgcccggggctccgacggtaggcatcgaggagctaagaggctcgggatggatcctggccccaccgactcaggagccagcgcaggaccagggctcggaggaggcggcggcgagctcgggctggggggatcaggtggacagcatgccactccggggctggatcgcgcatcacctcagtccctcggccacccgggggtcgctcacctcagtgcccaccagcacactgcacgagcctcatttggacaaccagatctgttatgcttttgtcttcgtcactgcggcggggccctttgatgtcttagtctgtatggggtggaaaaatcaccggaaaccccctggagttcttgaaaa

SEQ ID NO: 679827 - DNA, 805 bp, Homo sapiens
gaggaaccggaacccgcggttataaagtaaaggaacccgagatctgcgcaggggttccctttgccgattgtctctcaccatcacctttcaaagcctaaactcgagcctgctgattcaccggaccatagcatttgctctcgaccatggcatcatcagacgactagctgaccgtgcaacagaggcagactacaaggcatatgaatggccatattcagtctgaaacacaggacacgtcccgaactgcagccaacaggcacgacagcaacactacgactgcaaacggccagaagacacgagttcaacagtacgacgacaagggctcgcgctctgggtgggccaaaaagcccaccaaatagggaagccctaagcagaacgcgaacactcctacgctcggcgccccaccataacccttcaaccctcggaacgggaccactggaacacaccggcaacgcgaaccgccgcccacacgggcacatttaggggaacgggcccaaagagccaacgtcaaccaggtcccaccacaccattttccaaggcaagtgtctcccgaagatgtgtgacactggacatctccacatgcccgacggaaccttcaaagcaggatacccattccgatggaacaagagcaagaaagggaaaaggacaaagctcgagaacagcgccggaattcagagtaaaggtgttgcgcaaagacccccgccacagggggagacaatagacgaacgcacgggcgtgtatacgacaagcgcgcgaggctgtaccaacacagaccggaacacggcggtatgtgggaacacacaaaagg

SEQ ID NO: 679828 - DNA, 1520 bp, Homo sapiens
tacaaagtacttcttttattgcacatacagagaatttcatctatatgtcttgctgtgcgtgtccttacaccttccaatcttactcttgtctcttggagatcgcttgcaacgcagcatgctctaggcaaggggcatgggactagacttctacaacatcatcatatctgggcacccatggcgcacatggctcactcggggcaagcacaccaactcatcctgcccgcgcaccagcatcccctcagcatcactctctgcgcatgctcacctttctcatgttcactcaccacatttggcaacaattaccgcaccacaaagtacctagaataatacacgcagagatacaacgcaccgtaccaccagctgactagcttgagacgaaacacggctacaaccaaagcaacactccgtgcgagcccaaccacgcagaaacacgcaaccacagaccaaccaaaccttggcgcaccgccccggaacactgggttcgcacactggctcacacaccggcacatggccagatcgaaacacctgaactcacctactgcgcccagagcggggcataagcactgcatgggaagccacaactacaagcggcacccacccgctccactccattcccaaaccccctccgacgtacacggtccaccccacgtaacaacgccaagcacaccccgggcgactcggagcaacggcgctgacgcacccagtgcaacccgtcccctggcactgatagcacgcgccaaacaaccccacaacacaccggtcgcgcacacctgcacaacctaccaaacatcactgccccaaaagagccgaccagaacaaacccagcgtacggacatcacacagcaacccactgccagactgaacaaacaacgtatcccacacaacccacacgcacacgctgaaccagctgcgccccccagcacttaccttccaaccaatcggccaccgcacacgacggtgagaaccaaccccggccacaaagaacagcgcgacagcccacccaccaacgcaacccacacaccaccacaacacgcacccacgcaccccagctgcccccatcgccccccacaccacgtcgcgacacacacacaacacccactaacgcgccccaacccctcaccgcacacacgtcaccaccgacccacaccccacccacccaccggcccacacgcaccacacaaccacacaaaaccaacatgcacagacggtcgaacacacgacacccaccacccaccgccacgagcaactcacacacacctcgacaggcaatcacctcccccctctcgccctgcgcctacgcaccggtccgggcccgcacgccgccccccaccccctcgcgcatccaccccgcgcccacatcagcgtgccgccaccacaataaccccgaccccgtacggccccgacgacaacaccggccgcccaccacaccccccccccacgcatcctcccacgccacccgccactccgccgcgccaccgcgccgacgccccccccctccccccccccccccccacacaccc

SEQ ID NO: 679829 - DNA, 601 bp, Homo sapiens
  misc_feature (250)..(250): n is a, c, g, or t
  misc_feature (455)..(455): n is a, c, g, or t
  misc_feature (582)..(582): n is a, c, g, or t
ccaggcctcgcggcgcgcggtccgctcgccctcttcgtccgcccaacctgcggcctgtggaggcgtgaggcgacgacaggcgagcgcctcgagcagcgttagccgctgcggccgccggtcctccctccatcctcctcctcggccccccctcgcttccctcctcccacttcccgagctccggcggtgtcccggccacgctcggacgctgctgcaggaacaaaggaagaccccgcggtgggcggcggagccnaccttccgccttgctgctcctgacccggcttcccggtccgcggcgtgcggcacccagggcgcccggctcagccttcccggaggcctcggcccggcctcatcgtgccggcttcgcgcgcgaaacccggctttcgcatttgggaccctgcaggcagaaaatatggctcaggagactaacccagaccccgggggcccatgctgtgtanacacaggatgtggcttctatggaaatcctaggaccaacatggaactgtgtcaggttgctaccaagaacattcttcagaggcagcaaatagtggcagaatgagcccaatggggacacgctaggtggtncaacagtcctacctcagat

SEQ ID NO: 679830 - DNA, 744 bp, Homo sapiens
  misc_feature (250)..(250): n is a, c, g, or t
  misc_feature (598)..(598): n is a, c, g, or t
  misc_feature (725)..(725): n is a, c, g, or t
ccaggcctcgcggcgcgcggtccgctcgccctcttcgtccgcccaacctgcggcctgtggaggcgtgaggcgacgacaggcgagcgcctcgagcagcgttagccgctgcggccgccggtcctccctccatcctcctcctcggccccccctcgcttccctcctcccacttcccgagctccggcggtgtcccggccacgctcggacgctgctgcaggaacaaaggaagaccccgcggtgggcggcggagccnaccttccgccttgctgctcctgacccggcttcccggtccgcggcgtgcggcacccagggcgcccggctcagccttcccggaggcctcggcccggcctcatcgtgccggcttcgcgcgcgaaacccggctttcgcatttgggaccctgcagggccctgaaaaggagcctttaaaagtcaattctactccattggcaaagagggaactgcaatctggaaagtaaaggacttgccaaggtcactgacttagtggcagactagagactggaactcaggtctccattcccagcagagaccagaaaatatggctcaggagactaacccagaccccgggggcccatgctgtgtanacacaggatgtggcttctatggaaatcctaggaccaacatggaactgtgtcaggttgctaccaagaacattcttcagaggcagcaaatagtggcagaatgagcccaatggggacacgctaggtggtncaacagtcctacctcagat

SEQ ID NO: 679831 - DNA, 125 bp, Homo sapiens
ggttagtatgagaatggatgctactacaagggctatgtggttgattgaagagtatgcaatgaccgatacttaggtatgttagtcgaaggccgatggagcttgttataattatgccccatagggat

SEQ ID NO: 679832 - DNA, 437 bp, Homo sapiens
gcgtcgacatcgccatgtgaagtgcctgctcttcctctgccttccaccatgagtaaaaactccttgaagcctccttagaagccaagcaaatgctagcaccatgcttcctgtacagcctgcagaactgtaggccaattaaactgcttttctttataaagtacccagtctcaggtatttctttatagcaaagaaagaacggcctaatacatacagcaacaggtagctggatgggttgctgagttttatataaagtctgactggaatcagagaggcctgtgtctgaattctggctctaccttctactagttgtatgataattcacctctccatgcccgtttccctaagtgcaaagtaggtagaagaacagtgtatcctggccaggcacagtagctcacacccgtaatcccaccactttgggaggccaaggcagtcgacgc

SEQ ID NO: 679833 - DNA, 371 bp, Homo sapiens
tcgactggagatggagtctcgctctgttgcccaggctagagtgcaatggcgcaatcttggctcactgcaacctccgcctcccgggttcaagccattctcctgcctcagcctcccgagtaggtgggactacaggtgcccaccaccacacctggctcaatttttgtatttttagtagagacgggatttcaccatgttagccaggatggtctcgatctcctgacctcgtgatcctcccgcctcagcctcccaaagtgctgcaattacaggcgtgacagccgcacccggccagcattatctacctttcttaaccaactaaccattcatagtaatcatggttaacatgtacataccaggtactcttttacatgttt

SEQ ID NO: 679834 - DNA, 378 bp, Homo sapiens
cgaggattctcacacctagtcaagaccttaatttattatattttgatcgacagaattttaatgatcaataaatgtgctatctattctcttgtccaagggctatgctttattactaaaactcaggatctagaacaacttctgacacacagtaagaactcagaacccatgtttttcaagcaggacacagtggctcaaacctgtaattccagaactttgggacggctgagactgagaggatcacttgagcccgttagtagctaaaaggtaggtgtgcacgtgatgggggtaagggtaggttggtacattgatgcctgatagccttgtgctgccagggtccagagaagtctaactactcctcatagactttgaaccaaatca

SEQ ID NO: 679835 - DNA, 591 bp, Homo sapiens
ttaatggtgactgatgagaaatgttatctgtagtagttaaataatatgtgtatatctaattctagagtaagtctgtacgaggagtcattgtgctattttatttaggtgcatagtctgtccgtgtactaaaccatccacctttctagtgagggcttgatcctctgttccttgatataaaaaagcactttatataccataaatatcagcccttcgtctgtggcatatgttaggaatatttctctcagtttgtcaagtactttgtcttctgactttgtttaaggtgtactgtgatttttaatttggtcgaaaatttaaaaatgttcatagtaatacaaatgatcagatataaaatattatggcctctagatcttaagtcatagttagaaagcctttcccacccacaagtttaaaaaaggaattaacccatgtaaacattaagaagtagtatcatggtaaacatctagatcccaaatccacttggagtacatatctctgatatggtgtgagaatagaatcaaatatcaccttttcccaaatagctacccagaagtccgagcaccataatataaaaagtctgtctaaacccagatg

SEQ ID NO: 679836 - DNA, 152 bp, Homo sapiens
cccgataccactgaccactcgggctcacctctgtgtcgcacgcctggacacctagacgacaacggacggacgttcgacgcactgacggctcacccctgtgttctactgaccgcaaacgactcaccacggccactgtggcctgtacggtgtcc

SEQ ID NO: 679837 - DNA, 972 bp, Homo sapiens
  misc_feature (517)..(517): n is a, c, g, or t
  misc_feature (556)..(556): n is a, c, g, or t
agcgccgcgtggttagcgtcggcggctttaggcatggtcgactttttctggcccggctgggccaatcctgtcggttatccgcaggaagatgtcgagtttcaaacaggaggtggcgcaggttcggaagcgcatagagcccatgcgaaaaagaactagagatacaacttactcctggagtagtctatgtagcgccacctacctaaccttacgttgacgaaagctcagatcttttcatgatttactcgccagtttggcagctgtgacacgtgttcaggcgtgtccagaagtaacaaggactgggtaagagtagcagaaggctactgcattttgtggaggttgtgatgtctggacggatagtctggcataaatagtatgcgtgagaacatatgagagcatagtaccttgtattgtgtgacaagaactcttaggatgtgtacattgtatagtagccaccctgaagaacatgtacgagtacaaggacacttccctttaacagacctgggaagttattaccatntgttaagcacgtccatcagtatgcccatcaggtggaganagccggtataaacgtcggacatctggaccaactaaacatctaaaagtcgtgacggactgtgaggacgcgatgtgtaaaacacgaagagacaagcattacctcgaggaacggaaatctagctaatctaacggacattgagctactgcatttgtccttgcttcgagttttaccagaataaccggaacagtattttgcacaacaagtaaatcggtcgaggacggtctacgcaacaggccagggtttctcacgtacaggaacgaagacaccgacagtttccagggtactcttgaacactccttgagcaacgaactgtgggatacgcccaggggcccgcaaaccgaagtttgtaacaccaaccattcctcgggacgaggcgaacaatctccacgtgggctgcacctcacctgctgactgca

SEQ ID NO: 679838 - DNA, 284 bp, Homo sapiens
ggccttccccgcgagcggacgcggcagcgcctcgtctcgctttttcttatttttcccccctttcccctttctttttattttttttctttccttttctcccctcccccccttgcaccatttcccctgggaggcgcttacccggggcaggggcagagcgggtctcaccccgggcaactcccggactggtgggcatgtgcggataggcagccaatgcaatcagggatcacgagaaagagagccatgagagaagagtaacagcgagacagagtgcggcagaacggcga

SEQ ID NO: 679839 - DNA, 661 bp, Homo sapiens
ggcattactgcaggaaaaggtcccggagagctgagcagtcaagatgtgtgacttcaccgaagaccagaccgcagagttcaaggaggccttccagctgtttgaccgaacaggtgatggcaagatcctgtacagccagtgtggggatgtgatgagggccctgggccagaaccctaccaacgccgaggtgctcaaggtcctggggaaccccaagagtgatgagatgaatgtgaaggtgctggactttgagcactttctgcccatgctgcagacagtggccaagaacaaggaccagggcacctatgaggattatgtcgaaggacttcgggtgtttgacaaggaaggaaatggcaccgtcatgggtgctgaaatccggcatgttcttgtcacactgggtgagaagatgacagaggaagaagtagagatgctggtggcagggcatgaggacagcaatggttgtatcaactatgaagagctcgtccgcatggtgctgaatggctgaggaccttcccagtctccccagagtccgtgcctttccctgtgtgaattttgtatctagcctaaagtttccctaggcttttttgtttcagcaactttcccatcttgtcttttttggatgatgtttgccgtcagcattccccaaataaacttgctttttgggcca

SEQ ID NO: 679840 - DNA, 81 bp, Homo sapiens
ctagaagattcagcaaagtacttttgtgctcttggggaaggaatacccttactgggggatatgggcaccgataaactcact

SEQ ID NO: 679841 - DNA, 756 bp, Homo sapiens
  misc_feature (663)..(663): n is a, c, g, or t
  misc_feature (671)..(672): n is a, c, g, or t
  misc_feature (678)..(678): n is a, c, g, or t
  misc_feature (681)..(681): n is a, c, g, or t
  misc_feature (684)..(686): n is a, c, g, or t
  misc_feature (688)..(689): n is a, c, g, or t
ggcattactgcaggaaaaggtcccggagagctgagcagtcaagatgtgtgacttcaccgaagaccagaccgcagagttcaaggaggccttccagctgtttgaccgaacaggtgatggcaagatcctgtacagccagtgtggggatgtgatgagggccctgggccagaaccctaccaacgccgaggtgctcaaggtcctggggaaccccaagagtgatgagatgaatgtgaaggtgctggactttgagcactttctgcccatgctgcagacagtggccaagaacaaggaccagggcacctatgaggattatgtcgaaggacttcgggtgtttgacaaggaaggaaatggcaccgtcatgggtgctgaaatccggcatgttcttgtcacactgggtgagaagatgacagaggaagaagtagagatgctggtggcagggcatgaggacagcaatggttgtatcaactatgaagagctcgtccgcatggtgctgaatggctgaggaccttcccagtctccccagagtccgtgcctttccctgtgtgaattttgtatctagcctaaagtttccctaggcttttttgtttcagcaactttcccatcttgtcttttttggatgatgtttgccgtcagcattccccaaataaacttgctttttgggccaanaacaagannaacaanaanacnnnannggaattaaaacccagggatgcgtgacacacaagaaggccaaagaaagggccaaggggacaaaccctg

SEQ ID NO: 679842 - DNA, 586 bp, Homo sapiens
ggcattactgcaggaaaaggtcccggagagctgagcagtcaagatgtgtgacttcaccgaagaccagaccgcagagttcaaggaggccttccagctgtttgaccgaacaggtgatggcaagatcctgtacagccagtgtggggatgtgatgagggccctgggccagaaccctaccaacgccgaggtgctcaaggtcctggggaaccccaagagtgatgagatgaatgtgaaggtgctggactttgagcactttctgcccatgctgcagacagtggccaagaacaaggaccagggcacctatgaggattatgtcgaaggacttcgggtgtttgacaaggaaggaaatggcaccgtcatgggtgctgaaatccggcatgttcttgtcacactgggtgagaagatgacagaggaagaagtagagatgctggtggcagggcatgaggacagcaatggttgtatcaactatgaagcctttccctgtgtgaattttgtatctagcctaaagtttccctaggctttctttgcttagaaacttttccattttgtgctctcttgggtgatgtttccccgcagcattcaccaaata

SEQ ID NO: 679843 - DNA, 1009 bp, Homo sapiens
  misc_feature (1009)..(1009): n is a, c, g, or t
caagggaggtgtgaatccaggaaaagagagagagctcgacgcaactttaacagcttataggttattcctgcccgaagtcagaactttgacatcttgcaaagtgccatcagtaagcatggggggggggttgactgtaattcctgacagcacggaatggctcgtgttttctggtgtaatctagtaaagctcctggatcatactatgggtacgggagtgagactctactcaccatctcctgcgtccctcggtgctacaacggcttctttatttccttgctcactatatgagaggggggaagcagaacatcctatagaaagagggacaaacttaaggggcagctggaggccacatagtggctgcagttgcctcaaaaccctcacgaccatgataccgaccccgtgcgtcgatcagaagcggcgaatcaacgaggctgactagcacgagcacatctgattcgcgctgctaagtccagatgacaatgcgttgtactccatacgttgaccacccgccagctcgatgccgagataaataatacagagccacacgactccgacaacccacagacgatagaaccatatcgcgtgcagacgcgcatgccagcgtgcggccagtaagaacacgagagaacacgcacagacccggccgagggcgcgccccggacaacccgagccactgactgcagatatctcacaccgacacacccgtcagccgccctgagcgccagcatcgacgcaagatcatcgcaggcatggtctgggccaggcatctcacacgtcctaccccctcgcgtcgcccacaagcaaatcaccgaagatactagccagcgggggcggcagccctcgacaggacctcgcttacggacgaagtgagaaaccaggctcgacgaagcgcgtatgaatgagatcatacattgcgggacgacctagcgtacggccaccgagactcacgcgattgccagagactgcacatgaatcaacggacaactgtggctctaagagtagcagctagn

SEQ ID NO: 679844 - DNA, 141 bp, Homo sapiens
ggcagagacttcatgtctaaaacaccaaaagcagaggcaacaaaagccaaaatcgacaaatgggttctaataaaacgaagggctccagcaacagctaaaatctcaaagagaagaggagacactgagggaacaagacacttc

SEQ ID NO: 679845 - DNA, 464 bp, Homo sapiens
  misc_feature (47)..(47): n is a, c, g, or t
  misc_feature (74)..(74): n is a, c, g, or t
cacagtcactacattcaactagattaccaaataacaagcacattcanatatcttcaaatgttacagaacataanacattttcagaaatttggttctggatgatactctgtaagtctgcctaagaattcctttcaaaaagctggttattggccaggcgcagtggctcacacctgtaatcctcccaggactttgggaggccaaggcaggtggaactcccgaggtcaggagttcgagacgagcctggccaacgtggtgaaaccccgtctctactaaaaatacaaaaatcagccagatgtggtggtgcgcctacaatcccagccactcaggaggctgaggcatgagaatcgtgtgaacacaggaggcggagcttgcagtgagccgagatcgcaccactgcactccagcctgggcaaaagagcgagactgcacctcaaaacaacaacaaaaaacaaacaaaaaaccaaa

SEQ ID NO: 679846 - DNA, 402 bp, Homo sapiens
catgcctggcgggtcgactctgaagaatcccttgtgaaagcacaccttcatccagcgatacctcgccaatcggcgcgccatcagcgctgtaatgcagcggccgcatacacatgggcaccggtgtgcggcgacagggtgacgcgccccacatttaccggacactcggggccgaactgccacacgcgctcctcctggaacggcgtatcgcccggccaggtcggggtggccgtgctcaagggcgggctgatatcccaccacgtttttattgggttcattgcaaggctctcactcgttactgaggtgaatgatacgagggagggatgtgaattttcttgcgaattctggcgcgacacgggaaatctttcgcagttactgcgaggaaacatcggtttgatgcacaga

SEQ ID NO: 679847 - DNA, 698 bp, Homo sapiens
  misc_feature (605)..(605): n is a, c, g, or t
  misc_feature (613)..(614): n is a, c, g, or t
  misc_feature (620)..(620): n is a, c, g, or t
  misc_feature (623)..(623): n is a, c, g, or t
  misc_feature (626)..(628): n is a, c, g, or t
  misc_feature (630)..(631): n is a, c, g, or t
ggcattactgcaggaaaaggtcccggagagctgagcagtcaagatgtgtgacttcaccgaagaccagaccgcagagttcaaggaggccttccagctgtttgaccgaacaggtgatggcaagatcctgtacagccagtgtggggaaccccaagagtgatgagatgaatgtgaaggtgctggactttgagcactttctgcccatgctgcagacagtggccaagaacaaggaccagggcacctatgaggattatgtcgaaggacttcgggtgtttgacaaggaaggaaatggcaccgtcatgggtgctgaaatccggcatgttcttgtcacactgggtgagaagatgacagaggaagaagtagagatgctggtggcagggcatgaggacagcaatggttgtatcaactatgaagagctcgtccgcatggtgctgaatggctgaggaccttcccagtctccccagagtccgtgcctttccctgtgtgaattttgtatctagcctaaagtttccctaggctttcttgtctcagcaactttcccatctcgtctcttcttggatgatgtttgccgtcagcattccccaaataaacttgctttttgggccaanaacaagannaacaanaanacnnnannggaattaaaacccagggatgcgtgacacacaagaaggccaaagaaagggccaaggggacaaaccctg

SEQ ID NO: 679848 - DNA, 148 bp, Homo sapiens
acatccctcagtcggattcattttgacagttttgatctcagatggctatggtagatttcctaattccagtaacttttgtacctctttttgatgccccatcctcgtttaagttcaaaactacaaatagcaatgatataggtggtatcag

SEQ ID NO: 679849 - DNA, 523 bp, Homo sapiens
  misc_feature (10)..(10): n is a, c, g, or t
  misc_feature (19)..(19): n is a, c, g, or t
  misc_feature (30)..(30): n is a, c, g, or t
  misc_feature (82)..(83): n is a, c, g, or t
  misc_feature (85)..(87): n is a, c, g, or t
  misc_feature (92)..(92): n is a, c, g, or t
ttacgccgancccaaaacngtttatttttncccgaagagcagaacacacaagaggggggtttttattaaaaaccagaccgcnnannncaagnaggccttccagctgtttgaccgaacaggtgatggcaagatcctgtacagccagtgtggggatgtgatgagggccctgggccagaaccctaccaacgccgaggtgctcaaggtcctggggaaccccaagagtgatgagatgaatgtgaaggtgctggactttgagcactttctgcccatgctgcagacagtggccaagaacaaggaccagggcacctatgaggattatgtcgaaggacttcgggtgtttgacaaggaaggaaatggcaccgtcatgggtgctgaaatccggcatgttcttgtcacactgggtgagaagatgacagaggaagaagtaaaaatcttgtggcaaaacatgaagacaacaattttttttaaatattaaaaattccccccaatgtgcttaaaggtaaagaccttcccaagcctccca

SEQ ID NO: 679850 - DNA, 821 bp, Homo sapiens
  misc_feature (366)..(366): n is a, c, g, or t
  misc_feature (417)..(417): n is a, c, g, or t
  misc_feature (445)..(447): n is a, c, g, or t
  misc_feature (459)..(459): n is a, c, g, or t
  misc_feature (519)..(522): n is a, c, g, or t
  misc_feature (528)..(528): n is a, c, g, or t
  misc_feature (531)..(531): n is a, c, g, or t
  misc_feature (536)..(536): n is a, c, g, or t
  misc_feature (544)..(544): n is a, c, g, or t
  misc_feature (618)..(618): n is a, c, g, or t
ttttcggccctcgcccccaaacccttaagagggtgattgtgaagtgtgggccaacgccctatcgctttttagcgcttttggggtgtgagcgctgattttagtggttacttgtgaccacttgggaacactgtccccaattcggcgttttatggttatatttatagatttatagagattgccgcctttttggtaattggtcaatattcaacgatttttcgccctttttctacatattatctcgcctttgttccttcactctcccattaggctaaaaagttgttgaaatgatgaaagtcccctcctcttgactatttcacaggcgccccaaagggggatatgctacatgtctattaatgttgagtaacnccagttttttcaccagtttcgcaggttgtaaaacgtctaccacttgtttanggagtttttttttttttttttttttttnnncagcttagaacnttctttattaaggaaggtctttcaggcactttcattaacaggcacatataagcttagcannnncccttncanagtcncagttccnatggcctttgtaaggtccacccagagcccagagaaccacacatcatgcctttcctgtccaaaccataaccaccnacccactctagcttctggtcctgtgaggaatgacgggaagtagggagtcaagacttgatattaatgtagatcgcatgtgacacttgcgtggccagcagacaaggccccccacccatgcccaggcttggacaaaatggtggctatgttttctacatagtcggtccgcgactgcctaccccccccccccccgcttccccccctcg

SEQ ID NO: 679851 - DNA, 756 bp, Homo sapiens
tcaaccgccgcaccggggcaatcacacacccaccctgctgtggcagagaaaagatatcccgcaacagacccccgccgctggcagagagcaccggggagagtggggatgacaaatcacgaatatctgtactctcctgggagatcaaccacacgacccctgcggctgggggacggccgccagaccgactgcgtccccgctcccaccaaagaggagcacccaccacgcgctgcgactctgcctccggcagcgagacaaaattaccgtgggggagaaatagtagtatagaaccactcgcggacaaaacgccccctgctggtggggagagccccccccgtatatagggaggacctgcgtgagacagagagcgcggggggataaaatacaagacaacgcccccccgcccaggtgctgttcttcgccccacaaacataggcagagcgcgcccctctctcaatacaagagagggggttgattgccaaaagcaaaaatagggcgcttcctggtccgaaccgattgatagacgcgctcgctctaactttagggggtgcgagagatatctctctctctctgtgtgggatagattaactctcgcagtcagctctgatcgttacctggtgttgctctaaagagtcgccacagagcgggtatagacacacctctctctcttctcaagggcaccgggcatagttaatggggcaaacgccccctgccgagtccaattacgcgcttttggaacccgcccaacaaatgcagaca

SEQ ID NO: 679852 - DNA, 344 bp, Homo sapiens
ggcattactgcaggaaaaggtcccggagagctgagcagtcaagatgtgtgacttcaccgaagaccagaccgcagagttcaaggaggccttccagctgtttgaccgaacaggtgatggcaagatcctgtacagccagtgtggggatgtgatgagggccctgggccagaaccctaccaacgccgaggtgctcaaggtcctggggaaccccaagagtgatgagatgaatgtgaaggtgctggactttgagcactttctgcccatgctgcagacagtggccaagaacaaggaccagggcacctatgaggattatgtcgaagtcttcggtcggtgggatcctctaggca

SEQ ID NO: 679853 - DNA, 374 bp, Homo sapiens
tacgatcggctcggaccctaaagccaacccccgactggtgcataaaaaacggaaacaatgggcaatttctggcactagtgcaaagattttgcaaggggttcagcgggccccaaccacagaggggcctaccaataacgccctggcttagcctccccgggggggggggctgttctttcccgccctaatcccccttttgtggcctttttcctctctggccatttttaaaaaacacacataggcggaaatcgacccatcaaatgtcattacagatttattaagcctgatggagaaagacttttaacagtaacgtctccagaaagcttaaaaggggcccttttattcagtctggtgctttgaaaagctaaatatatttt

SEQ ID NO: 679854 - DNA, 416 bp, Homo sapiens
  misc_feature (225)..(225): n is a, c, g, or t
tgctgcttaggtttgggtgggggactaacaactgctgggaggggagctaggggcatggaaaactggtcaaactcaaggtggctcctttgcaaactgaccccagggttggttgctgggggcatgttcccgcttatgcaacctttgcagtttggtagtcccctggcccttgggggacccctcccaaagccctgtttcctgggtttatcccccctttcctttccccanagctcgtccgcatggtgctgaatggctgaggaccttcccagtctccccagagtccgtgcctttccctgtgtgaattttgtatctagcctaaagtttccctaggcttttttgtttcagcaactttcccatcttgtcttttttggatgatgtttgccgtcagcattccccaaataaacttgctttttgggcca

SEQ ID NO: 679855 - DNA, 1058 bp, Homo sapiens
tggcgacctgggtgcggagtgggcaaaaagccactgggggaggccagtcccgatcagtcctttctggctccagctccagatcccgtgcggagcaacagctgcggtcgcagtctccaccaactgactccacctccatcgccgtcgggggaggtggccgtgcggaccccgtgggtcactgccgaggaatgaagagaggcggctgggaccccgagcatcctgacccggactagggccttgccccctgggagcccagagagggtggaggcctgaattttgatctatgttctacctacatccagctggctgaaagtacttgaggatcacatgaccctggacatggatgcatgttctgtcagattaatgtccgttccacaggagcagagccagggactagcgcgagatctcctagacggacaagacttgggctgtgaactgccgccctcagtgattttgaacagcgtacgtcaaagtccatgctggaaacctacccccatccttatagtgagggggagtggttggctccaggaccccctgaaacaagggttacttgacaggagagcctacgtcgcacctccaccgagccatccatccagacggcaggatgacaatcgattcaaagcattcaggaatctccaactgtatacaaatgaagacttccagacaggcattcatacgagagagacctcaattgagcagtacatgctgggttgcacttgggaacaggggcaggggcgttgaactggatgagatgagatgatggatccccagcctcaacaagaggactgcctacctttggacaactaactggcccatgggcaaacatgacaaccatgccattgacagaccaaccccattgagagaatgttgagggggtaacagatggaacgggaggaacactgacaggacaggcaggaaagagcgctgtacatggcacctggataggagcaaaggggcagaaaacaagggcaacagcggtagaagaaagcgcgaagtaaggaagcagagaggaacacagcgccaataacactcagcacggcacagcagaaaaaagaaggaga

SEQ ID NO: 679856 - DNA, 295 bp, Homo sapiens
ctggccgtcgtattaacaggatttggtcggtccccaaggcctctggtgtaccggtggttcgggcccatgagagtgctgtgacaggcctcagccttcctgccactgccgaatatctcctgcgctcctccgatgctcagtactgcgctatctctgacatccagataaggcccgtgctcaccacggtgacccatgaaccctctggctgctctctcacctgtgcacagttccaccctgacggactcatctttggaacaggacccatggactctcccatcacgatctgggacttgctgga

SEQ ID NO: 679857 - DNA, 625 bp, Homo sapiens
tattcctcatcacccaactaaaaaaaaaaaaaaaaaaaaaaaaaaaaaaaaaaaaaaaaaaaaaaaaggggggcgcataaaaaattttccccgggggggcccaatttattctggaccccctttttttgggaacgagggggcccccaaaaagggggcttttaaactaatgccacgctgccctgccttactacaaaagcgtccgtagtatgtgggaacaccgatgctaagctgggaactttcttgtgaacacaagcaccctactaacatcctgttgggggagacacatatttgtggcacaaatccacatcaaacgaatttagagcgccctccaggggacatattatcaatactttgacagtgttaatgtgggtgtaaacaacaagctgattatttcccgccacgtgagcgactaaactttggtccctcgctgactttttgatttttgctaacaactttttttttcccccgggacctatgtataataaaccaacccttcgttctatacaaatacttctcacactatactactaaactaaccttccgtacaccaacagagaaacactctctcctacttgatcactatctaccaactactatcatattcatacacagcaccaactacaca

SEQ ID NO: 679858 - DNA, 1530 bp, Homo sapiens
ggcattactgcaggaaaaggtcccggagagctgagcagtcaagatgtgtgacttcaccgaagaccagaccgcagagttcaaggaggccttccagctgtttgaccgaacaggaggctgacaatgaggtagacgaagaagaggaagaaggtggcggaggaacgaggaggcacggaacgaagaaggtgatggtgagcgcaagaggatggagatgaagactgagcgcaacgctgactcagctacgggcaagcgggcacgctgacgatgatgcaaggatgaccgactgtccataccaagcaaccacaacgaccgcacgaggatcgaatagacagcgaacaacaggaaacagttaacactaaaaaacaaacaacacaaacacacaacaagcacacccaaaccaccacaaccaacaaaacacacccaccccccacaccacaaccaaaaccacccacccaacacccacccccacacacaacaacccaccgacgaccagacgacgaaggcccaaccagacaagagagccaacaccagcaccgaccaacacgccccacgaccgcaaaccaacaacgccacccaacgcaaaccgaccgacgcaaccagcacagcgcacacgaaaccagaacgaccgaccgaacgaccacaaacacaacgacgacgcacaaacgctgacgacagacagcaagtggcgacgcaacggccacacgacgaccaaccaccaacctcaacccaacggccaaccgcaccccaacccacaaccccacgcacaacccccaacgctacccagcccacaacgcacggcgcacaccacacggacgcgcgcgaacgcccacaaccgaacgcacgacgcaacgcacaaaccgacgcgaacgccacacacaggaccgcagcaaccaacagctcacagacgcgcacgacgcgcgatgcacaacccgaccaacgcacgcacaaagacgcaacgcccgacgaacgccagtaccgcacaccaccccccgccgacaccgaggcgaaacgcaacggcagcaccagaacggcagtaacccaaaaagcgacgcgagacacaccaaacgcagaatgggcggcgcagcagaaccgagagcgaagcacacacaaccactcgaacacagcgtgccgagggcgaaacaacacacacaacacacacgagtgaacaaaaccaacacgcgaaacccaccaaaacgccacacacaacaaacgcgaccgcaacagacgcaccaataacccaagacggacgacagccacatcgacgaacaaccataacgacgggacgagctcaacgaccgaacaacccaacgcccgcacaaaccaagccgaaaacagcgacgatgatcggacaccggacgacgcaaacagacaaacccaggcgaagcgacccacaacgccaagagggcgagcgatcaacaaccagaccgcacaataccaggcgagacacgaaccaagacgacagcgacgaccacgacaacccagcagcgagccgcaaaagacccaatgtgacgagaaccaaaggccagctgacca

SEQ ID NO: 679859 - DNA, 168 bp, Homo sapiens
ccgtgaaggggtccaagacgtatcgttacaggcctatactgtggcgcacgtgaaattagacgttatcagatgtccactgaacttctgattcgcaaacttcccttccagatgtcatggtgcgatgaacattgctcagtgactttaacaacatgatctgctgcttccaga

SEQ ID NO: 679860 - DNA, 243 bp, Homo sapiens
  misc_feature (50)..(50): n is a, c, g, or t
  misc_feature (52)..(52): n is a, c, g, or t
  misc_feature (54)..(54): n is a, c, g, or t
  misc_feature (57)..(59): n is a, c, g, or t
  misc_feature (63)..(63): n is a, c, g, or t
agtataaaccgaacagggaaaggcacggactctggggagactgggaagtntnanccnnncagntgatggcaagatcctgtacagccagtgtggggatgtgatgatggtgatgggggtggtgatgatggtgatgggggtggtgttggacagtggagatggaagtgatgatggtgatgatgaagtgatgaggtgatgggggtgatggtgatggtggtggtggtagtgatgacagtacctgttcag

SEQ ID NO: 679861 - DNA, 706 bp, Homo sapiens
ggcattactgcaggaaaaggtcccggagagctgagcagtcaagatgtgtgacttcaccgaagaccagaccgcagagttcaaggaggccttccagctgtttgaccgaacaggtgatggcaagatcctgtacagccagtgtggggatgtgatgagggccctgggccagaaccctaccaacgccgaggtgctcaaggtcctggggaaccccaagagtgatgagatgaatgtgaaggtgctggactttgagcactttctgcccatgctgcagacagtggccaagaacaaggaccagggcacctatgaggattatgtcgaaggacttcgggtgtttgacaaggaaggaaatggcaccgtcatgggtgctgaaatccggcatgttcttgtcacactgggtgagaagatgacagaggaagaagtagagatgctggtggcagggcatgaggacagcaatggttgtatcaactatgaagcgtttgtgaggcatatcctgtcggggtgacgggcccatggggcggagctcgtccgcatggtgctgaatggctgaggaccttcccagtctccccagagtccgtgcctttccctgtgtgaattttgtatctagcctaaagtttccctaggcttttttgtttcagcaactttcccatcttgtcttttttggatgatgtttgccgtcagcattccccaaataaacttgctttttgggcca

SEQ ID NO: 679862 - DNA, 292 bp, Homo sapiens
gtagagacaggttctcgctctgttgccagggttggtctcaaactcctgggctcaagggatcctcctgccttggtctcccaaaatgttgagattataggcatgagccaccacgcctggctggggttttgtttttgtttttttaacatttgtcacatttcacaaaggtatttcagaatctctgagaaaagtgctataatgtctaatgatactttatatttggacagcactttcgtttgttttttttggcggggggggtgggagaagtcaagtaacttacatatagtgaaattta

SEQ ID NO: 679863 - DNA, 971 bp, Homo sapiens
ggagagaattagcagtaccagagggcaatggtggctgctgcatgcatcagcccacaccatgctgaccccgccgttgctcctgctgctgcccctgctctcagctctaggtctgctgtgcagtgctatcgacgaccacctaaagtacattgacagtccacaaggcatgtttgccctgcatgaggtatccagaaataagacctgttatctccaagaaggtgcatggtcggtgtgcgaacgtgtgatgcacgggacgtgccctatgaacggaatactgatcggagtgtcctcccatgcagtaattttgtccagcgagatgtaaggtcccatggcgtatgccatgaccataacgagcataactgccttgggtactgagctgtgtgttcccatgtctcctggctctgcaaatggggtccaggactgctatggacggctcactatgaggggcccacactgcccgatagcgtcgcaaggtcaacattgtgtcttcgtccacctgtgcgcttgagcaaaggcacacaatttgttgtctcctcaacgacatcggaattgcggcctcacactagctttagctggaaacgaggcgaggcgttacaaggcttttcatgggcaggattggccaagaccttgcacaaatgacttgacggagtggaagtgcattcaagatggtacgggcaacccgtgccgatacccacgccttaatagcaccaaagcgaccagaacgggccatccctttcacttacttgtgagctagttggtgtgaaaagggaataaccctccttgacatgcctgtgattaaacccggcttcccttgccacatgggaccacatggaaacggggaagccaaggttatgaaccagggccccccccttggtagagctgtctcgactatgcccaaatattcccaagaaaaggattctttgggccaacggtatcccttgaagttggaggggccccagaggtagtcattacca

SEQ ID NO: 679864 - DNA, 920 bp, Homo sapiens
tgaaagttgttccttgaagtcggataatccgcaagtccttccggggggtctaacaacattaggggctgtaaaactaactggcaaaggtccgtgccttcattttcggaaggccagccagaacaacgaatccgacggggagggaatgaacaactcccagataagtcctcgtagtaacactcgcccgtgaggtccgcagcttcgttgattgaagtcagctacacccaagaacccacgtggaaggaaccaattactgggacacagggggacttagcgcacgcagcgctccatgagaccatgagctttctcaccgggcaggaggagcccatccccagctacacgtctggggcccagcgctctcggagcatgctttggagaaacatgctatggcgtctagtctagtgccaatggccaggctcctagtggactctacaggtttctccaggtacgaagagatgtcttctgtgcccagaggagcagtactcaagccgcaccagagatggctgcctgcccaggacagagaccttcctggcctttggacgaccccctgggagctcatgctcgccttcggtggcgctcatagctggccagcctgcgcagtagtctggtcctcagaactgttactgaagcaccgagacacacctgtggttcggggccaacaacagagcctctcagctgcacgccgctcagcttccctgaccctatgtcgccactgctagtcccttgccttgccttggttgtcccacacgctgccacctagccgcctctaccagaccagcctggccaacatggtgacagccctgtctgtactcacaaatacaaaaattaaccagcgtgtcgtggtgtgcaccatataatcccagctacttgggaggctgaggacaggagaatcacatgactgggtatacgacggtggcaggagc

SEQ ID NO: 679865 - DNA, 403 bp, Homo sapiens
ttaggaggacgccaatcatcctggatgggggctgctccagtgacctcctgttgccttcatggcctctttaaggtcctgtcttcaaatacagtcaagttttgaggcattagaggtcaagacttcaacatatgaatttctgtgggacacaattcacacataacaggaggggtggcataaacttcctcctgtgagttgagacacaggaagagcagccagacatgggcaagtgtggaggagagtggcctctttccacctgtggaatgtggagtgttgcccagagaaggcaaggtgagtggggcttgccagggacctggccaagcaccagccactgaatccttggtctctaataaaacgaggctgagcttgccaagctttggcaactacacatggttggttgggggtg

SEQ ID NO: 679866 - DNA, 904 bp, Homo sapiens
acagcaatgtatatgtgaactgaaaatgcaacagacaggcagaaagaattaggaatgctttgttattataaggtattgtgcaaactgtgaagtggtgatgtgttattgtattatttaaaagcaatcttggattgcttgtaaatgtagattacaaacactagggtaaacactaaaacagtaaaaaaaaaaaaaaaaaaaaggtatatttgaaaatgccaagaaaagagaattctaattctcataaaatgctcatttaaaaccacaaggccgggcacagtggctcatggcctgtaatcccaccattttggaaggctgaggtggggtggaatcacctgaggtcagggcagttagagaccagcctgccaacttagtgaaaccccatctctactaaaattacaaaatttagccaggtgaattgtcaggcgtctgtaatcccagctactcaggagatcgaacgcaggaaaaatcgttgacccctgggaggtggaggtcagggcgtccaacaccaggctgcccacgtgttaaaacctcatctctactaaaaactccacaaattcgccagctggtggtgtgcgctataatcccagtttatagcgcagacttaaggcccgaagaatccacttggaacccaggagggacgaggtttcagtcgacgccagaatcatgcatgccttcagtctgcggacgcgaccattatccttcctaaaaaaaacacaaacacaaaaaaattttggcgggtccgcccaaagtctaaccactcgtgggcgcggcccgagtactacggctcagtgtcagaaccggcacagtgtgttcccaaaagccggcagcggttgaacacagccggtcgctcagcgcatcccccgcgccgacacgcgacgggaagcacccccccggcaccatgata

SEQ ID NO: 679867 - DNA, 382 bp, Homo sapiens
atccgagacactacgttgtaaacgaggggagtcctcaccaggcactgtttcccccattccatccatgaagtgccactcaaattcggtagcatactctggagattttgtaaagttcatagaaggaatagaagtggaagcctagtgaggcaagtatgtaaagtgccagttcccatcggggcatcatgggtccttggcacgaaggttcccgatgcctacgctgagagtttctccgggctgtcccgggcatgcggcgacggcaacgttcacgcgcgccgcgatttcccaagagccctctttcggaacttccgagtcccagcgacatcgtcggcggctgccattggcccaatgtcacccgagatgaagaatggcatgaaatcactga

SEQ ID NO: 679868 - DNA, 201 bp, Homo sapiens
cgaggcacgagtgaataggcagactgagtcctcataaacttttcacggaggacagaatccggagcgcgtccccagacgactgttctactcgtgttggagtagacaacagccctactctccgcctggcacaggatgagcatggcttcggaattgctaagctgcaggctgtctccattcttaatcgtataatggccgtcattg

SEQ ID NO: 679869 - DNA, 408 bp, Homo sapiens
attcgcggccgcgtcgacggcatttgaggctgtagtgtgcaatgttagcaccatgactaggcactggactccagcctggggaatgtagtgagaccctgtctcttaaaaaaaaaaaaaaaaaaaaaaggccaggcacagtggctcacatctgtaatcccagcattttgggagtccgaggtaggtagatcacttaaggtcagcagtttaagaccagcctggtcaacatggtgaaaccctgtctctactaaaaatacagaaattagccctatgtggtggctcatgcctgtagtcccagccacttgggagtctgaggcgtaagaatcgcttgaacccaggaggtggaaattgcaatgagctgggatcatggccctgcgttccagcctgggtgacagagcgagactcagcctc

SEQ ID NO: 679870 - DNA, 143 bp, Homo sapiens
ccctctgaaaccagagggcttatatcaaagcaaaggtcaaccatggcatgcatcttctctgtctccatctcaataaaagcctgacttttcatcctcatcaatatgtaattctttattgtcccataaggctcagcaagcttgag

SEQ ID NO: 679871 - DNA, 576 bp, Homo sapiens
gtaaagtcctggggttcggttgagcactgcccctggagcacagacggtgtatcactctgtagcccaggcgtggtagtgcaatggctgcgatcttggtcaccgcaagtccccgctcccgggttcacgccattctcctgcctctgcctcgcgagtagctggaactactgtggcgtaccaccagatccagctaattgtgttgtatttttagtgcagactgggtttcaccgtgttagccaggatggtctggatctccgtgaccttgggatccgcccgcctcggtctccgaaagtgctgggattacaggcgtgagccagctgtgcccggccgagacttaaaattatgcattgccatattgcgtggcataaaccaaaggccaacagagaggtgacctttcaaattactggcacaagaagagccgagatcagaaagctccaacttaatgcaaacatcgacaagaaatcggacagaaatgacttctgtgtctggtcaacttaacataacatgacatattgccaagcatatatggcttttgaggtagaattgtctataaaggttaactgctttacacaatataca

SEQ ID NO: 679872 - DNA, 203 bp, Homo sapiens
caagcagttaatacagactcagagacacttgggtagggactgaggggagaggtgggagggaaagaaagaagatttgggatgagttgcttcgggaacagagactagggagggaccgatgtgtaaaacgaatgcctggacgtagaggcgcctcagcaccatttgcccattttatgaacaagaattatctacgatcttgtacggat

SEQ ID NO: 679873 - DNA, 504 bp, Homo sapiens
tttctcttttatgccttgaaaaatgtgtagcattcattagtgaattaggatttcattattcaaagaagacataaggtcttcgaagagcagatgactgaataaaataatacctaacagcagtagaatgaggggaggacatattcaaggaacattttatgcccattagattggcagaaatttttaaaaagtgacaataccgtataaaggtgaactttcctatactgatactgggaacatgaatttgtaccattcagggaagagaaacttgataatatctggtgtagtctgaaggggcacagtccctgtgacccagtgaggacattcctcattatttcccttgccaaacatttcacatgagtctataaggagctctatataagagaggtcactgcagcctcctttgtaagagcaagaaaaaaaagcaaataagtgtttaacaataggaacatagataaattaggttatgcagtgaatatttgcactctgactaaagtgagtgaatca

SEQ ID NO: 679874 - DNA, 496 bp, Homo sapiens
ccacctccacgatcccggagctcaagcaaaccctcctgcctcagcttcccaagtagctgggactacaggcatgcgccaccacgcccggtttttctggtagagacaaagacttacaccatctacaggtttacatggaaaggtatcagtcagtggcgttcacactcccaatatttcacgagcaacagagtaggcattaacagggatagagactctcagtcatgttgcccaagctggagtgcaggtggctatacatctggcacattcatagcacactataacctcaaattcctgggctcaagtgatcctcctgcttcaggtctcctgaataagctgggtactacatggcacagcgatccattatacctcatctgcaattcatctctgaaattatgaaaaccccgtgaaggggaggaaagtaacacagacaagaaattaccacaactccaaagcccaactatcctaacacttattataactatcctgagggaagatagtt

SEQ ID NO: 679875 - DNA, 1288 bp, Homo sapiens
tcctgcccgcccccccccgttgacctttattttccccggcgttctcttataagggggttttacccacagggccccttgtgggttggtcgcaaaattttcgcggcccatcggagatgtgtgcgggggaaatttcgcgggtgctcctacacaaagagtgcccactatgtggtccccccgcgagaaccttggcgggttttttgttggcccaccaaaatcgtttatagttggtggagcccccccccccctggggggggacccccccttttcggagggaaaattctttctcagttgttcgtgcgccccccaaggaggcgctgtataaactgtgttttcttcgcgccggagaatattattggggcgttctccgggggaccacaataacactgtgtaagggttctttgttgagaggggctcacacaaaattggtatcccccttggggccgcccaatgatgtctctcgctactaaaggcccctcctccccggggggagatcttctgctgtttgacacgcgtcttttgattgtgagaggagacgggagctcccctcgcgggcgcgttctctgtttttcgcgaaagagggctcgagcccccgcctctcgtggcttgtgcgacgtcggcgcggcgcttttgggtgccaccgaccactattgtgtgggtgtgtgtcctctggtgagattggagagggcggcacaacaagatatggagagagtcttgtggggggagtagaacaactatctcttctgggggccgtctcttgagaagaatataaaagagagcgatattctttcttctcataggagaggatgagatcgccgctctctgtcacaagaggcgcacaagacggtgtgctctcttcacaaactgggggtcttttgtggcacacaagatgtctcatatcccccacccgcgctgtcgcgcgtggttgctgggatatccgcgccacggcgcccactatatacacacgagggtttcacgcacacagacacacgacggtgggtgtaaaactatcccgctcctctcttcactagtgtttccgccctgtgtatttcccagaaagacacactcgacatttcttcttctgtcgcttctccctacgacggggtggccacccaccgcggccgccgctgtaagaagagaagaaatattcccagaaagaggccacacgagagtggggcatggggcctctgagaacgcacgagagaggagagattaagatccccccgtccctcctgggctgctggattttttcgtgtttcctgcccaattaaccggatcagcgcctttacca

SEQ ID NO: 679876 - DNA, 429 bp, Homo sapiens
cttgccaatgagaccctcaggccccagatcatggagctaactgtattaagaggcagagaggctgcaggtagagattgaccagaagaaggatgctgataatctagtgatgcccagctcaagaacggtagccttgactccccagggaagcaggatactgaggaagcatgaggaggaagatgataaggactcactgaaaactgaagcctaacctaggctacgggtcagaccttcccaattaccgctggacccatatcctgtcgggtcttgggacttggcggtccttttctgtgtgaacttccggctgaaagggaaggacatggtggtggacatccagcggcggcacctccgggtggggctcaaggggcagccagcgatcattgatggggagctctacaatgaagtgaacgtcgaggagagctcgtggctcat

SEQ ID NO: 679877 - DNA, 669 bp, Homo sapiens
gctgtgagtggggtggatatccagttccccggctgccgggcagcgtctgcccaccagcacactgtagaagatgaaatccccgaggccaagcttcacgccgcctttcctcctcttcctccagtcccctccccgtggagtagccagctcgaagggaggctcaatagacttcgagggtatgacaggctccccaaacactgtcatacggagtcttcttccatctccgcggtcgtaaggggagctgagagggcaccctgcagaggcaggggtccacgcttcgccagtgccaatccgtccacaccatgtgcagactgagtatatcaagggcaggcaatatgggctcatttctctcctgggcagtttctaccagcattctcagaggccctttgggacacagcacagccacgagatcatacacagagatggcgcccaggatgacccacgcggaccactctgggaggtacttgatgaacactagggccatgagcgcactgatcatgatgaggtaggcctgctgcagcaccagagggcccttccagtggatgcacaccatgcccactgccccgaagttccagacagtcagcaagagggtggggtagtccatggccacattgtaggtcttgagcacttccccaaggtagatataggtgaagaggaacagcagcatcagtg

SEQ ID NO: 679878 - DNA, 278 bp, Homo sapiens
caggaagtatgaagcagctgttatcagagcaggtatagtctggcacactcaccctccgattgagcctgatcacgcccatcttacatgtgagacccatcatggtcaagtgcttgcccgccacaaggtagcctctcaggaatctatctgggtaatttggatctggctctcaagacccaaacacctctggattttcccaatacccgctaatgtgactcagcatccccgaacccagcaaattctggtggggaaagagtgtggtgggcaagagataaggagcc

SEQ ID NO: 679879 - DNA, 224 bp, Homo sapiens
  misc_feature (199)..(199): n is a, c, g, or t
aatgtcggtgtgtctaatgtcggcgtgtctctctctttctttctttctttctttctttctttctttctttctttctttctttctttctttctttccttctttctctctctctctctttctttctttccttccttccttccttctttctttccttcctttcttccttccttccttcttctctctctctctctctctctgnttcttttttttagctaccctggagg

SEQ ID NO: 679880 - DNA, 628 bp, Homo sapiens
caagtagttttgtattgaggcgcgtttcctggatgctgcgctctgcctaatcttctcagtgtcgattggctggtagtcctcccgcccgttcagtgatagaggttccgctaggctcggagttctcagcttccttcccgttggtgagcgtgatgcctgtcttgggtttattattgcctgctcacttttgcatgaggaactgcatctccttgctgtccttgacagggttgaggacatacatgtccagccggcccacacccattttgtggaagagggtcagtggcccaatggtattgctgaccacacgatatagaggctcagcctggatgcccaggcggtttaagtgctgcagagtgaggcaggcctcctcaatgctacgcttggctttccgggaggcatcaggaagccgcagcttctcaggcacgttgaaaaagacaactccaagctcaggagagataaggttcttcacccagtcgctgtaactgctagagccctgggactgctcctcctctagctctgccaatttgcgctgcagtagtccattgatgcctggcaggttgtctgacccaatgtgtgtgagtagcaccgagtcaatgcggtcaagtgccgtacaggttccaaaaaggattgg

SEQ ID NO: 679881 - DNA, 1070 bp, Homo sapiens
  misc_feature (689)..(689): n is a, c, g, or t
gagtagattcgtcatttctcttggctgagagcgcacatggatgtcgcacctcatccagaccctgaacggatacatcgagacagccgtctggattgacgcagcgcggtggctgatatatatgaggcatgtgaaagaggacgcagctaggcgttgatcggctatctaccaacgcatagaaagacgtgatgcctcgcaatttacaaatgcgctgactcctgtacacctataccccacggctaatcggagcgcctgatgcagcacttccccgtttaactttaggatacccctgctggcacagggcgccttgggccactgcgaactggttagtggcaattcgtggaattgtgggaaggttagttacgacccgtgcctgcactgaaagctcactaaaggtgaactgctatcaatggaggtatcaccgtggtgcacgcggacatgggggcgaacgaccagttcacgatgacattgaacgaagaccatattgcctcttctttactcgtcctttgtgcacgatttctcgcgtctccgtaccccacggtactaatcagctatcaatgctgtaatgtctgaagcatcagagactgctcgtgctgcaacacactgttgtgggctgaggtgattggagcaggggctgggactgctgggtgttcccacttggttacgcttctttgcttgtattcattcacttncaaggtgcttgcgcatctgcgcagttcgcactatgcagaattgctgttctcacctgtcattacgctccccaaaacatgctcttgtagacgtgcgtcataacctgggatgaccaccgagtctactagcatgtagctggaagctatcgctagcggaaaagctaacaagggaccccccttgtggttcggcacactcttttcttcttatcgaactatagtgtcaggggatggctcgccttgagaaggtacgccacgcaagtaggtcgtattcgccagtttgccagtgtcccttctatgtcaattgtaggaatggctcaaccttgctgggggacaaggtcagtgactggagcgggcaaaatgaccgtaaaggggcctcccttgttg

SEQ ID NO: 679882 - DNA, 160 bp, Homo sapiens
  misc_feature (44)..(44): n is a, c, g, or t
  misc_feature (149)..(149): n is a, c, g, or t
cataatgtgaccagggtttgccttcaggtggtggggttatgggnagttttttttctcttttacttctctaacatttcagattctgcagtaagcatgtgttacattgtaattataaaagtaagtaacttcatttatgaaaaaagatttcnttgtggtccta

SEQ ID NO: 679883 - DNA, 231 bp, Homo sapiens
ctagtgatctaaatctacaaaaatttaaaaatagcaaggtgtaggtggctcgcgctgtagtcacggctactcaggaggctgaagctggaggttagcctgagcccaggaagcagagactgcagagagccaagaccctaccaccatactccagcctggcgcaacagagtgaaacctctgtctcgaggactcactcgagccccagggctaccgacgctcgacattcgtaactca

SEQ ID NO: 679884 - DNA, 126 bp, Homo sapiens
cagggtcaccactcaccacctgtccgaatacaggccttcgatacgggataatcctagtttattacctcagaatgttttttgcttcgcggtgattttccgtgacgcctttttaccatctccatgcct

SEQ ID NO: 679885 - DNA, 880 bp, Homo sapiens
atatggtctaggagagtaaaacctaggatataagtcggggaaaaatgagtaacacctcaaaagcacaggcatcaaaagcaaaaataaacaaatgggattatatctaactaaaatgctgttatacagcaaagaaagcaatcagtggagtgaaaagacaacctacagaatgggaaaaatattgcaaactagtcatctgacaggagattaatatccagaatatacaggaaactgaaacatctcaatatcaagaaaacaatctgattttaaaatggtcaaataatctgaacagacatttctcaaaaagagatttaaatatgtccaacagataaataaaacaaaatgtgtggccatcaataatcttcaaggaaatgcaaatcaaaaccacagggagttatcatctcaccccagttaggatggctcgtatcaaaaaggtaaaaaataaaaatgctggtgagaaagcagagaaaagggaactcttatacactgttggtaggaatgcaaactagtgcaaccactgtggagaacagtatagaggtccctcaaaaaactaaaatagaactaccatatgattccggcaatttcccactaactggatatttatcccaaaggacaggaaacttattacatgtggggaaggacatctgcaccccccatggtgtaattgccgcatggtgccataatagccaatatttgggatcacacctagggtgcacgaacgggaaaagggggtaagggccactgggaaaatattcaggccaaaaagaatgtaacccggtgttccaggaaatggggggcggacggaacctgtttgtgaaaacggcgcaaagggccaatatcccccgggggaaaaaagggtttaacaaagacaaccgggggacaa

SEQ ID NO: 679886 - DNA, 229 bp, Homo sapiens
cgactcgtaccccaggagtctgggattatgacccaagtcaaaggtagatgctcaaccacagagccacccaggtgccctccatctctgttttctgcgagattattacagagggaggttctttctgcctaatttatggcttcctcaatggtgacaagcctgtgccataaactagacacaaagccagctgttcagcatccacaatcagataagattagctgatccagggtgc

SEQ ID NO: 679887 - DNA, 924 bp, Homo sapiens
  misc_feature (206)..(206): n is a, c, g, or t
agcggggtcggaagcctgggaggcgctgccgaccgcgcctgcgacagcgtcagccctgacgcggagcgccggcccgatgtgcggtggcggcggcgatggccgagcaggagagcgcccggaacggctgccgcaacatgtctggcggcagtccaggcgtgtggaggtggcatagctgcgcgcctagcggtctagcaatggcgattacntacgatgcgcaccatatgtacctggaccctgtgtctttcatcgtacatgtcctcagtagcaaggctacacgggagagccctggtgatgcctcattgtacgtcggcgtgacgcccctgcctcgttcgttcaagctcatggccaggcaatatcacagatgcagtcaggacctatgttccagtgcttggtccgtggatgtccccttgggatgaacggcgggaaggtggaccgtggcatgactaggcctggctggacacaatctggtcgtacactggtgttccagacctgagttggatcgctccaagcttctccgtgatactgcgtgaaccattgtggtggtccaggacgtccccttgacctgtgttcccctatggggcgctccgggaagcctgtggtccatcccccggggtggcgtccatgactgctgggaccctcaccaccttgtggaaacgatcgaaaactattggtgagtcaagggtatcactttgcatgcagctctaggcggactggggagggcgcttgtgcctaacacttgctggttggacgctattcccagcgttccgcgcggcttcccgcactcgaccggtgggacattggttccgtggcccagtgcccgtggcttacagtttcctctggtttcctggagacccaacgttgcgccactcggtggttctgcccgacgtacgccccaggaagcccccgtccatcgaggacgggcct

SEQ ID NO: 679888 - DNA, 440 bp, Homo sapiens
gttaccaggaatgtctagtggtgcttctagcctaaagtgacccacatttcagactagacagtttaaatctataactcagagggagaatagattaatatcttctcctacggaagagatacccagaagctaccacagcttaaatgggacttacatgcttaaaggtggatatgacatggccaaagtcccatgaggaatggcctccaggtatgatcaaatccagtgcacgacggaacgtctcttctcatagtatccaattgcaaaactggtcaaaattcacccattttctcagggttcttctaaaagctgttggacttgtactgcttcttcggcttctctggctcttgttccagcttccgcagttacaaaatgagaaagacctcgctgtgctgtcctccattcagtgggttctggatggattgccagatcatgtgaagggctct

SEQ ID NO: 679889 - DNA, 118 bp, Homo sapiens
aagatcatgccactgcactccagcctaggtgacagagcaagaccctgtctttaaaaaacaaacaaaccaaaaaaaaaaaagatttccatgaatccagtggacctaaatgcgggccaga

SEQ ID NO: 679890 - DNA, 694 bp, Homo sapiens
  misc_feature (658)..(658): n is a, c, g, or t
gagcaaatttcaaatctacttttagttctttaaggaatctgcatatttttttccataccagcagggtaaaagtgttcccttttcaccacagccatgccaacatctattatttttggattttttaattatgaccattcttgcagaagtaaggtggtattgcactgtggttttgatttgcatttccctgataattagtgatactgagcattttatatgtttgttggccatgtgtatatcttcttttgataattgtctatttatgtccttagccaactttttgatgtgattatttgtatttggttggattttttttttttttgtcttgtgatttgtttgattgccttgtagattctggatattattcctttgttgaatgcttcgtttgtgaagattttctcccactctgagggttctgtttactctgctgattatttcttttgcggtatagaagctttttagtttaattaagttccacctttttatttttgtttttgttgcatttgcttttgggttcttggtcatgaagtctttgcctaagccaatgtttagaagggtttttctgatgttaccttctagaatggttacagtttcaggtctcagattttctttgatccatattgaattgatgtttggataaggtgagagattaggatctagnttcattctcctacatgtgtcttgccttatcccgcct

SEQ ID NO: 679891 - DNA, 434 bp, Homo sapiens
gaccgatagacgtgaatggccggcatcatggagtaagattccctagcaggctctcctggctcctccctaatctgggagcagaggatcagctgtttctctttgctatggctgtgagagagttcaggcttaaacttgctgcccaactttaataactgtgtagcatattatcacatacatttctctcaccaaatttccctctgtcctcactttagtattcagccttaattttccttttgttttgttcatttgcattttgcttatattttcttatacttcaaatattttgtacttaaatacttttttttgagggggggaaccagtaaagaatgaatgcataacatttatcttcagacattctggtactatcttatcatgtcttaaagcccaggaaaatatcatttgattatgattatttctgatgatggacacctagg

SEQ ID NO: 679892 - DNA, 435 bp, Homo sapiens
  misc_feature (121)..(121): n is a, c, g, or t
  misc_feature (130)..(130): n is a, c, g, or t
  misc_feature (242)..(242): n is a, c, g, or t
  misc_feature (416)..(416): n is a, c, g, or t
ccgcatgaggcagaactctactgcaaacagtgccacggacgcaaattcggaccaaagggagtcggatttggacttggtgctggatgcttgacaactgattccggagaaaagttcggtgganccaaacagncgtaatcgaaagaaaaacattgttatcaatctcaaaaactcgtcaggggataagcaatcgtcctatgacagccgaggcattcaccgcaccaatcaatccttcccatagctgnactttctctttcacttttcaatttttattcaattttctataatattcctcaattgctaaaattttcaactttttaattggacatttctcaattattactattattattattattattactctaataatgacattttcaaataattgaatacccctggtactttcgttcctactnataaatattgttaagcttc

SEQ ID NO: 679893 - DNA, 155 bp, Homo sapiens
  misc_feature (127)..(127): n is a, c, g, or t
ctgggcgtctggggggctgggccgggctgggcgggccgggctgggtcaccagcaggcagtggcttagtgagcttgaagttgaccgggtccacccgaagcttgtgcgctgtgcagtgtcgctcacggncggacagcgctgttgggcatgtctgtcc

SEQ ID NO: 679894 - DNA, 412 bp, Homo sapiens
gagagagagatatagatcacacactgcatgccgccaacacgggctggctgtgcccatgctcagcatgcctcgaggagaggaggaggcgtcagctgctttctggtgactgtgcggcacctgaccgcgcgctgaatgctcgctagaatatcgcccagtgtccatgacatgagatacatgcgtatcactgagtgccgatttattttgtgcgcgcgattctgctttgcatgcagatgtccactttgcgtgcacttccagtgctcggaccctccgcatccatacatgcggttcacggcacgtatgtctagcatatcctgccctgtatatgttcacttactcacagtcactaacacctagtctcgcacgaatacttcaccgcaggccttgccagtgctcctagtacgaccgtcttgcc

SEQ ID NO: 679895 - DNA, 796 bp, Homo sapiens
  misc_feature (53)..(53): n is a, c, g, or t
  misc_feature (122)..(122): n is a, c, g, or t
  misc_feature (157)..(157): n is a, c, g, or t
  misc_feature (178)..(178): n is a, c, g, or t
  misc_feature (183)..(183): n is a, c, g, or t
  misc_feature (191)..(191): n is a, c, g, or t
  misc_feature (198)..(198): n is a, c, g, or t
  misc_feature (202)..(202): n is a, c, g, or t
  misc_feature (213)..(213): n is a, c, g, or t
  misc_feature (215)..(215): n is a, c, g, or t
  misc_feature (241)..(241): n is a, c, g, or t
  misc_feature (244)..(244): n is a, c, g, or t
  misc_feature (247)..(247): n is a, c, g, or t
  misc_feature (270)..(270): n is a, c, g, or t
  misc_feature (273)..(273): n is a, c, g, or t
  misc_feature (277)..(277): n is a, c, g, or t
  misc_feature (282)..(282): n is a, c, g, or t
  misc_feature (291)..(291): n is a, c, g, or t
  misc_feature (329)..(329): n is a, c, g, or t
  misc_feature (349)..(349): n is a, c, g, or t
  misc_feature (416)..(416): n is a, c, g, or t
  misc_feature (434)..(434): n is a, c, g, or t
  misc_feature (443)..(443): n is a, c, g, or t
  misc_feature (453)..(453): n is a, c, g, or t
  misc_feature (456)..(456): n is a, c, g, or t
  misc_feature (461)..(461): n is a, c, g, or t
  misc_feature (523)..(523): n is a, c, g, or t
  misc_feature (531)..(531): n is a, c, g, or t
  misc_feature (544)..(544): n is a, c, g, or t
  misc_feature (550)..(550): n is a, c, g, or t
  misc_feature (559)..(559): n is a, c, g, or t
  misc_feature (570)..(570): n is a, c, g, or t
  misc_feature (585)..(585): n is a, c, g, or t
  misc_feature (588)..(588): n is a, c, g, or t
  misc_feature (606)..(606): n is a, c, g, or t
  misc_feature (641)..(641): n is a, c, g, or t
  misc_feature (644)..(644): n is a, c, g, or t
  misc_feature (662)..(662): n is a, c, g, or t
  misc_feature (672)..(672): n is a, c, g, or t
  misc_feature (675)..(675): n is a, c, g, or t
  misc_feature (677)..(677): n is a, c, g, or t
  misc_feature (700)..(700): n is a, c, g, or t
  misc_feature (705)..(705): n is a, c, g, or t
  misc_feature (714)..(714): n is a, c, g, or t
  misc_feature (717)..(717): n is a, c, g, or t
  misc_feature (720)..(720): n is a, c, g, or t
  misc_feature (786)..(786): n is a, c, g, or t
ccaatccacagggctctggtcaaaaggcatctatgtggcttctaatacaaaangataaacgagaaatacagaaagaaaatatcaaacaagccagtgacaaaaaaaaaaaaaaatcccaaccnacaaatttgtcacatggggcctgcgttagaaaacnggaaaaaagaaaaagaaaaanaaaancagtcccngaaaccnggcngggggtttttngnggccacagggggcttgcctaagtcanccnggngaaaggggacagaggtggttttnggnatanggccnccgcctccngtttcttgccagccatggtcacctgaggggggggggcnagcctggccacccaacattnggcatcacttatgcggtttgagggctcaaagacaagcggccttggggtttcccagtccatatctccnctgaatctctcccatatncagtctctngtcactcgangcngaganaatgaggggctcatcagggtggaaagccactccattgagggggccagcttggccgggcagcntaaacaanattctcctgcttntggtancccacaaanaaacaaacctnttggctgagccagcngcnattttgcttccatcaggngaccaagaacatctcagaaggttcttttcaaagtngtncacatttccttgaaaaanctttacacanctntntttgggggcaaatggccggacancccanaaacgaacngtnttntccattgcattggacaaaagaaaagagccttcagaacttaaactcaggccagttactgaatctgcntggcctctca

SEQ ID NO: 679896 - DNA, 280 bp, Homo sapiens
ctgtggaactctcaaagggcgaggcgggcgcagtagtccacacctgtaatcccagagttttggaaagctgggtggatcacctgaggtcgggagtttgagaccagcctggccaacatagtgaaacccctctactaaaaataaaaaaaattagccaggcgtcgtggcacacccctgtaatcctggctactcaggagtctgaaacaggaaaatcgcttgaaccggggagatagaagttgcagtgagatcgtgccactgccctccagtctgggtgacagagtga

SEQ ID NO: 679897 - DNA, 125 bp, Homo sapiens
atatattagtatattaatgtatgtgagttatatattctatggtatattatataaattattacatgtggataataacataatagtaataattattattaggcaattttttgatgggtagtcacaga

SEQ ID NO: 679898 - DNA, 215 bp, Homo sapiens
aattgccgcttcaacaggtacaagcaagtattgccgattacgcactcgctaatccatcacacacactagtcaaactacaacacaactgccagtcatgatgcgctacacgttcaatcgatcaggctaaccattacggccagcacgcatgcgttaattcccatgtcattgattaacatcacactgatcttctatggcttggaccattaaggcttaaa

SEQ ID NO: 679899 - DNA, 997 bp, Homo sapiens
  misc_feature (557)..(557): n is a, c, g, or t
ggcgtggtcatatccactagtgcaatgcgggctgcctagggagtgttgttgctgaggctaagctgggattgcgtagctgcgtcagaccgcattgactcgaggcttctgatttccgcacgacgagtgcgccgactcgcgatctgtactgatggtactcagtgacaatcaagtggagcatacagtcgcattgcacgcctatcaaggcgatgatacgctgcatgatcgtgaagcaaagtgttcacttcagcggagacatcgctgggtcccacagtggctcatgaggatcgaatctgtagcaactcgacgattggctgaactctggcaaggatactgaggtggaagcatcctcagaggcaccccttgtagaccgtcatatgggggcgagtcgacaggctcgccctgttgtcatgtaattgggcgagactgcccgagagctagcgagacgttacccatgctgagcaaatgtgccatgcgttgaattggagaggatcgaatatcgccgtagcttgccgtgaacgagagtccgcatcatctatacggggtgagcacttcgtccnccattccttccttcactcaaacgcaacgcataagttacagactgaggggtcagatcgacccgccactttacccatgcaaacgtttttcatccgtcgggcagtccggaattcacccttcgttggccctccaattggtgacgctcatgtggccaatggatggtgatgaacaccggatgccgcttgaattctagaccttgttgaatccatctttatgatcaagtccacaaatagggggtgtgcggccctaccactgtgtgcctcacctatgcgtcccttgaatgtgggccatccgctttttctagggatgccccgacataagtggcaccccttaggcgccaaggcctgttccatggaccttgctcttactgcccaaggagatgcaatactgggctgctgctgccacaggcatctatcgggggtcaatcagccagcccttccat

SEQ ID NO: 679900 - DNA, 659 bp, Homo sapiens
cagcggcaactccaggtctgcatcgccgaagtccttatcacagcgtacaaaaaccttcaccagttagctctttcatcaccttgctgagttctgggctagatgagtagtccaattccgcgaggctggcacgccctcgacagtgcatgcttgcaagattgcttcgttgaacctgtaggaagcactctggtgccagtacgactgactcgtagccgtgggggcgtatacgcctttcgggctctttatagttcacgagcgcttcggagtacggcagagatagtgaggtacaccatgctgggctcaactgtcggcataccgcttagcaatatcagtactgtctccgaagaagagaaagccttccgagtaggcagagcttgttgcctcgaggcgacagcaaaaaaccattaaacgcgttggatgctgccttaccagccaattcaagcgaggggagaatgttggatgtgtccttaagggacccaagttctaggtcatgggtgtttccaggctgaatgcgcttcatatgccgtaatcaggcgataccatgagttgtcgtcggagtcttctccgagaggtagctggatccagttggcgaaaccgtatccctgggcgtggagttcgtaccaaaaacatccgcattgattcatgatcgttcgtctgaggga

SEQ ID NO: 679901 - DNA, 4595 bp, Homo sapiens
  misc_feature (63)..(63): n is a, c, g, or t
  misc_feature (66)..(66): n is a, c, g, or t
  misc_feature (72)..(72): n is a, c, g, or t
  misc_feature (74)..(75): n is a, c, g, or t
  misc_feature (4259)..(4259): n is a, c, g, or t
agcgggtttcttaccgtaggtttctccctgttgaggcgaacgagctaaatgacctctccgggnggnggcggngnnctggccggggcgggcggcgcgggggcggcatgagggcccgcggcccggggggctgaggcgcccgccgcctgccgcgggggccgctcgcgtcctccatggaggccggagaggaaccgctgctgctggccgaactcaagcccgggcgcccccaccagtttgattggaagtccagctgtgaaacctggagcgtcgccttctccccagatggctcctggtttgcttggtctcaaggacactgcatcgtcaaactgatcccctggccgttggaggagcagttcatccctaaagggtttgaagccaaaagccgaagtagcaaaaatgagacgaaagggcggggcagcccaaaagagaagacgctggactgtggtcagattgtctgggggctggccttcagcccgtggccttccccacccagcaggaagctctgggcacgccaccacccccaagtgcccgatgtctcttgcctggttcttgctacgggactcaacgatgggcagatcaagatctgggaggtgcagacagggctcctgcttttgaatctttccggccaccaagatgtcgtgagagatctgagcttcacacccagtggcagtttgattttggtctccgcgtcacgggataagactcttcgcatctgggacctgaataaacacggtaaacagattcaagtgttatcgggccacctgcagtgggtttactgctgttccatctccccagactgcagcatgctgtgctctgcagctggagagaagtcggtctttctatggagcatgaggtcctacacgttaattcggaagctagagggccatcaaagcagtgttgtctcttgtgacttctcccccgactctgccctgcttgtcacggcttcttacgataccaatgtgattatgtgggacccctacaccggcgaaaggctgaggtcactccaccacacccaggttgaccccgccatggatgacagtgacgtccacattagctcactgagatctgtgtgcttctctccagaaggcttgtaccttgccacggtggcagatgacagactcctcaggatctgggccctggaactgaaaactcccattgcatttgctcctatgaccaatgggctttgctgcacattttttccacatggtggagtcattgccacagggacaagagatggccacgtccagttctggacagctcctagggtcctgtcctcactgaagcacttatgccggaaagcccttcgaagtttcctaacaacttaccaagtcctagcactgccaatccccaagaaaatgaaagagttcctcacatacaggactttttaagcaacaccacatcttgtgcttctttgtagcagggtaaatcgtcctgtcaaagggagttgctggaataatgggccaaacatctggtcttgcattgaaatagcatttctttgggattgtgaatagaatgtagcaaaaccagattccagtgtactagtcatggatctttctctccctggcatgtgaaagtcagtcttagaggaagagattccacttgcacggcaacagagccttacgttaaattttcagtccagttatgaacagcaagtgttgaactctttctgcttgttttgattcaaagtgcagttactgatgttgttttgattatgcaactaagtaggcctccagagcctctctagtggcagagcagctcacactccctccgctgggaacgatggcttctgcctagtacctatccttgtgtttctgatgcagtggtagcattggttcaagttctctcctgctgtggtcagagttgcttcgatgttggccaagtgcttttcttcttgggctcccttctgacctgcaggacagttttcctggagccatttggtatgaggtattaatttagcttaactaaattacaggggactcagaggccgtgctcctgaccgatccagacactattactggctttttttttttttttttaacaatggtgtgcatgtgcaggaaatgacaaatttgtatgtcagattatacaaggatgtattcttaaaccgcatgactattcagatggctactgagttatcagtggccatttattagcatcatatttatttgtattttctcaacagatgttaaggtacaactgtgtttttctcgattatctaaaaaccatagtacttaaattgaacagttgcaaagatgtcttaattgtgtaaagaattggtgtagtcatgactttagctgatactcttatgtacgagatctgtctctgctgtttaacttcattggattaatcagctggtttcaactctactgcgaaacaaaaatagctccttaaaagtactgttctccttcagtggcatgtagttatctaatcaagacacctcattcaaacaaaacctgccttaggaaaatttaatatattttaaattattttaaaagaaatacaacatcttattctttagctttcttaatcggtgctttatggaggccagtgtaacgttacatgactcgttgagaaagttgaggaatttcctctaccacctttgttgcttgaagaaaaacatgtcttttcaaaatgagaggctttcattgaagaaaagaaaaaaacaacagttaaaagcttttggctctctgtttcatttttttccattaagaaaaaaaaaagtccccttttaaaacaagcagggctgggtgtgacggcacatgcctgtaatcccagcactttgggaggctgaggtgggaggactgcttgagcccaggagttcaagatcagcctgggcaacagagtgagataagacccaatctttatttaaaaaataaataaataaatagccaaaaaaacttagtgtggtgctggtgtgcatggtagccccagctactcagggggctgaggatgtggtggcatttacctgtggttctgtggttccggctactcaggaggctgaggtgggagaactgctcgagcctgggacatggaggctgtagcgagccacgatcgtgtcacggtattccagcctgggtgactgacagagcatgatcttgccttgagtaggaagacacttggaccatattaaatttgaaagtcttctgttccagaccaaaatggggtaggctaattccctgtcatccaagcaactaaaaggtaaaaaccttataactttaaaataaaaaaggttatttttttcccctataaaagacaggcagtatgagttaatacattaaaattattttgtacatccctgctccaaacaaccacaaaaatggtactttttaaatgcctgcccatcctctcctggaagggggtttttccaagattcggggtgactgattcatcccacagccccaggcagcagtttatcctggaactgtcctctgttctcccatcactgctgagccctgagaattgtgaatggccctcagagcatctaggcctctgcaacaatcaggtctctggtgacttgaaatgcagcaatgagggagctcagctggatcttctcgttggtgccaacagaaagcctgtactcaatgtctgccattttggtcaataaatgtattcgaactgaagatggaaagtcaactctatgcacaaacaagtgtatctctgtcaggatatcatgcagtgccaaccccttcagagttttcaactctgtaatatttctgtaggctgtggtgaaatcttgattcaacatccagtccaggatgttggcaatgtctgacttgagcgggtgcccggtgcaggtgtagacagtctcctctgtcaccttcccaaaggccatattggtgctctgcaaaatgttcagagccctacgcatgtctccactggaaagagtgactagtgctttcattccatcttcacttatatcaactttctcttcttccacgacatgttccaggcggggaaccatgagttcaggagtcaggggaccgaaccgaaacctcgtgcagcgggactgcaaggcagggatgatctttgacagatagttacagatgaggcagaatctggtattttctgtgaatttctcaattactcttctcaaggcattctgggcgtcctgagtcatggcgtctgcttcatccaagatcactagcttaaagcctttcttaaatattgtccttgtgctagcaaagctcaggatcggtcctcgaatgatgtctattcctcggtcatctgaagcattcagctccaagaccatggagccaaattcnttgtctttatatagctgtttcgcacaggctaggataggtagagtgtcttgccgtgtgccctgggggaccgtagagaagcaagtgtggcagtcggtccttcagttgactaaagcttctgaatggtacctcagaagtgctcctagactgagcaaatagaagatcattgcagggtcatgtggccggtatcttttcaacccagggcaggtatcctgatctgtggtcggccgcgggcatgctcctgcatgcgttgagctgctgaggtctgccatggcggggagacgaaggtgaccagatccgctgagatcgtcgcgtcacaccaagcgcctgcacagtgac

SEQ ID NO: 679902 - DNA, 3112 bp, Homo sapiens
  misc_feature (63)..(63): n is a, c, g, or t
  misc_feature (66)..(66): n is a, c, g, or t
  misc_feature (72)..(72): n is a, c, g, or t
  misc_feature (74)..(75): n is a, c, g, or t
agcgggtttcttaccgtaggtttctccctgttgaggcgaacgagctaaatgacctctccgggnggnggcggngnnctggccggggcgggcggcgcgggggcggcatgagggcccgcggcccggggggctgaggcgcccgccgcctgccgcgggggccgctcgcgtcctccatggaggccggagaggaaccgctgctgctggccgaactcaagcccgggcgcccccaccagtttgattggaagtccagctgtgaaacctggagcgtcgccttctccccagatggctcctggtttgcttggtctcaaggacactgcatcgtcaaactgatcccctggccgttggaggagcagttcatccctaaagggtttgaagccaaaagccgaagtagcaaaaatgagacgaaagggcggggcagcccaaaagagaagacgctggactgtggtcagattgtctgggggctggccttcagcccgtggccttccccacccagcaggaagctctgggcacgccaccacccccaagtgcccgatgtctcttgcctggttcttgctacgggactcaacgatgggcagatcaagatctgggaggtgcagacagggctcctgcttttgaatctttccggccaccaagatgtcgtgagagatctgagcttcacacccagtggcagtttgattttggtctccgcgtcacgggataagactcttcgcatctgggacctgaataaacacggtaaacagattcaagtgttatcgggccacctgcagtgggtttactgctgttccatctccccagactgcagcatgctgtgctctgcagctggagagaagtcggtctttctatggagcatgaggtcctacacgttaattcggaagctagagggccatcaaagcagtgttgtctcttgtgacttctcccccgactctgccctgcttgtcacggcttcttacgataccaatgtgattatgtgggacccctacaccggcgaaaggctgaggtcactccaccacacccaggttgaccccgccatggatgacagtgacgtccacattagctcactgagatctgtgtgcttctctccagaaggcttgtaccttgccacggtggcagatgacagactcctcaggatctgggccctggaactgaaaactcccattgcatttgctcctatgaccaatgggctttgctgcacattttttccacatggtggagtcattgccacagggacaagagatggccacgtccagttctggacagctcctagggtcctgtcctcactgaagcacttatgccggaaagcccttcgaagtttcctaacaacttaccaagtcctagcactgccaatccccaagaaaatgaaagagttcctcacatacaggactttttaagcaacaccacatcttgtgcttctttgtagcagggtaaatcgtcctgtcaaagggagttgctggaataatgggccaaacatctggtcttgcattgaaatagcatttctttgggattgtgaatagaatgtagcaaaaccagattccagtgtactagtcatggatctttctctccctggcatgtgaaagtcagtcttagaggaagagattccacttgcacggcaacagagccttacgttaaattttcagtccagttatgaacagcaagtgttgaactctttctgcttgttttgattcaaagtgcagttactgatgttgttttgattatgcaactaagtaggcctccagagcctctctagtggcagagcagctcacactccctccgctgggaacgatggcttctgcctagtacctatccttgtgtttctgatgcagtggtagcattggttcaagttctctcctgctgtggtcagagttgcttcgatgttggccaagtgcttttcttcttgggctcccttctgacctgcaggacagttttcctggagccatttggtatgaggtattaatttagcttaactaaattacaggggactcagaggccgtgctcctgaccgatccagacactattactggctttttttttttttttttaacaatggtgtgcatgtgcaggaaatgacaaatttgtatgtcagattatacaaggatgtattcttaaaccgcatgactattcagatggctactgagttatcagtggccatttattagcatcatatttatttgtattttctcaacagatgttaaggtacaactgtgtttttctcgattatctaaaaaccatagtacttaaattgaacagttgcaaagatgtcttaattgtgtaaagaattggtgtagtcatgactttagctgatactcttatgtacgagatctgtctctgctgtttaacttcattggattaatcagctggtttcaactctactgcgaaacaaaaatagctccttaaaagtactgttctccttcagtggcatgtagttatctaatcaagacacctcattcaaacaaaacctgccttaggaaaatttaatatattttaaattattttaaaagaaatacaacatcttattctttagctttcttaatcggtgctttatggaggccagtgtaacgttacatgactcgttgagaaagttgaggaatttcctctaccacctttgttgcttgaagaaaaacatgtcttttcaaaatgagaggctttcattgaagaaaagaaaaaaacaacagttaaaagctaaaaaaaaaaaaaaaaaaaaaaaaaaaaaaaaaaaaaaaaaaaaaggggggggggcgcaaaaaattcccccgggggggcccattccccccccttttttgtttcaaagggggcccccaaaggggggggataaaaaaagacgcgggcgccgtttaaaccgcgctgcgcggggaaacagtctccctggggcaccggggaggaccccttcttggggcggggaccaggcgacccccccacagaattaagaccgggaataaaactcgggttgcagtggcaacccgcgcatgcctcgctgaattggctcggttatataaatagcaggcacaagatcaaatacggaggcagccgccacgattggcttcggttaaatacacagagcaaaagcacgcacatcaaagacggtaaatcgactacatcaaccaagacacacacatcatca

SEQ ID NO: 679903 - DNA, 4909 bp, Homo sapiens
  misc_feature (4573)..(4573): n is a, c, g, or t
ccgtggggaattagaatatcatattcatagattacaggtgtttaaatgacaaatctggtcatatttcttactctgaattaaaaattggacccttgggcccagctgataggagctgatgggtatactgggctgggggctgttaccaccccagttctcccgttctccagtcttcctgctttgttgaggactggctcattgtttgcttctttttcctgccaggtaaacagattcaagtgttatcgggccacctgcagtgggtttactgctgttccatctccccagactgcagcatgctgtgctctgcagctggagagaagtcggtctttctatggagcatgaggtcctacacgttaattcggaagctagagggccatcaaagcagtgttgtctcttgtgacttctcccccgactctgccctgcttgtcacggcttcttacgataccaatgtgattatgtgggacccctacaccggcgaaaggctgaggtcactccaccacacccaggttgaccccgccatggatgacagtgacgtccacattagctcactgagatctgtgtgcttctctccagaaggcttgtaccttgccacggtggcagatgacagactcctcaggatctgggccctggaactgaaaactcccattgcatttgctcctatgaccaatgggctttgctgcacattttttccacatggtggagtcattgccacagggacaagagatggccacgtccagttctggacagctcctagggtcctgtcctcactgaagcacttatgccggaaagcccttcgaagtttcctaacaacttaccaagtcctagcactgccaatccccaagaaaatgaaagagttcctcacatacaggactttttaagcaacaccacatcttgtgcttctttgtagcagggtaaatcgtcctgtcaaagggagttgctggaataatgggccaaacatctggtcttgcattgaaatagcatttctttgggattgtgaatagaatgtagcaaaaccagattccagtgtactagtcatggatctttctctccctggcatgtgaaagtcagtcttagaggaagagattccacttgcacggcaacagagccttacgttaaattttcagtccagttatgaacagcaagtgttgaactctttctgcttgttttgattcaaagtgcagttactgatgttgttttgattatgcaactaagtaggcctccagagcctctctagtggcagagcagctcacactccctccgctgggaacgatggcttctgcctagtacctatccttgtgtttctgatgcagtggtagcattggttcaagttctctcctgctgtggtcagagttgcttcgatgttggccaagtgcttttcttcttgggctcccttctgacctgcaggacagttttcctggagccatttggtatgaggtattaatttagcttaactaaattacaggggactcagaggccgtgctcctgaccgatccagacactattactggctttttttttttttttttaacaatggtgtgcatgtgcaggaaatgacaaatttgtatgtcagattatacaaggatgtattcttaaaccgcatgactattcagatggctactgagttatcagtggccatttattagcatcatatttatttgtattttctcaacagatgttaaggtacaactgtgtttttctcgattatctaaaaaccatagtacttaaattgaacagttgcaaagatgtcttaattgtgtaaagaattggtgtagtcatgactttagctgatactcttatgtacgagatctgtctctgctgtttaacttcattggattaatcagctggtttcaactctactgcgaaacaaaaatagctccttaaaagtactgttctccttcagtggcatgtagttatctaatcaagacacctcattcaaacaaaacctgccttaggaaaatttaatatattttaaattattttaaaagaaatacaacatcttattctttagctttcttaatcggtgctttatggaggccagtgtaacgttacatgactcgttgagaaagttgaggaatttcctctaccacctttgttgcttgaagaaaaacatgtcttttcaaaatgagaggctttcattgaagaaaagaaaaaaacaacagttaaaagcttttggctctctgtttcatttttttccattaagaaaaaaaaaagtccccttttaaaacaagcagggctgggtgtgacggcacatgcctgtaatcccagcactttgggaggctgaggtgggaggactgcttgagcccaggagttcaagatcagcctgggcaacagagtgagataagacccaatctttatttaaaaaataaataaataaatagccaaaaaaacttagtgtggtgctggtgtgcatggtagccccagctactcagggggctgaggatgtggtggcatttacctgtggttctgtggttccggctactcaggaggctgaggtgggagaactgctcgagcctgggacatggaggctgtagcgagccacgatcgtgtcacggtattccagcctgggtgactgacagagcatgatcttgcctcaaaaaataaacacataaaacaagtagtacagcagaagagctgggaatggattggccaacgtttacatttcatggttatcttgaagttccaggtacagcagatgctgagcctctgggtggtttgaggcctggttggccatcagatatttagcttcatactttgccgctgtccttaagggggtgagtcctccatgaacaaagggaatagtgactttttccatttgacagtttaagaatttgacattttttaaagaacagcatctaaagaaagtttattctgtgatattagagacagaaggttttcatataaatgcaagtttgacaaagtcagcatctttctagctgtctaaggaagagtcacttgtaacacagccagccaggaggctgctttgttttttattataaagaacactaacacaaatgcagcatgattgctgtaaaataaatgtgaaatttgtacaaaagtcccagtccttccgcagttctaggtttacagtcaggctcaaccttacttgccccgctcctgcatgaaaacaagtgcgttttatacagcctctgccacccagtggcatagtttaaggctctatattatatttaaaattaaggtttttttcctatcatacacatcaatttggaacctgctggtgactcttctaccacagagggtaaataaaaagaccagtttttaaagtaagaggattcagctcatcttataaaagtataatagtttcggccagacgtccattaacatctgtttaaattagatacagacacaatgccaaatattagaatcataaatgtaattttggagataatgtttaccttgagtaggaagacacttggaccatattaaatttgaaagtcttctgttccagaccaaaatggggtaggctaattccctgtcatccaagcaactaaaaggtaaaaaccttataactttaaaataaaaaaggttatttttttcccctataaaagacaggcagtatgagttaatacattaaaattattttgtacatccctgctccaaacaaccacaaaaatggtactttttaaatgcctgcccatcctctcctggaagggggtttttccaagattcggggtgactgattcatcccacagccccaggcagcagtttatcctggaactgtcctctgttctcccatcactgctgagccctgagaattgtgaatggccctcagagcatctaggcctctgcaacaatcaggtctctggtgacttgaaatgcagcaatgagggagctcagctggatcttctcgttggtgccaacagaaagcctgtactcaatgtctgccattttggtcaataaatgtattcgaactgaagatggaaagtcaactctatgcacaaacaagtgtatctctgtcaggatatcatgcagtgccaaccccttcagagttttcaactctgtaatatttctgtaggctgtggtgaaatcttgattcaacatccagtccaggatgttggcaatgtctgacttgagcgggtgcccggtgcaggtgtagacagtctcctctgtcaccttcccaaaggccatattggtgctctgcaaaatgttcagagccctacgcatgtctccactggaaagagtgactagtgctttcattccatcttcacttatatcaactttctcttcttccacgacatgttccaggcggggaaccatgagttcaggagtcaggggaccgaaccgaaacctcgtgcagcgggactgcaaggcagggatgatctttgacagatagttacagatgaggcagaatctggtattttctgtgaatttctcaattactcttctcaaggcattctgggcgtcctgagtcatggcgtctgcttcatccaagatcactagcttaaagcctttcttaaatattgtccttgtgctagcaaagctcaggatcggtcctcgaatgatgtctattcctcggtcatctgaagcattcagctccaagaccatggagccaaattcnttgtctttatatagctgtttcgcacaggctaggataggtagagtgtcttgccgtgtgccctgggggaccgtagagaagcaagtgtggcagtcggtccttcagttgactaaagcttctgaatggtacctcagaagtgctcctagactgagcaaatagaagatcattgcagggtcatgtggccggtatcttttcaacccagggcaggtatcctgatctgtggtcggccgcgggcatgctcctgcatgcgttgagctgctgaggtctgccatggcggggagacgaaggtgaccagatccgctgagatcgtcgcgtcacaccaagcgcctgcacagtgac

SEQ ID NO: 679904 - DNA, 897 bp, Homo sapiens
  misc_feature (259)..(259): n is a, c, g, or t
  misc_feature (342)..(342): n is a, c, g, or t
  misc_feature (344)..(344): n is a, c, g, or t
  misc_feature (466)..(466): n is a, c, g, or t
  misc_feature (510)..(510): n is a, c, g, or t
  misc_feature (537)..(537): n is a, c, g, or t
  misc_feature (552)..(552): n is a, c, g, or t
  misc_feature (589)..(589): n is a, c, g, or t
tcacctcattccaccctggcacacaccgacttgaagctggcccagacatggccagtcccccatggcagcctgatcttagtagcagacaatgcagtgtgtgcagtacatgcactcacaacagcatgcacaacacagtgttccactcccacatacacagtgcaggacatcagccaaccatgtaccgccctctcgtctctatgcaccaagaggctgggtcccagcagcaggtggggtgcagtgagcaggcaacacaggaggnctggagccagtgcaccctgccagcctcccggactcctctctggcaaccagtgccccgctgtgctgcaccctctgccacgagcngntggaggacacccattttgtgcagtgcccgtccgtcccttcgcacaagttctgcttcccttgctccagacaaagcatcaaacagcagggagctagtggagaggtctattgtcccagtgggganaaatgccctcttgtgggctccaatgtcccctgggcctttatgcnaggggaaattgcaacatccttgctggngatgtgaaagtgaanaaagagagagactcgtgacttttccggtttcagaaanaaccaatgattacccttaattaaaactgcttgaattgtatatatatctccatatatatatatatcaatgacaagggaaagtgtagacttccataaacatgagtgtataatgtggattggtggagaatacattgtgcttctatatatgatttagacgacaaagaggtatgtagcttataaagacatttctttgcttgtgttaacgttgattgagcatatctttgtgctttattatcctggtgacagttaccgttgctatgtaggctgtgacttgcggcttgttttcagagcacttggcaaatgcagaaa

SEQ ID NO: 679905 - DNA, 187 bp, Homo sapiens
aaaacccccccccccccgggggaaattcaaaattgttttttccgcccaagggttttccctgggcccagattggaaaacccgggcgggggggggggggggggtgggggggggaggggggggagccccccccccccccccccactttttttggagaaaaatgcctcctggggccggttttgttttttta

SEQ ID NO: 679906 - DNA, 5093 bp, Homo sapiens
  misc_feature (63)..(63): n is a, c, g, or t
  misc_feature (66)..(66): n is a, c, g, or t
  misc_feature (72)..(72): n is a, c, g, or t
  misc_feature (74)..(75): n is a, c, g, or t
  misc_feature (4757)..(4757): n is a, c, g, or t
agcgggtttcttaccgtaggtttctccctgttgaggcgaacgagctaaatgacctctccgggnggnggcggngnnctggccggggcgggcggcgcgggggcggcatgagggcccgcggcccggggggctgaggcgcccgccgcctgccgcgggggccgctcgcgtcctccatggaggccggagaggaaccgctgctgctggccgaactcaagcccgggcgcccccaccagtttgattggaagtccagctgtgaaacctggagcgtcgccttctccccagatggctcctggtttgcttggtctcaaggacactgcatcgtcaaactgatcccctggccgttggaggagcagttcatccctaaagggtttgaagccaaaagccgaagtagcaaaaatgagacgaaagggcggggcagcccaaaagagaagacgctggactgtggtcagattgtctgggggctggccttcagcccgtggccttccccacccagcaggaagctctgggcacgccaccacccccaagtgcccgatgtctcttgcctggttcttgctacgggactcaacgatgggcagatcaagatctgggaggtgcagacagggctcctgcttttgaatctttccggccaccaagatgtcgtgagagatctgagcttcacacccagtggcagtttgattttggtctccgcgtcacgggataagactcttcgcatctgggacctgaataaacacggtaaacagattcaagtgttatcgggccacctgcagtgggtttactgctgttccatctccccagactgcagcatgctgtgctctgcagctggagagaagtcggtctttctatggagcatgaggtcctacacgttaattcggaagctagagggccatcaaagcagtgttgtctcttgtgacttctcccccgactctgccctgcttgtcacggcttcttacgataccaatgtgattatgtgggacccctacaccggcgaaaggctgaggtcactccaccacacccaggttgaccccgccatggatgacagtgacgtccacattagctcactgagatctgtgtgcttctctccagaaggcttgtaccttgccacggtggcagatgacagactcctcaggatctgggccctggaactgaaaactcccattgcatttgctcctatgaccaatgggctttgctgcacattttttccacatggtggagtcattgccacagggacaagagatggccacgtccagttctggacagctcctagggtcctgtcctcactgaagcacttatgccggaaagcccttcgaagtttcctaacaacttaccaagtcctagcactgccaatccccaagaaaatgaaagagttcctcacatacaggactttttaagcaacaccacatcttgtgcttctttgtagcagggtaaatcgtcctgtcaaagggagttgctggaataatgggccaaacatctggtcttgcattgaaatagcatttctttgggattgtgaatagaatgtagcaaaaccagattccagtgtactagtcatggatctttctctccctggcatgtgaaagtcagtcttagaggaagagattccacttgcacggcaacagagccttacgttaaattttcagtccagttatgaacagcaagtgttgaactctttctgcttgttttgattcaaagtgcagttactgatgttgttttgattatgcaactaagtaggcctccagagcctctctagtggcagagcagctcacactccctccgctgggaacgatggcttctgcctagtacctatccttgtgtttctgatgcagtggtagcattggttcaagttctctcctgctgtggtcagagttgcttcgatgttggccaagtgcttttcttcttgggctcccttctgacctgcaggacagttttcctggagccatttggtatgaggtattaatttagcttaactaaattacaggggactcagaggccgtgctcctgaccgatccagacactattactggctttttttttttttttttaacaatggtgtgcatgtgcaggaaatgacaaatttgtatgtcagattatacaaggatgtattcttaaaccgcatgactattcagatggctactgagttatcagtggccatttattagcatcatatttatttgtattttctcaacagatgttaaggtacaactgtgtttttctcgattatctaaaaaccatagtacttaaattgaacagttgcaaagatgtcttaattgtgtaaagaattggtgtagtcatgactttagctgatactcttatgtacgagatctgtctctgctgtttaacttcattggattaatcagctggtttcaactctactgcgaaacaaaaatagctccttaaaagtactgttctccttcagtggcatgtagttatctaatcaagacacctcattcaaacaaaacctgccttaggaaaatttaatatattttaaattattttaaaagaaatacaacatcttattctttagctttcttaatcggtgctttatggaggccagtgtaacgttacatgactcgttgagaaagttgaggaatttcctctaccacctttgttgcttgaagaaaaacatgtcttttcaaaatgagaggctgtggttctgtggttccggctactcaggaggctgaggtgggagaactgctcgagcctgggacatggaggctgtagcgagccacgatcgtgtcacggtattccagcctgggtgactgacagagcatgatcttgcctcaaaaaataaacacataaaacaagtagtacagcagaagagctgggaatggattggccaacgtttacatttcatggttatcttgaagttccaggtacagcagatgctgagcctctgggtggtttgaggcctggttggccatcagatatttagcttcatactttgccgctgtccttaagggggtgagtcctccatgaacaaagggaatagtgactttttccatttgacagtttaagaatttgacattttttaaagaacagcatctaaagaaagtttattctgtgatattagagacagaaggttttcatataaatgcaagtttgacaaagtcagcatctttctagctgtctaaggaagagtcacttgtaacacagccagccaggaggctgctttgttttttattataaagaacactaacacaaatgcagcatgattgctgtaaaataaatgtgaaatttgtacaaaagtcccagtccttccgcagttctaggtttacagtcaggctcaaccttacttgccccgctcctgcatgaaaacaagtgcgttttatacagcctctgccacccagtggcatagtttaaggctctatattatatttaaaattaaggtttttttcctatcatacacatcaatttggaacctgctggtgactcttctaccacagagggtaaataaaaagaccagtttttaaagtaagaggattcagctcatcttataaaagtataatagtttcggccagacgtccattaacatctgtttaaattagatacagacacaatgccaaatattagaatcataaatgtaattttggagataatgtttaccttgagtaggaagacacttggaccatattaaatttgaaagtcttctgttccagaccaaaatggggtaggctaattccctgtcatccaagcaactaaaaggtaaaaaccttataactttaaaataaaaaaggttatttttttcccctataaaagacaggcagtatgagttaatacattaaaattattttgtacatccctgctccaaacaaccacaaaaatggtactttttaaatgcctgcccatcctctcctggaagggggtttttccaagattcggggtgactgattcatcccacagccccaggcagcagtttatcctggaactgtcctctgttctcccatcactgctgagccctgagaattgtgaatggccctcagagcatctaggcctctgcaacaatcaggtctctggtgacttgaaatgcagcaatgagggagctcagctggatcttctcgttggtgccaacagaaagcctgtactcaatgtctgccattttggtcaataaatgtattcgaactgaagatggaaagtcaactctatgcacaaacaagtgtatctctgtcaggatatcatgcagtgccaaccccttcagagttttcaactctgtaatatttctgtaggctgtggtgaaatcttgattcaacatccagtccaggatgttggcaatgtctgacttgagcgggtgcccggtgcaggtgtagacagtctcctctgtcaccttcccaaaggccatattggtgctctgcaaaatgttcagagccctacgcatgtctccactggaaagagtgactagtgctttcattccatcttcacttatatcaactttctcttcttccacgacatgttccaggcggggaaccatgagttcaggagtcaggggaccgaaccgaaacctcgtgcagcgggactgcaaggcagggatgatctttgacagatagttacagatgaggcagaatctggtattttctgtgaatttctcaattactcttctcaaggcattctgggcgtcctgagtcatggcgtctgcttcatccaagatcactagcttaaagcctttcttaaatattgtccttgtgctagcaaagctcaggatcggtcctcgaatgatgtctattcctcggtcatctgaagcattcagctccaagaccatggagccaaattcnttgtctttatatagctgtttcgcacaggctaggataggtagagtgtcttgccgtgtgccctgggggaccgtagagaagcaagtgtggcagtcggtccttcagttgactaaagcttctgaatggtacctcagaagtgctcctagactgagcaaatagaagatcattgcagggtcatgtggccggtatcttttcaacccagggcaggtatcctgatctgtggtcggccgcgggcatgctcctgcatgcgttgagctgctgaggtctgccatggcggggagacgaaggtgaccagatccgctgagatcgtcgcgtcacaccaagcgcctgcacagtgac

SEQ ID NO: 679907 - DNA, 224 bp, Homo sapiens
taggataccccatagtatgatgctatgcaaacttctgggacactcccttaactggcagggattagccccatttcaaagaagtagagaggagtggcatccatctcccctgacggcggcaccatgacgtcataaattcatttcccctgggctgcttgcacggtgatgtcatacattcttttccccgggctggctgtgccggtgacattcataaatttcaggggtac

SEQ ID NO: 679908 - DNA, 5390 bp, Homo sapiens
  misc_feature (63)..(63): n is a, c, g, or t
  misc_feature (66)..(66): n is a, c, g, or t
  misc_feature (72)..(72): n is a, c, g, or t
  misc_feature (74)..(75): n is a, c, g, or t
  misc_feature (5054)..(5054): n is a, c, g, or t
agcgggtttcttaccgtaggtttctccctgttgaggcgaacgagctaaatgacctctccgggnggnggcggngnnctggccggggcgggcggcgcgggggcggcatgagggcccgcggcccggggggctgaggcgcccgccgcctgccgcgggggccgctcgcgtcctccatggaggccggagaggaaccgctgctgctggccgaactcaagcccgggcgcccccaccagtttgattggaagtccagctgtgaaacctggagcgtcgccttctccccagatggctcctggtttgcttggtctcaaggacactgcatcgtcaaactgatcccctggccgttggaggagcagttcatccctaaagggtttgaagccaaaagccgaagtagcaaaaatgagacgaaagggcggggcagcccaaaagagaagacgctggactgtggtcagattgtctgggggctggccttcagcccgtggccttccccacccagcaggaagctctgggcacgccaccacccccaagtgcccgatgtctcttgcctggttcttgctacgggactcaacgatgggcagatcaagatctgggaggtgcagacagggctcctgcttttgaatctttccggccaccaagatgtcgtgagagatctgagcttcacacccagtggcagtttgattttggtctccgcgtcacgggataagactcttcgcatctgggacctgaataaacacggtaaacagattcaagtgttatcgggccacctgcagtgggtttactgctgttccatctccccagactgcagcatgctgtgctctgcagctggagagaagtcggtctttctatggagcatgaggtcctacacgttaattcggaagctagagggccatcaaagcagtgttgtctcttgtgacttctcccccgactctgccctgcttgtcacggcttcttacgataccaataaggctgaggtcactccaccacacccaggttgaccccgccatggatgacagtgacgtccacattagctcactgagatctgtgtgcttctctccagaaggcttgtaccttgccacggtggcagatgacagactcctcaggatctgggccctggaactgaaaactcccattgcatttgctcctatgaccaatgggctttgctgcacattttttccacatggtggagtcattgccacagggacaagagatggccacgtccagttctggacagctcctagggtcctgtcctcactgaagcacttatgccggaaagcccttcgaagtttcctaacaacttaccaagtcctagcactgccaatccccaagaaaatgaaagagttcctcacatacaggactttttaagcaacaccacatcttgtgcttctttgtagcagggtaaatcgtcctgtcaaagggagttgctggaataatgggccaaacatctggtcttgcattgaaatagcatttctttgggattgtgaatagaatgtagcaaaaccagattccagtgtactagtcatggatctttctctccctggcatgtgaaagtcagtcttagaggaagagattccacttgcacggcaacagagccttacgttaaattttcagtccagttatgaacagcaagtgttgaactctttctgcttgttttgattcaaagtgcagttactgatgttgttttgattatgcaactaagtaggcctccagagcctctctagtggcagagcagctcacactccctccgctgggaacgatggcttctgcctagtacctatccttgtgtttctgatgcagtggtagcattggttcaagttctctcctgctgtggtcagagttgcttcgatgttggccaagtgcttttcttcttgggctcccttctgacctgcaggacagttttcctggagccatttggtatgaggtattaatttagcttaactaaattacaggggactcagaggccgtgctcctgaccgatccagacactattactggctttttttttttttttttaacaatggtgtgcatgtgcaggaaatgacaaatttgtatgtcagattatacaaggatgtattcttaaaccgcatgactattcagatggctactgagttatcagtggccatttattagcatcatatttatttgtattttctcaacagatgttaaggtacaactgtgtttttctcgattatctaaaaaccatagtacttaaattgaacagttgcaaagatgtcttaattgtgtaaagaattggtgtagtcatgactttagctgatactcttatgtacgagatctgtctctgctgtttaacttcattggattaatcagctggtttcaactctactgcgaaacaaaaatagctccttaaaagtactgttctccttcagtggcatgtagttatctaatcaagacacctcattcaaacaaaacctgccttaggaaaatttaatatattttaaattattttaaaagaaatacaacatcttattctttagctttcttaatcggtgctttatggaggccagtgtaacgttacatgactcgttgagaaagttgaggaatttcctctaccacctttgttgcttgaagaaaaacatgtcttttcaaaatgagaggctttcattgaagaaaagaaaaaaacaacagttaaaagcttttggctctctgtttcatttttttccattaagaaaaaaaaaagtccccttttaaaacaagcagggctgggtgtgacggcacatgcctgtaatcccagcactttgggaggctgaggtgggaggactgcttgagcccaggagttcaagatcagcctgggcaacagagtgagataagacccaatctttatttaaaaaataaataaataaatagccaaaaaaacttagtgtggtgctggtgtgcatggtagccccagctactcagggggctgaggatgtggtggcatttacctgtggttctgtggttccggctactcaggaggctgaggtgggagaactgctcgagcctgggacatggaggctgtagcgagccacgatcgtgtcacggtattccagcctgggtgactgacagagcatgatcttgcctcaaaaaataaacacataaaacaagtagtacagcagaagagctgggaatggattggccaacgtttacatttcatggttatcttgaagttccaggtacagcagatgctgagcctctgggtggtttgaggcctggttggccatcagatatttagcttcatactttgccgctgtccttaagggggtgagtcctccatgaacaaagggaatagtgactttttccatttgacagtttaagaatttgacattttttaaagaacagcatctaaagaaagtttattctgtgatattagagacagaaggttttcatataaatgcaagtttgacaaagtcagcatctttctagctgtctaaggaagagtcacttgtaacacagccagccaggaggctgctttgttttttattataaagaacactaacacaaatgcagcatgattgctgtaaaataaatgtgaaatttgtacaaaagtcccagtccttccgcagttctaggtttacagtcaggctcaaccttacttgccccgctcctgcatgaaaacaagtgcgttttatacagcctctgccacccagtggcatagtttaaggctctatattatatttaaaattaaggtttttttcctatcatacacatcaatttggaacctgctggtgactcttctaccacagagggtaaataaaaagaccagtttttaaagtaagaggattcagctcatcttataaaagtataatagtttcggccagacgtccattaacatctgtttaaattagatacagacacaatgccaaatattagaatcataaatgtaattttggagataatgtttaccttgagtaggaagacacttggaccatattaaatttgaaagtcttctgttccagaccaaaatggggtaggctaattccctgtcatccaagcaactaaaaggtaaaaaccttataactttaaaataaaaaaggttatttttttcccctataaaagacaggcagtatgagttaatacattaaaattattttgtacatccctgctccaaacaaccacaaaaatggtactttttaaatgcctgcccatcctctcctggaagggggtttttccaagattcggggtgactgattcatcccacagccccaggcagcagtttatcctggaactgtcctctgttctcccatcactgctgagccctgagaattgtgaatggccctcagagcatctaggcctctgcaacaatcaggtctctggtgacttgaaatgcagcaatgagggagctcagctggatcttctcgttggtgccaacagaaagcctgtactcaatgtctgccattttggtcaataaatgtattcgaactgaagatggaaagtcaactctatgcacaaacaagtgtatctctgtcaggatatcatgcagtgccaaccccttcagagttttcaactctgtaatatttctgtaggctgtggtgaaatcttgattcaacatccagtccaggatgttggcaatgtctgacttgagcgggtgcccggtgcaggtgtagacagtctcctctgtcaccttcccaaaggccatattggtgctctgcaaaatgttcagagccctacgcatgtctccactggaaagagtgactagtgctttcattccatcttcacttatatcaactttctcttcttccacgacatgttccaggcggggaaccatgagttcaggagtcaggggaccgaaccgaaacctcgtgcagcgggactgcaaggcagggatgatctttgacagatagttacagatgaggcagaatctggtattttctgtgaatttctcaattactcttctcaaggcattctgggcgtcctgagtcatggcgtctgcttcatccaagatcactagcttaaagcctttcttaaatattgtccttgtgctagcaaagctcaggatcggtcctcgaatgatgtctattcctcggtcatctgaagcattcagctccaagaccatggagccaaattcnttgtctttatatagctgtttcgcacaggctaggataggtagagtgtcttgccgtgtgccctgggggaccgtagagaagcaagtgtggcagtcggtccttcagttgactaaagcttctgaatggtacctcagaagtgctcctagactgagcaaatagaagatcattgcagggtcatgtggccggtatcttttcaacccagggcaggtatcctgatctgtggtcggccgcgggcatgctcctgcatgcgttgagctgctgaggtctgccatggcggggagacgaaggtgaccagatccgctgagatcgtcgcgtcacaccaagcgcctgcacagtgac

SEQ ID NO: 679909 - DNA, 470 bp, Homo sapiens
cgcatggagcgctcgcgccgcgcgcggtcctcgtccaggcgctggatggtggtgcgaacatgctccaggtgctcgccgatgcattcgcgggcgcgctgcgggtcgccgtccaggatggcctgcatgaggctctggtgctgcacggtcagctcctgcagggtctggggcgcgctcaggcggaacatatcgtggcggttgcgctccaccgtggacagcaccacggtgaacaggctgtgcatgacctgcaccagcaccaggttgtgcgaggcctcggcaatggccaggtggaactgcgcgtcggcacgcgccgccagctcggcgtggccgctttgctggtgctggatcatcacctcgaagcagcgctggatatggtccttgtcgcgctccgtggcgcgctgggcggccagccaggccgtactggtctccagcgcatggcgggtttccagcacgtcatagcggtagtgggagtc

SEQ ID NO: 679910 - DNA, 4400 bp, Homo sapiens
  misc_feature (4064)..(4064): n is a, c, g, or t
tttttttcttgagtttttctaatcctatcagcagctttaattattcagcaccacaattttacatccatttccacagtcagggttacatttcactctccgaagtctcctgctctttgcagtcaaaacagaaacatgagtattcatcctcatgaaaacatgaacatccaagctctgtcttagcatcggtttctgtttcattttaggacaagagatggccacgtccagttctggacagctcctagggtcctgtcctcactgaagcacttatgccggaaagcccttcgaagtttcctaacaacttaccaagtcctagcactgccaatccccaagaaaatgaaagagttcctcacatacaggactttttaagcaacaccacatcttgtgcttctttgtagcagggtaaatcgtcctgtcaaagggagttgctggaataatgggccaaacatctggtcttgcattgaaatagcatttctttgggattgtgaatagaatgtagcaaaaccagattccagtgtactagtcatggatctttctctccctggcatgtgaaagtcagtcttagaggaagagattccacttgcacggcaacagagccttacgttaaattttcagtccagttatgaacagcaagtgttgaactctttctgcttgttttgattcaaagtgcagttactgatgttgttttgattatgcaactaagtaggcctccagagcctctctagtggcagagcagctcacactccctccgctgggaacgatggcttctgcctagtacctatccttgtgtttctgatgcagtggtagcattggttcaagttctctcctgctgtggtcagagttgcttcgatgttggccaagtgcttttcttcttgggctcccttctgacctgcaggacagttttcctggagccatttggtatgaggtattaatttagcttaactaaattacaggggactcagaggccgtgctcctgaccgatccagacactattactggctttttttttttttttttaacaatggtgtgcatgtgcaggaaatgacaaatttgtatgtcagattatacaaggatgtattcttaaaccgcatgactattcagatggctactgagttatcagtggccatttattagcatcatatttatttgtattttctcaacagatgttaaggtacaactgtgtttttctcgattatctaaaaaccatagtacttaaattgaacagttgcaaagatgtcttaattgtgtaaagaattggtgtagtcatgactttagctgatactcttatgtacgagatctgtctctgctgtttaacttcattggattaatcagctggtttcaactctactgcgaaacaaaaatagctccttaaaagtactgttctccttcagtggcatgtagttatctaatcaagacacctcattcaaacaaaacctgccttaggaaaatttaatatattttaaattattttaaaagaaatacaacatcttattctttagctttcttaatcggtgctttatggaggccagtgtaacgttacatgactcgttgagaaagttgaggaatttcctctaccacctttgttgcttgaagaaaaacatgtcttttcaaaatgagaggctttcattgaagaaaagaaaaaaacaacagttaaaagcttttggctctctgtttcatttttttccattaagaaaaaaaaaagtccccttttaaaacaagcagggctgggtgtgacggcacatgcctgtaatcccagcactttgggaggctgaggtgggaggactgcttgagcccaggagttcaagatcagcctgggcaacagagtgagataagacccaatctttatttaaaaaataaataaataaatagccaaaaaaacttagtgtggtgctggtgtgcatggtagccccagctactcagggggctgaggatgtggtggcatttacctgtggttctgtggttccggctactcaggaggctgaggtgggagaactgctcgagcctgggacatggaggctgtagcgagccacgatcgtgtcacggtattccagcctgggtgactgacagagcatgatcttgcctcaaaaaataaacacataaaacaagtagtacagcagaagagctgggaatggattggccaacgtttacatttcatggttatcttgaagttccaggtacagcagatgctgagcctctgggtggtttgaggcctggttggccatcagatatttagcttcatactttgccgctgtccttaagggggtgagtcctccatgaacaaagggaatagtgactttttccatttgacagtttaagaatttgacattttttaaagaacagcatctaaagaaagtttattctgtgatattagagacagaaggttttcatataaatgcaagtttgacaaagtcagcatctttctagctgtctaaggaagagtcacttgtaacacagccagccaggaggctgctttgttttttattataaagaacactaacacaaatgcagcatgattgctgtaaaataaatgtgaaatttgtacaaaagtcccagtccttccgcagttctaggtttacagtcaggctcaaccttacttgccccgctcctgcatgaaaacaagtgcgttttatacagcctctgccacccagtggcatagtttaaggctctatattatatttaaaattaaggtttttttcctatcatacacatcaatttggaacctgctggtgactcttctaccacagagggtaaataaaaagaccagtttttaaagtaagaggattcagctcatcttataaaagtataatagtttcggccagacgtccattaacatctgtttaaattagatacagacacaatgccaaatattagaatcataaatgtaattttggagataatgtttaccttgagtaggaagacacttggaccatattaaatttgaaagtcttctgttccagaccaaaatggggtaggctaattccctgtcatccaagcaactaaaaggtaaaaaccttataactttaaaataaaaaaggttatttttttcccctataaaagacaggcagtatgagttaatacattaaaattattttgtacatccctgctccaaacaaccacaaaaatggtactttttaaatgcctgcccatcctctcctggaagggggtttttccaagattcggggtgactgattcatcccacagccccaggcagcagtttatcctggaactgtcctctgttctcccatcactgctgagccctgagaattgtgaatggccctcagagcatctaggcctctgcaacaatcaggtctctggtgacttgaaatgcagcaatgagggagctcagctggatcttctcgttggtgccaacagaaagcctgtactcaatgtctgccattttggtcaataaatgtattcgaactgaagatggaaagtcaactctatgcacaaacaagtgtatctctgtcaggatatcatgcagtgccaaccccttcagagttttcaactctgtaatatttctgtaggctgtggtgaaatcttgattcaacatccagtccaggatgttggcaatgtctgacttgagcgggtgcccggtgcaggtgtagacagtctcctctgtcaccttcccaaaggccatattggtgctctgcaaaatgttcagagccctacgcatgtctccactggaaagagtgactagtgctttcattccatcttcacttatatcaactttctcttcttccacgacatgttccaggcggggaaccatgagttcaggagtcaggggaccgaaccgaaacctcgtgcagcgggactgcaaggcagggatgatctttgacagatagttacagatgaggcagaatctggtattttctgtgaatttctcaattactcttctcaaggcattctgggcgtcctgagtcatggcgtctgcttcatccaagatcactagcttaaagcctttcttaaatattgtccttgtgctagcaaagctcaggatcggtcctcgaatgatgtctattcctcggtcatctgaagcattcagctccaagaccatggagccaaattcnttgtctttatatagctgtttcgcacaggctaggataggtagagtgtcttgccgtgtgccctgggggaccgtagagaagcaagtgtggcagtcggtccttcagttgactaaagcttctgaatggtacctcagaagtgctcctagactgagcaaatagaagatcattgcagggtcatgtggccggtatcttttcaacccagggcaggtatcctgatctgtggtcggccgcgggcatgctcctgcatgcgttgagctgctgaggtctgccatggcggggagacgaaggtgaccagatccgctgagatcgtcgcgtcacaccaagcgcctgcacagtgac

SEQ ID NO: 679911 - DNA, 350 bp, Homo sapiens
cggtgcagcgatgtttgtggtcgtctctagcaggatcccctgatgcgtctctagttgagcgcgtcttcatagtaatgtcacaggccggtgacacggagggggtggaggtgagtgggacgaagtagaggcctgagggtctgtgcctttgtcgaaagtccacagaggaggagcctgcacatcttgacatcgtttgccggggaagtgaacggtttaaagctactgtaggttaaccacagacagtgaagaatgtcaaatataagctacaggctactctctgtggcagcactgtattccgacggacagcagcagcggacaccctcatctgtatacactaagccctcataaacacg

SEQ ID NO: 679912 - DNA, 3981 bp, Homo sapiens
  misc_feature (3645)..(3645): n is a, c, g, or t
tttttatgtttcggttttttccgccatggtgtgcgttgtgcatcgctgggttgatatctgatgtgaatagaatgtagcaaaaccagattccagtgtactagtcatggatctttctctccctggcatgtgaaagtcagtcttagaggaagagattccacttgcacggcaacagagccttacgttaaattttcagtccagttatgaacagcaagtgttgaactctttctgcttgttttgattcaaagtgcagttactgatgttgttttgattatgcaactaagtaggcctccagagcctctctagtggcagagcagctcacactccctccgctgggaacgatggcttctgcctagtacctatccttgtgtttctgatgcagtggtagcattggttcaagttctctcctgctgtggtcagagttgcttcgatgttggccaagtgcttttcttcttgggctcccttctgacctgcaggacagttttcctggagccatttggtatgaggtattaatttagcttaactaaattacaggggactcagaggccgtgctcctgaccgatccagacactattactggctttttttttttttttttaacaatggtgtgcatgtgcaggaaatgacaaatttgtatgtcagattatacaaggatgtattcttaaaccgcatgactattcagatggctactgagttatcagtggccatttattagcatcatatttatttgtattttctcaacagatgttaaggtacaactgtgtttttctcgattatctaaaaaccatagtacttaaattgaacagttgcaaagatgtcttaattgtgtaaagaattggtgtagtcatgactttagctgatactcttatgtacgagatctgtctctgctgtttaacttcattggattaatcagctggtttcaactctactgcgaaacaaaaatagctccttaaaagtactgttctccttcagtggcatgtagttatctaatcaagacacctcattcaaacaaaacctgccttaggaaaatttaatatattttaaattattttaaaagaaatacaacatcttattctttagctttcttaatcggtgctttatggaggccagtgtaacgttacatgactcgttgagaaagttgaggaatttcctctaccacctttgttgcttgaagaaaaacatgtcttttcaaaatgagaggctttcattgaagaaaagaaaaaaacaacagttaaaagcttttggctctctgtttcatttttttccattaagaaaaaaaaaagtccccttttaaaacaagcagggctgggtgtgacggcacatgcctgtaatcccagcactttgggaggctgaggtgggaggactgcttgagcccaggagttcaagatcagcctgggcaacagagtgagataagacccaatctttatttaaaaaataaataaataaatagccaaaaaaacttagtgtggtgctggtgtgcatggtagccccagctactcagggggctgaggatgtggtggcatttacctgtggttctgtggttccggctactcaggaggctgaggtgggagaactgctcgagcctgggacatggaggctgtagcgagccacgatcgtgtcacggtattccagcctgggtgactgacagagcatgatcttgcctcaaaaaataaacacataaaacaagtagtacagcagaagagctgggaatggattggccaacgtttacatttcatggttatcttgaagttccaggtacagcagatgctgagcctctgggtggtttgaggcctggttggccatcagatatttagcttcatactttgccgctgtccttaagggggtgagtcctccatgaacaaagggaatagtgactttttccatttgacagtttaagaatttgacattttttaaagaacagcatctaaagaaagtttattctgtgatattagagacagaaggttttcatataaatgcaagtttgacaaagtcagcatctttctagctgtctaaggaagagtcacttgtaacacagccagccaggaggctgctttgttttttattataaagaacactaacacaaatgcagcatgattgctgtaaaataaatgtgaaatttgtacaaaagtcccagtccttccgcagttctaggtttacagtcaggctcaaccttacttgccccgctcctgcatgaaaacaagtgcgttttatacagcctctgccacccagtggcatagtttaaggctctatattatatttaaaattaaggtttttttcctatcatacacatcaatttggaacctgctggtgactcttctaccacagagggtaaataaaaagaccagtttttaaagtaagaggattcagctcatcttataaaagtataatagtttcggccagacgtccattaacatctgtttaaattagatacagacacaatgccaaatattagaatcataaatgtaattttggagataatgtttaccttgagtaggaagacacttggaccatattaaatttgaaagtcttctgttccagaccaaaatggggtaggctaattccctgtcatccaagcaactaaaaggtaaaaaccttataactttaaaataaaaaaggttatttttttcccctataaaagacaggcagtatgagttaatacattaaaattattttgtacatccctgctccaaacaaccacaaaaatggtactttttaaatgcctgcccatcctctcctggaagggggtttttccaagattcggggtgactgattcatcccacagccccaggcagcagtttatcctggaactgtcctctgttctcccatcactgctgagccctgagaattgtgaatggccctcagagcatctaggcctctgcaacaatcaggtctctggtgacttgaaatgcagcaatgagggagctcagctggatcttctcgttggtgccaacagaaagcctgtactcaatgtctgccattttggtcaataaatgtattcgaactgaagatggaaagtcaactctatgcacaaacaagtgtatctctgtcaggatatcatgcagtgccaaccccttcagagttttcaactctgtaatatttctgtaggctgtggtgaaatcttgattcaacatccagtccaggatgttggcaatgtctgacttgagcgggtgcccggtgcaggtgtagacagtctcctctgtcaccttcccaaaggccatattggtgctctgcaaaatgttcagagccctacgcatgtctccactggaaagagtgactagtgctttcattccatcttcacttatatcaactttctcttcttccacgacatgttccaggcggggaaccatgagttcaggagtcaggggaccgaaccgaaacctcgtgcagcgggactgcaaggcagggatgatctttgacagatagttacagatgaggcagaatctggtattttctgtgaatttctcaattactcttctcaaggcattctgggcgtcctgagtcatggcgtctgcttcatccaagatcactagcttaaagcctttcttaaatattgtccttgtgctagcaaagctcaggatcggtcctcgaatgatgtctattcctcggtcatctgaagcattcagctccaagaccatggagccaaattcnttgtctttatatagctgtttcgcacaggctaggataggtagagtgtcttgccgtgtgccctgggggaccgtagagaagcaagtgtggcagtcggtccttcagttgactaaagcttctgaatggtacctcagaagtgctcctagactgagcaaatagaagatcattgcagggtcatgtggccggtatcttttcaacccagggcaggtatcctgatctgtggtcggccgcgggcatgctcctgcatgcgttgagctgctgaggtctgccatggcggggagacgaaggtgaccagatccgctgagatcgtcgcgtcacaccaagcgcctgcacagtgac

SEQ ID NO: 679913 - DNA, 248 bp, Homo sapiens
cctgtactctcggctccttccgggtcttggtacgcgacggacttggcaactggcccgtctgtcgttggggggtgtccggcgctgtgttttggtgggcgacttgtcctggctgtggttcgtgcgactttggggctacctagcgggctggtcctcctagctgggcggctctgctcacggctgagcacacggtatgcctcgctcagatccacaaagcgggtgtgcaggctttggtaccccggaaccgggga

SEQ ID NO: 679914 - DNA, 620 bp, Homo sapiens
ccagtcccagaccccccgcctggtaaccggtgcgggcccccagaaaggcccccgacccgagccccggaactccagggactccagagtgatggcgaggagaaccagccccggcctggtgatggagccgcgctctgctccagtgatgagagagtcctgaaggcaatcccgagccaccactggagggagacccccgggagccggccaactggcgttcaccatcgagcccccctggggtgccagcctccagccaatggcggaaccagagtgagtggctgagcgtcccaggctgcgccgatgagccaccaccactacttactgatggccctttcgggggtccctgcgccccaccggagaggcccggtgcaccgggccccccccggggcttgggggcatccccggcttcccccatagcagctgctcttgggcctcgggagaggagagacccccgttcccctgggctgccctttccccgggcctcgtctgttcttgggtgcctttggtcaatagttgcacccgtttttattgctccccaccccttttgtagtgggctgggttttaagttataaatgttaactgcctctgggtgaaaaagtttttaataaacccctattacctcctga

SEQ ID NO: 679915 - DNA, 4269 bp, Homo sapiens
  misc_feature (63)..(63): n is a, c, g, or t
  misc_feature (66)..(66): n is a, c, g, or t
  misc_feature (72)..(72): n is a, c, g, or t
  misc_feature (74)..(75): n is a, c, g, or t
  misc_feature (3933)..(3933): n is a, c, g, or t
agcgggtttcttaccgtaggtttctccctgttgaggcgaacgagctaaatgacctctccgggnggnggcggngnnctggccggggcgggcggcgcgggggcggcatgagggcccgcggcccggggggctgaggcgcccgccgcctgccgcgggggccgctcgcgtcctccatggaggccggagaggaaccgctgctgctggccgaactcaagcccgggcgcccccaccagtttgattggaagtccagctgtgaaacctggagcgtcgccttctccccagatggctcctggtttgcttggtctcaaggacactgcatcgtcaaactgatcccctggccgttggaggagcagttcatccctaaagggtttgaagccaaaagccgaagtagcaaaaatgagacgaaagggcggggcagcccaaaagagaagacgctggactgtggtcagattgtctgggggctggccttcagcccgtggccttccccacccagcaggaagctctgggcacgccaccacccccaagtgcccgatgtctcttgcctggttcttgctacgggactcaacgatgggcagatcaagatctgggaggtgcagacagggctcctgcttttgaatctttccggccaccaagatgtcgtgagagatctgagcttcacacccagtggcagtttgattttggtctccgcgtcacgggataagactcttcgcatctgggacctgaataaacacggtaaacagattcaagtgttatcgggccacctgcagtgggtttactgctgttccatctccccagactgcagcatgctgtgctctgcagctggagagaagtcggtctttctatggagcatgaggtcctacacgttaattcggaagctagagggccatcaaagcagtgttgtctcttgtgacttctcccccgactctgccctgcttgtcacggcttcttacgataccaatgtgattatgtgggacccctacaccggcgaaaggctgaggtcactccaccacacccaggttgaccccgccatggatgacagtgacgtccacattagctcactgagatctgtgtgcttctctccagaaggcttgtaccttgccacggtggcagatgacagactcctcaggatctgggccctggaactgaaaactcccattgcatttgctcctatgaccaatgggctttgctgcacattttttccacatggtggagtcattgccacagggacaagagatggccacgtccagttctggacagctcctagggtcctgtcctcactgaagcacttatgccggaaagcccttcgaagtttcctaacaacttaccaagtcctagcactgccaatccccaagaaaatgaaagagttcctcacatacaggactttttaagcaacaccacatcttgtgcttctttgtagcagggtaaatcgtcctgtcaaagggagttgctggaataatgggccaaacatctggtcttgcattgaaatagcatttctttgggattgtgaatagaatgtagcaaaaccagattccagtgtactagtcatggatctttctctccctggcatgtgaaagtcagtcttagaggaagagattccacttgcacggcaacagagccttacgttaaattttcagtccagttatgaacagcaagtgttgaactctttctgcttgttttgattcaaagtgcagttactgatgttgttttgattatgcaactaagtaggcctccagagcctctctagtggcagagcagctcacactccctccgctgggaacgatggcttctgcctagtacctatccttgtgtttctgatgcagtggtagcattggttcaagttctctcctgctgtggtcagagttgcttcgatgttggccaagtgcttttcttcttgggctcccttctgacctgcaggacagttttcctggagccatttggtatgaggtattaatttagcttaactaaattacaggggactcagaggccgtgctcctgaccgatccagacactattactggctttttttttttttttttaacaatggtgtgcatgtgcaggaaatgacaaatttgtatgtcagattatacaaggatgtattcttaaaccgcatgactattcagatggctactgagttatcagtggccatttattagcatcatatttatttgtattttctcaacagatgttaaggtacaactgtgtttttctcgattatctaaaaaccatagtacttaaattgaacagttgcaaagatgtcttaattgtgtaaagaattggtgtagtcatgactttagctgatactcttatgtacgagatctgtctctgctgtttaacttcattggattaatcagctggtttcaactctactgcgaaacaaaaatagctccttaaaagtactgttctccttcagtggcatgtagttatctaatcaagacacctcattcaaacaaaacctgccttaggaaaatttaatatattttaaattattttaaaagaaatacaacatcttattctttagctttcttaatcggtgctttatggaggccagtgtaacgttacatgactcgttgagaaagttgaggaatttcctctaccacctttgttgcttgaagaaaaacatgtcttttcaaaatgagaggctgtggttctgtggttccggctactcaggaggctgaggtgggagaactgctcgagcctgggacatggaggctgtagcgagccacgatcgtgtcacggtattccagcctgggtgactgacagagcatgatcttgccttgagtaggaagacacttggaccatattaaatttgaaagtcttctgttccagaccaaaatggggtaggctaattccctgtcatccaagcaactaaaaggtaaaaaccttataactttaaaataaaaaaggttatttttttcccctataaaagacaggcagtatgagttaatacattaaaattattttgtacatccctgctccaaacaaccacaaaaatggtactttttaaatgcctgcccatcctctcctggaagggggtttttccaagattcggggtgactgattcatcccacagccccaggcagcagtttatcctggaactgtcctctgttctcccatcactgctgagccctgagaattgtgaatggccctcagagcatctaggcctctgcaacaatcaggtctctggtgacttgaaatgcagcaatgagggagctcagctggatcttctcgttggtgccaacagaaagcctgtactcaatgtctgccattttggtcaataaatgtattcgaactgaagatggaaagtcaactctatgcacaaacaagtgtatctctgtcaggatatcatgcagtgccaaccccttcagagttttcaactctgtaatatttctgtaggctgtggtgaaatcttgattcaacatccagtccaggatgttggcaatgtctgacttgagcgggtgcccggtgcaggtgtagacagtctcctctgtcaccttcccaaaggccatattggtgctctgcaaaatgttcagagccctacgcatgtctccactggaaagagtgactagtgctttcattccatcttcacttatatcaactttctcttcttccacgacatgttccaggcggggaaccatgagttcaggagtcaggggaccgaaccgaaacctcgtgcagcgggactgcaaggcagggatgatctttgacagatagttacagatgaggcagaatctggtattttctgtgaatttctcaattactcttctcaaggcattctgggcgtcctgagtcatggcgtctgcttcatccaagatcactagcttaaagcctttcttaaatattgtccttgtgctagcaaagctcaggatcggtcctcgaatgatgtctattcctcggtcatctgaagcattcagctccaagaccatggagccaaattcnttgtctttatatagctgtttcgcacaggctaggataggtagagtgtcttgccgtgtgccctgggggaccgtagagaagcaagtgtggcagtcggtccttcagttgactaaagcttctgaatggtacctcagaagtgctcctagactgagcaaatagaagatcattgcagggtcatgtggccggtatcttttcaacccagggcaggtatcctgatctgtggtcggccgcgggcatgctcctgcatgcgttgagctgctgaggtctgccatggcggggagacgaaggtgaccagatccgctgagatcgtcgcgtcacaccaagcgcctgcacagtgac

SEQ ID NO: 679916 - DNA, 1575 bp, Homo sapiens
tttttctttggaggggggggcgccgcaagcaacctccttctttggtttgaatactattcgtcccgccacgtcagttcgtggtgtgtctgtgtcgtatgaatgtgtgcccccgccctgtgggtgatagtatgttggtgtgctgttcgttctgagtactcttgccttgcgacggtcgtgtgtggagttgtggtatggctcgtcgccacgggtgtagttgggggggggagtgcataccccctcacctcctatccttcgctccctgtggctttgttcatttctatgactggttgcggggcggacccgatctattttttcgctctcgcctacagtcatcgggtgcggtggtgggtgtctttctgtggttccacgcgcgtcggtgatttttgttgtgttcgcagccagcgcgtctgtctcctgcttgttgtctccgtctaccggctagaccgaacgcagggatagtgggggtgctcgcaccgacatatcattgtagactcactgcctttgtgtggcgtgtggctgggtggggcaccccactcctcctttgttgtttttgtgggatgcgccccactcattcctgtgtgtgcgtgtttttgttgggtggtggctgaccacatcgtcggaagggtggctttgctgccccctaggctcgtgtgtgtttgtttgtctcgcggtacctagattacagaatagtgttgtgttcttctccctctagtgacgggaggagtacagctgcaactctgtttttttctctcgctttgtgtgggtcccgcccccaccaagcgcccgctgtctcgcagtccagctccgcctactgggtggggcacccgcgcttagtggtgggctctttttgtatagtgcagtggagtgtgcgtgctccccaccccaacacacagtaggtagtatgttgtagcggccccgcgccctgctcttcgcctacgcatcgttcgcaaacacccgtgtggtgtcggtctatttatctcaacacgcgcctctctctctttcactctcagctcagagtgcgagataatatatttatttttatgattttctctcccgctcggcgaggggcggtgaggtgcgagtggattatctttctccgccgccgccgggcggacacacacgttgttttgtgtatcaccgccacgttcgtgttttggttcggaggaatatatatttgtttgggccccctgcggccgccacttgcggtttttctctccccacaccacgacatagatcaccactttctttttcttatcactcccgcgcggggcgcggggcagggtgtgcggtgcaccccacttcttgtttagatagtgatcactggcagctagtttttcttgtgtgacatacgtcgcgcagcccactcctggttgtggagacaagaggctatgcttatttctgcttaataaaagatacgcaacccttcttataagagccggcgtaggaattcaatcaggggttttttttgtttcttttcgcaggttgtgtgtccccaccttttggggtttttttgtttgtgggcccccccccaaattttgttcaaattttttttagagttccccccccccaacaata

SEQ ID NO: 679917 - DNA, 5221 bp, Homo sapiens
  misc_feature (63)..(63): n is a, c, g, or t
  misc_feature (66)..(66): n is a, c, g, or t
  misc_feature (72)..(72): n is a, c, g, or t
  misc_feature (74)..(75): n is a, c, g, or t
  misc_feature (4885)..(4885): n is a, c, g, or t
agcgggtttcttaccgtaggtttctccctgttgaggcgaacgagctaaatgacctctccgggnggnggcggngnnctggccggggcgggcggcgcgggggcggcatgagggcccgcggcccggggggctgaggcgcccgccgcctgccgcgggggccgctcgcgtcctccatggaggccggagaggaaccgctgctgctggccgaactcaagcccgggcgcccccaccagtttgattggaagtccagctgtgaaacctggagcgtcgccttctccccagatggctcctggtttgcttggtctcaaggacactgcatcgtcaaactgatcccctggccgttggaggagcagttcatccctaaagggtttgaagccaaaagccgaagtagcaaaaatgagacgaaagggcggggcagcccaaaagagaagacgctggactgtggtcagattgtctgggggctggccttcagcccgtggccttccccacccagcaggaagctctgggcacgccaccacccccaagtgcccgatgtctcttgcctggttcttgctacgggactcaacgatgggcagatcaagatctgggaggtgcagacagggctcctgcttttgaatctttccggccaccaagatgtcgtgagagatctgagcttcacacccagtggcagtttgattttggtctccgcgtcacgggataagactcttcgcatctgggacctgaataaacacggtaaacagattcaagtgttatcgggccacctgcagtgggtttactgctgttccatctccccagactgcagcatgctgtgctctgcagctggagagaagtcggtctttctatggagcatgaggtcctacacgttaattcggaagctagagggccatcaaagcagtgttgtctcttgtgacttctcccccgactctgccctgcttgtcacggcttcttacgataccaatgtgattatgtgggacccctacaccggcgaaaggctgaggtcactccaccacacccaggttgaccccgccatggatgacagtgacgtccacattagctcactgagatctgtgtgcttctctccagaaggcttgtaccttgccacggtggcagatgacagactcctcaggatctgggccctggaactgaaaactcccattgcatttgctcctatgaccaatgggctttgctgcacattttttccacatggtggagtcattgccacagggacaagagatggccacgtccagttctggacagctcctagggtcctgtcctcactgaagcacttatgccggaaagcccttcgaagtttcctaacaacttaccaagtcctagcactgccaatccccaagaaaatgaaagagttcctcacatacaggactttttaagcaacaccacatcttgtgcttctttgtagcagggtaaatcgtcctgtcaaagggagttgctggaataatgggccaaacatctggtcttgcattgaaatagcatttctttgggattgtgaatagaatgtagcaaaaccagattccagtgtactagtcatggatctttctctccctggcatgtgaaagtcagtcttagaggaagagattccacttgcacggcaacagagccttacgttaaattttcagtccagttatgaacagcaagtgttgaactctttctgcttgttttgattcaaagtgcagttactgatgttgttttgattatgcaactaagtaggcctccagagcctctctagtggcagagcagctcacactccctccgctgggaacgatggcttctgcctagtacctatccttgtgtttctgatgcagtggtagcattggttcaagttctctcctgctgtggtcagagttgcttcgatgttggccaagtgcttttcttcttgggctcccttctgacctgcaggacagttttcctggagccatttggtatgaggtattaatttagcttaactaaattacaggggactcagaggccgtgctcctgaccgatccagacactattactggctttttttttttttttttaacaatggtgtgcatgtgcaggaaatgacaaatttgtatgtcagattatacaaggatgtattcttaaaccgcatgactattcagatggctactgagttatcagtggccatttattagcatcatatttatttgtattttctcaacagatgttaaggtacaactgtgtttttctcgattatctaaaaaccatagtacttaaattgaacagttgcaaagatgtcttaattgtgtaaagaattggtgtagtcatgactttaaaagaaatacaacatcttattctttagctttcttaatcggtgctttatggaggccagtgtaacgttacatgactcgttgagaaagttgaggaatttcctctaccacctttgttgcttgaagaaaaacatgtcttttcaaaatgagaggctttcattgaagaaaagaaaaaaacaacagttaaaagcttttggctctctgtttcatttttttccattaagaaaaaaaaaagtccccttttaaaacaagcagggctgggtgtgacggcacatgcctgtaatcccagcactttgggaggctgaggtgggaggactgcttgagcccaggagttcaagatcagcctgggcaacagagtgagataagacccaatctttatttaaaaaataaataaataaatagccaaaaaaacttagtgtggtgctggtgtgcatggtagccccagctactcagggggctgaggatgtggtggcatttacctgtggttctgtggttccggctactcaggaggctgaggtgggagaactgctcgagcctgggacatggaggctgtagcgagccacgatcgtgtcacggtattccagcctgggtgactgacagagcatgatcttgcctcaaaaaataaacacataaaacaagtagtacagcagaagagctgggaatggattggccaacgtttacatttcatggttatcttgaagttccaggtacagcagatgctgagcctctgggtggtttgaggcctggttggccatcagatatttagcttcatactttgccgctgtccttaagggggtgagtcctccatgaacaaagggaatagtgactttttccatttgacagtttaagaatttgacattttttaaagaacagcatctaaagaaagtttattctgtgatattagagacagaaggttttcatataaatgcaagtttgacaaagtcagcatctttctagctgtctaaggaagagtcacttgtaacacagccagccaggaggctgctttgttttttattataaagaacactaacacaaatgcagcatgattgctgtaaaataaatgtgaaatttgtacaaaagtcccagtccttccgcagttctaggtttacagtcaggctcaaccttacttgccccgctcctgcatgaaaacaagtgcgttttatacagcctctgccacccagtggcatagtttaaggctctatattatatttaaaattaaggtttttttcctatcatacacatcaatttggaacctgctggtgactcttctaccacagagggtaaataaaaagaccagtttttaaagtaagaggattcagctcatcttataaaagtataatagtttcggccagacgtccattaacatctgtttaaattagatacagacacaatgccaaatattagaatcataaatgtaattttggagataatgtttaccttgagtaggaagacacttggaccatattaaatttgaaagtcttctgttccagaccaaaatggggtaggctaattccctgtcatccaagcaactaaaaggtaaaaaccttataactttaaaataaaaaaggttatttttttcccctataaaagacaggcagtatgagttaatacattaaaattattttgtacatccctgctccaaacaaccacaaaaatggtactttttaaatgcctgcccatcctctcctggaagggggtttttccaagattcggggtgactgattcatcccacagccccaggcagcagtttatcctggaactgtcctctgttctcccatcactgctgagccctgagaattgtgaatggccctcagagcatctaggcctctgcaacaatcaggtctctggtgacttgaaatgcagcaatgagggagctcagctggatcttctcgttggtgccaacagaaagcctgtactcaatgtctgccattttggtcaataaatgtattcgaactgaagatggaaagtcaactctatgcacaaacaagtgtatctctgtcaggatatcatgcagtgccaaccccttcagagttttcaactctgtaatatttctgtaggctgtggtgaaatcttgattcaacatccagtccaggatgttggcaatgtctgacttgagcgggtgcccggtgcaggtgtagacagtctcctctgtcaccttcccaaaggccatattggtgctctgcaaaatgttcagagccctacgcatgtctccactggaaagagtgactagtgctttcattccatcttcacttatatcaactttctcttcttccacgacatgttccaggcggggaaccatgagttcaggagtcaggggaccgaaccgaaacctcgtgcagcgggactgcaaggcagggatgatctttgacagatagttacagatgaggcagaatctggtattttctgtgaatttctcaattactcttctcaaggcattctgggcgtcctgagtcatggcgtctgcttcatccaagatcactagcttaaagcctttcttaaatattgtccttgtgctagcaaagctcaggatcggtcctcgaatgatgtctattcctcggtcatctgaagcattcagctccaagaccatggagccaaattcnttgtctttatatagctgtttcgcacaggctaggataggtagagtgtcttgccgtgtgccctgggggaccgtagagaagcaagtgtggcagtcggtccttcagttgactaaagcttctgaatggtacctcagaagtgctcctagactgagcaaatagaagatcattgcagggtcatgtggccggtatcttttcaacccagggcaggtatcctgatctgtggtcggccgcgggcatgctcctgcatgcgttgagctgctgaggtctgccatggcggggagacgaaggtgaccagatccgctgagatcgtcgcgtcacaccaagcgcctgcacagtgac

SEQ ID NO: 679918 - DNA, 5419 bp, Homo sapiens
  misc_feature (63)..(63): n is a, c, g, or t
  misc_feature (66)..(66): n is a, c, g, or t
  misc_feature (72)..(72): n is a, c, g, or t
  misc_feature (74)..(75): n is a, c, g, or t
  misc_feature (2140)..(2141): n is a, c, g, or t
  misc_feature (2159)..(2159): n is a, c, g, or t
  misc_feature (2179)..(2179): n is a, c, g, or t
  misc_feature (2184)..(2184): n is a, c, g, or t
  misc_feature (2196)..(2196): n is a, c, g, or t
  misc_feature (2199)..(2200): n is a, c, g, or t
  misc_feature (2207)..(2207): n is a, c, g, or t
  misc_feature (2214)..(2214): n is a, c, g, or t
  misc_feature (2226)..(2226): n is a, c, g, or t
  misc_feature (2239)..(2239): n is a, c, g, or t
  misc_feature (2241)..(2241): n is a, c, g, or t
  misc_feature (2243)..(2245): n is a, c, g, or t
  misc_feature (2252)..(2252): n is a, c, g, or t
  misc_feature (2283)..(2284): n is a, c, g, or t
  misc_feature (2286)..(2286): n is a, c, g, or t
  misc_feature (2292)..(2292): n is a, c, g, or t
  misc_feature (2298)..(2299): n is a, c, g, or t
  misc_feature (2316)..(2318): n is a, c, g, or t
  misc_feature (2324)..(2324): n is a, c, g, or t
  misc_feature (5083)..(5083): n is a, c, g, or t
agcgggtttcttaccgtaggtttctccctgttgaggcgaacgagctaaatgacctctccgggnggnggcggngnnctggccggggcgggcggcgcgggggcggcatgagggcccgcggcccggggggctgaggcgcccgccgcctgccgcgggggccgctcgcgtcctccatggaggccggagaggaaccgctgctgctggccgaactcaagcccgggcgcccccaccagtttgattggaagtccagctgtgaaacctggagcgtcgccttctccccagatggctcctggtttgcttggtctcaaggacactgcatcgtcaaactgatcccctggccgttggaggagcagttcatccctaaagggtttgaagccaaaagccgaagtagcaaaaatgagacgaaagggcggggcagcccaaaagagaagacgctggactgtggtcagattgtctgggggctggccttcagcccgtggccttccccacccagcaggaagctctgggcacgccaccacccccaagtgcccgatgtctcttgcctggttcttgctacgggactcaacgatgggcagatcaagatctgggaggtgcagacagggctcctgcttttgaatctttccggccaccaagatgtcgtgagagatctgagcttcacacccagtggcagtttgattttggtctccgcgtcacgggataagactcttcgcatctgggacctgaataaacacggtaaacagattcaagtgttatcgggccacctgcagtgggtttactgctgttccatctccccagactgcagcatgctgtgctctgcagctggagagaagtcggtctttctatggagcatgaggtcctacacgttaattcggaagctagagggccatcaaagcagtgttgtctcttgtgacttctcccccgactctgccctgcttgtcacggcttcttacgataccaatgtgattatgtgggacccctacaccggcgaaaggctgaggtcactccaccacacccaggttgaccccgccatggatgacagtgacgtccacattagctcactgagatctgtgtgcttctctccagaaggcttgtaccttgccacggtggcagatgacagactcctcaggatctgggccctggaactgaaaactcccattgcatttgctcctatgaccaatgggctttgctgcacattttttccacatggtggagtcattgccacagggacaagagatggccacgtccagttctggacagctcctagggtcctgtcctcactgaagcacttatgccggaaagcccttcgaagtttcctaacaacttaccaagtcctagcactgccaatccccaagaaaatgaaagagttcctcacatacaggactttttaagcaacaccacatcttgtgcttctttgtagcagggtaaatcgtcctgtcaaagggagttgctggaataatgggccaaacatctggtcttgcattgaaatagcatttctttgggattgtgaatagaatgtagcaaaaccagattccagtgtactagtcatggatctttctctccctggcatgtgaaagtcagtcttagaggaagagattccacttgcacggcaacagagccttacgttaaattttcagtccagttatgaacagcaagtgttgaactctttctgcttgttttgattcaaagtgcagttactgatgttgttttgattatgcaactaagtaggcctccagagcctctctagtggcagagcagctcacactccctccgctgggaacgatggcttctgcctagtacctatccttgtgtttctgatgcagtggtagcattggttcaagttctctcctgctgtggtcagagttgcttcgatgttggccaagtgcttttcttcttgggctcccttctgacctgcaggacagttttcctggagccatttggtatgaggtattaatttagcttaactaaattacaggggactcagaggccgtgctcctgaccgatccagacactattactggctttttttttttttttttaacaatggtgtgcatgtgcaggaaatgacaaatttgtatgtcagattatacaaggatgtattcttaaaccgcatgactattcagataacaacaaaaaaaacaataannaaaaattaccatcatatntatttctattctcccaacanatgtnaaggaacaacanaanntatcacnaataacnaaaaaccataanacaaaaaataaanancnnnaaaaaanacaaaattgtctaaaaaaatggtgtaatcannanaaaaanaaaaanncttataaacaaaaactnnnactacnatttaacttcattggattaatcagctggtttcaactctactgcgaaacaaaaatagctccttaaaagtactgttctccttcagtggcatgtagttatctaatcaagacacctcattcaaacaaaacctgccttaggaaaatttaatatattttaaattattttaaaagaaatacaacatcttattctttagctttcttaatcggtgctttatggaggccagtgtaacgttacatgactcgttgagaaagttgaggaatttcctctaccacctttgttgcttgaagaaaaacatgtcttttcaaaatgagaggctttcattgaagaaaagaaaaaaacaacagttaaaagcttttggctctctgtttcatttttttccattaagaaaaaaaaaagtccccttttaaaacaagcagggctgggtgtgacggcacatgcctgtaatcccagcactttgggaggctgaggtgggaggactgcttgagcccaggagttcaagatcagcctgggcaacagagtgagataagacccaatctttatttaaaaaataaataaataaatagccaaaaaaacttagtgtggtgctggtgtgcatggtagccccagctactcagggggctgaggatgtggtggcatttacctgtggttctgtggttccggctactcaggaggctgaggtgggagaactgctcgagcctgggacatggaggctgtagcgagccacgatcgtgtcacggtattccagcctgggtgactgacagagcatgatcttgcctcaaaaaataaacacataaaacaagtagtacagcagaagagctgggaatggattggccaacgtttacatttcatggttatcttgaagttccaggtacagcagatgctgagcctctgggtggtttgaggcctggttggccatcagatatttagcttcatactttgccgctgtccttaagggggtgagtcctccatgaacaaagggaatagtgactttttccatttgacagtttaagaatttgacattttttaaagaacagcatctaaagaaagtttattctgtgatattagagacagaaggttttcatataaatgcaagtttgacaaagtcagcatctttctagctgtctaaggaagagtcacttgtaacacagccagccaggaggctgctttgttttttattataaagaacactaacacaaatgcagcatgattgctgtaaaataaatgtgaaatttgtacaaaagtcccagtccttccgcagttctaggtttacagtcaggctcaaccttacttgccccgctcctgcatgaaaacaagtgcgttttatacagcctctgccacccagtggcatagtttaaggctctatattatatttaaaattaaggtttttttcctatcatacacatcaatttggaacctgctggtgactcttctaccacagagggtaaataaaaagaccagtttttaaagtaagaggattcagctcatcttataaaagtataatagtttcggccagacgtccattaacatctgtttaaattagatacagacacaatgccaaatattagaatcataaatgtaattttggagataatgtttaccttgagtaggaagacacttggaccatattaaatttgaaagtcttctgttccagaccaaaatggggtaggctaattccctgtcatccaagcaactaaaaggtaaaaaccttataactttaaaataaaaaaggttatttttttcccctataaaagacaggcagtatgagttaatacattaaaattattttgtacatccctgctccaaacaaccacaaaaatggtactttttaaatgcctgcccatcctctcctggaagggggtttttccaagattcggggtgactgattcatcccacagccccaggcagcagtttatcctggaactgtcctctgttctcccatcactgctgagccctgagaattgtgaatggccctcagagcatctaggcctctgcaacaatcaggtctctggtgacttgaaatgcagcaatgagggagctcagctggatcttctcgttggtgccaacagaaagcctgtactcaatgtctgccattttggtcaataaatgtattcgaactgaagatggaaagtcaactctatgcacaaacaagtgtatctctgtcaggatatcatgcagtgccaaccccttcagagttttcaactctgtaatatttctgtaggctgtggtgaaatcttgattcaacatccagtccaggatgttggcaatgtctgacttgagcgggtgcccggtgcaggtgtagacagtctcctctgtcaccttcccaaaggccatattggtgctctgcaaaatgttcagagccctacgcatgtctccactggaaagagtgactagtgctttcattccatcttcacttatatcaactttctcttcttccacgacatgttccaggcggggaaccatgagttcaggagtcaggggaccgaaccgaaacctcgtgcagcgggactgcaaggcagggatgatctttgacagatagttacagatgaggcagaatctggtattttctgtgaatttctcaattactcttctcaaggcattctgggcgtcctgagtcatggcgtctgcttcatccaagatcactagcttaaagcctttcttaaatattgtccttgtgctagcaaagctcaggatcggtcctcgaatgatgtctattcctcggtcatctgaagcattcagctccaagaccatggagccaaattcnttgtctttatatagctgtttcgcacaggctaggataggtagagtgtcttgccgtgtgccctgggggaccgtagagaagcaagtgtggcagtcggtccttcagttgactaaagcttctgaatggtacctcagaagtgctcctagactgagcaaatagaagatcattgcagggtcatgtggccggtatcttttcaacccagggcaggtatcctgatctgtggtcggccgcgggcatgctcctgcatgcgttgagctgctgaggtctgccatggcggggagacgaaggtgaccagatccgctgagatcgtcgcgtcacaccaagcgcctgcacagtgac

SEQ ID NO: 679919 - DNA, 217 bp, Homo sapiens
gcccggtaatgcagctctctctgatgccccgtgtaccaatatgtaagggcagtgtggaaagcaccttcatcgaggatacagagactattgaccgagtccgtgtaaatggctggcataccctattcctccgaatcagcatccccaccatcaacatggcagaacaagaccacgtgcttctctgtggacattgactcggagctggtgtaggagctgccgg

SEQ ID NO: 679920 - DNA, 175 bp, Homo sapiens
cacgggccgtcgttgtccactaacagctataaccatgcatggcccgtcgttgaccgctaaacagctatgaccagtcactggccggtcgatgaccactaccagcatataccatgtacgggcagttcgtttgcacgcaaacggcctataaccatccacggcccgtgcgtggtaccag

SEQ ID NO: 679921 - DNA, 270 bp, Homo sapiens
atggcatggctttggaaaggagaatggaaaaatagaagaaggtcggccgggcttggtggcttatgcctgtaaccccagcactttgggaggccgaggtgggcggatcacctgaggtcaggagttcgggaccagcctggcaaacaccccatctctactaagcgaaaacccatctctactaaaattacaaaaattagctgggcatggttgcgcatgcctgtaatcccagctactttggaggctgaggtggggagaattgcttgaacctgggag

SEQ ID NO: 679922 - DNA, 206 bp, Homo sapiens
gtgtgactccgttccttctctgtctccccaggattatcctgatgcccttatcaccaactactatctatggcctgctgtgcacttagccaacttctacctggtcccccttcgttacaggttggtcgtagtccaatgtgttgctgtcatctggaactcctacctgtcctggagagaacatcggctctaagactgactcaatccatcgt

SEQ ID NO: 679923 - DNA, 837 bp, Homo sapiens
ctacttggctttggaactgccgccccacccccagagaggcccccccctttgttctatccctcagacccgaggagcccttccataaggattttccaaaaggggactcacaggaaaccaagtcttagtgcttgggagggaggccccctgcgtgctcaaactcacagcccacctggaaggtagacgagattgcgtccccccacgcccctccacaccccagacgtccgagttaacggccggtaggccggagtcacctcccctatgccagtggcccccgctgtactcccatcctcccgtccaggaagatcagctgtgaataaacgctgggctccccccagagcacctgtccgccccactgcccttgctgttctgggatcttcgctccccagttcacgggaaaccagcctgagtccgctcgcacccgcggctgctctcccggctcggcccggccgccctctgtctccggcccccgcggtggcgcttccgagccacgagcccccgcgtcccggcgctttcccggagcccccggcccgccgaggaggcgaagcccccaacgagccaaggtggaaaacaccgtgcctacgcctgtaaagaaatcctgttcccgagcatacctgttgtaccaaccgaccctggtcctaacgagaggagtgacgtattttcatccccctttttaatttgttttcttacgggtttacgattttgaatttttcttatttggttgaaagaattttgattctatccgcctgagtgagttccgcctgtaaaaaggatgttaagctgtgggtaaataatgccaaccaaaagaaatatattgtaccaattctatataataaggta

SEQ ID NO: 679924 - DNA, 156 bp, Homo sapiens
tggaccacacgcacgtattatactctcccttttgtactcatggaacatcagagtacgagcagaaaggcatttaagagaagaacaaaaaaaagggggggggggacaccgactcctgtgtaaagccacctgctgataacttgacggctggaaaatgcc

SEQ ID NO: 679925 - DNA, 272 bp, Homo sapiens
tctatctgtacatagattaacacacaaaaacgctgtaacagcaactataactacaatacacaaaaagataagcataaagatgtctctctgtgttcttggcaaccttcacatattttttgcctaccctctttggggactacattcacacatttatttgtctgtttgaaactgtgccagaactcctgatgctgtgttagttgtttccatcttttttgtttccatttttaatcagtttctgggatgacggtcaacacacagtaaggggtcaccgc

SEQ ID NO: 679926 - DNA, 223 bp, Homo sapiens
gaccacaccaggcgcaggccacccagcagccagacgatggccagcgtgatccagcgcgagaggctcgtgtccagcggccggtgctcaccgaaggcgatcagcgggccgacccaccagaccagggcggacaggaccagaaggaagaagatcccgagcgtgatcgggtggaacaagatggacaggaatttcttcatggtcagcggtcctgcaccatcagcgtgac

SEQ ID NO: 679927 - DNA, 378 bp, Homo sapiens
ctggagtgcaatggcacagtctcggcagcaattctcctgcctcagcctcctgaatagctgggattacaggcgcacaccaccataactggctaacttttgtatttttattagagacagggtttcaccatgttggtcaggctggtctcaaactcctgacctcatgatccgcctgcctcggcttggcctacagaagtgctgggattacaggcgtgagccactgtgcccggcccttatttttttttctctctctctctctctctctctctatctctctctctctctctctctctctctctctctctctctctctctctctctatctctctctctctctctctctctctcttcttctcctcaggccgaattcctgcgaaatgg

SEQ ID NO: 679928 - DNA, 783 bp, Homo sapiens
  misc_feature (7)..(7): n is a, c, g, or t
  misc_feature (117)..(117): n is a, c, g, or t
  misc_feature (225)..(225): n is a, c, g, or t
  misc_feature (441)..(441): n is a, c, g, or t
  misc_feature (473)..(473): n is a, c, g, or t
  misc_feature (496)..(496): n is a, c, g, or t
  misc_feature (511)..(511): n is a, c, g, or t
  misc_feature (560)..(560): n is a, c, g, or t
  misc_feature (590)..(590): n is a, c, g, or t
  misc_feature (660)..(660): n is a, c, g, or t
  misc_feature (676)..(676): n is a, c, g, or t
  misc_feature (722)..(722): n is a, c, g, or t
  misc_feature (767)..(767): n is a, c, g, or t
ctaaganttctccacattgtgtctttcttctgcagtcgtaaaaaggctggtccttgaattgtcctgcatggtaccctaaggcaggcccactggctctttttgatcaaggattctganaaaagctgcccttggaggcccttgaaataacatagggagcagaatgagttctcgagttgtggctgaaacagttcagctcacactgccatcacagaggctgagttagcngttacccagggagggggctcccagctcattccattcccatggggcaagttactagaaggtaagagcacccgagttagctagttccttcctgtatccacacccaggaataccttccagttgtccaagcagccgtagttgttaggattcctaaatactctgcccttggcctgtagccgacgtctcttcttcttgttgatgtgcctttcgatgctagtntcacctcgactgatgagaacagcatgccatanagttagggcacccagggcaagtnccaaagaactaaganaagaggggcgaagactgggtgggtagtttagagagggctggaggaagtntgttgcagttgtgatccatcttcagcacanacctgttgcagaagctgcagttgtgtgttcgggctggcttggggtaaatgcacttcttacagatggaganggtggcgatatcattnctgccctggggtgggtaccaggcggagtggtgatggcctggtagtngttgaagaaattaggatcagattcagttgctatagaagaaatgcnaccgagttgttgcact

SEQ ID NO: 679929 - DNA, 474 bp, Homo sapiens
tctgatagaagggtgtgcttccctttaaggaatcaagcttgacttgcagagccaaaaaaaaggagaaactggcctcataccttgtctacacagtccttgtacagggctcctaacctgtgatgagtaaagaatgtcactttctaacaggtccaggagccccaagttatcttgggacctcaagaagagaggaatttacccaactcataggtattggagggtacaaacccattgctgggcttgactttaaaaagtcttttctgatattccttatggaacagaattccatcagagccaattttaaaagcatatgtgaaaaataattattcttgctgtactttatgcaaataatcaggccaagtataagactaaagtttattttgcaaacaatcctattatgatttgtttttaacaaaaatgaagactggagagtttcaaaacttatcacacttgtcattaaattctagttttattaaa

SEQ ID NO: 679930 - DNA, 173 bp, Homo sapiens
gctggtacggccggaattttgggatgccaggccgggagcatggcgcctgccgcatatggcgaccatggggaacgtgttggctgccagtcgccgccctgaaggtctgccaccgtcgcctgcgccgtgccctcgtggggctgccgccgactccgccctcgccgccgggcttcact

SEQ ID NO: 679931 - DNA, 225 bp, Homo sapiens
aaaatgaatagtgagacgagttcagcggcaaggccttctggtttgcaagaagaaagtcaacatcatggatcagaacaacagcctgcaacttacgctcagggcttgcgctcccctcaggctgccatgactcccggaatccctatttttagtccaatgatgccttatggcacgggactgaccccacagcctattcagaacaacaatagtctgtctattttggcagag

SEQ ID NO: 679932 - DNA, 123 bp, Homo sapiens
attccaaacagccccgtaaaaaagtggaataaagaaaactcagagggcttcttctattctctcacaccagaacaatcaacacaagatttctgtgaccaaattgtatgggagttttctcctcca

SEQ ID NO: 679933 - DNA, 250 bp, Homo sapiens
ggtgtttttatggaatcacttttgattcatgtgtttaaactttgacatctgtatgtgagaattccctgtcctactcttctaatcatccataagtcgacagcagtgttgtttcttagaagttggtttattgaattggaatataaacacgaagtaaagaatgctgcttctccatgggaggggttgaacacattcattgctgtagttctcttccctctctacagttctttcatattcagtctatttattttga

SEQ ID NO: 679934 - DNA, 118 bp, Homo sapiens
gtgtgtgtgtgtgtccttctgcagccatcagacctgctgggactccatctttgtgaatatccattgctggggctctggtcctgtctttggccatgagagctggtcagcatccttatgg

SEQ ID NO: 679935 - DNA, 113 bp, Homo sapiens
gcaccttgtcgatctctttagctgaatctgctcattaactcctgtctagcctccaacttctcttctgtgcgggtggtcttgaactcggtggtacagagtaacaccctaggcta

SEQ ID NO: 679936 - DNA, 665 bp, Homo sapiens
aaagcagaagctggtatcgcacgaggggcatgcacttctgtcggagagagggactacccccactgctgccgccagcggatgtgtgttctcgcccatccgtttctgactcctgcctgagtaggggtattatagactataatttctgatgaccatagtgttgggactcttgaaaaggggcagaggaaatggcttgggtgctggggagttcccccctccgagccctccttccctgtccaacctgagggatgtggatttgggactagtctgggggcccctcctgcagcgagggatgggagggggtgctgagctgtgaatcccctgtggcagggggcgacaactccgtgtagcattaaagccccgtggcgcgggtccgctgctggtctaatttggacccctgcctctcagtgccccttgccctaggggtgtctgtctccagaggggagggacaaatcccctactggggccatttcaatggggtacgtttgggatttttttccccactcacttttattttctaatgataatggagatgtctggacccttccgtcaccccacctgtcggtcttgtcctggctctgcctgtcccccaccgtagtactcgtaggtgaaccccaggtcctcaagtccccccctttatgtgttgaaagttatggtttcagatgtta

SEQ ID NO: 679937 - DNA, 497 bp, Homo sapiens
gtgtcatcgagtagtacctctaggacgaaatagtgtactgcaatagcaaatctagatcagtgaataaatttatactatcaaacacattagattatatacgtgagtgagaatagcaggaacctttatatgcgtcttctcaaaatcatttctcactaaatattttcttggcatcttcaatttaaaagtaatatacaaacatataaaatcacttcaccattgacaagatctttcatgggtatctgctgtgatctcaacatcattaattctcaagtcaatcatttgcttaagtagcaattgttttcaaaataaacatgccatacagacattgttcatttcacaaacagtggattcatttcgatcaaatgcacgtggtaggaactattaacatagaggtttcaaaaagtgagtgagattgactgcaccccaaatcctcatactctggcttgaggagcagacagtgagctacatcatgggggactgcaagtgtgtcttacgac

SEQ ID NO: 679938 - DNA, 402 bp, Homo sapiens
taaacactgctgaataccaattggtacttggaatacctcttcctctaaaatacgtgatcctattccccaaagtggaacttccatgtggaagcatcctaagtgatcgtcctgggtggtgccatatttcactaaagtgggaaacagaagaggtgaaacttggctcttccaacaaggcttgcactttatacttggggcagtgcttgggaaaaggggggcccttggaggtgacgcaggatcactgtagctagaggagaggtctcactgaaacagaacgcatctgtgactgtagcttgcttggagagcctagacagccaaccattggattggccttaatgttggaatggaacacattctattccaatggggatagaaacctttacctatgtcatatctgtaaggaga

SEQ ID NO: 679939 - DNA, 486 bp, Homo sapiens
cacgaggtccagccttataggaaacagaggcaatgggcaccatggcaatttacttaatgctggtgtattagtccgttttcatgctgctgataaaggcatacctgagattgggcaatttacaaaagaaagagctttaatggacttatagttccacatggctagggaagcctcacaatcatggcagaagacaaggagaagcaagtcacatcttacatgaatggcagcaggcaaagagagagagcttgtgcagggaaactcccatttttaaaaccatcagatctcttgatagtgattgagttctcatgagacctgatggttttataaggggcttttcccctgcgtcactccacatttctccttgctgctgccaggtgaagaaggacttgtttgcttccccttccaacacgattgtaagtttcctgaggcctccctaaccatgctgaactgtgagtcaattaaacctctttcctttataaatcaaaaaaa

SEQ ID NO: 679940 - DNA, 1087 bp, Homo sapiens
tgaagaatgtctgatgacagacatcgtgtggaaacagaaggaatggcgagacatgatgctatctcagtatcccattacgtcccaagccagagcattgaaacgagtgcaggctgattcatccgtctagccggtcctcctcatcattgcactccatccagatgtctagatcaaggatactcagctcatcctgagcaggtcaggttctcggtctcattcagccgctcagatccaagcagagagatgtagcccaggcacgtactcatgccaaccctcgtggtagacccaagatgggctccagatcaacatcagagtccagatcaaggtcacgttcacattcacgttctcgttcagcatcaagcaacagcagagaaatctctgagccctggagtctccagggacagcagcaccagctatactgaaaccaaagatccctcttctggtcaggaggttgcaactccaccagtgccacaactgcaggtctgtgagccaaaggagaggacttccacctcctcatcctctgtccaagcaaggcgtctgagtcagcctgaatcagctgaaaagcatgtgacccagaggttacagctgagcgggggagcccaaagaagtgtgaagctgaagaggcaagagcaacagtggccacacagcccaaactcaggagatcagaactctcatctggcagaatcagaaagaattcatcacactgtgaggaaaaggaggaagtgacatggccccaagtgacaacaggcctgaaaatgatgtccagaagctacaagtccatggagacccatcaggacgatgacggcgaggacgctaaaatgaggcaagaaagagcgagccaaacatcagggacacacgggccaacacgaggacgccactagacaatgtgcacaaggtgccaacgtttgaaacaccgtgtgacacacggaccagtgagaaacattaggctacccacctaagagacacacacaacctggagagagagaacaaagacgatccacaagacaaagcagacacaacgacgaccagacgaagatgtaacatcatcctctttatcctcctcttcttcttgttgccttctatgtggagg

SEQ ID NO: 679941 - DNA, 1027 bp, Homo sapiens
  misc_feature (517)..(517): n is a, c, g, or t
agctgggaggactaggagccaagtgcaccactgccacgcctcccgtgactacctactactggacaaccagtgccccgcatgtagctgcaccctactgccacgcagcggctaggaggacaccacattatctgtagcacgtgccctgtacctgtcaccttacgacacaatgttcttgctatcccatatgctaccaagacaacatgcactcaaacacgcagggacgctatgtggagcaggtctaatatgtcacccagctgtaggtgcaacaaatgcccctactatgttgcggctacccaatagtaccccactgagagcactatacataagcatatgtgtgtgcaacataaggcaaaccctatacacgtatggccattgcgatgcaattgttcgcaaccacggttgacgacaccacacaacgcacatgcacgcaactgaaccgtaccgcgttcgacacctgatacgtaccgccgtcggctatatacacacggcaccaccagagacgctcagcacagagttntcgcaattatcaacccaccccgttctacacaccttattcacacatgacgaccccgttggcactactgccacaactatctggctacactctactttacactttacatttacctaccccccagttaaaataaagttaaattacacttaaccttaacactaacccccacaaaagcgaccaaccaacaaacgtggccgcccaacacaacacatcgcgcttcacacgcataacccagcttcactcccaaaccatacccaccgaccaccaccagcatatgtccgtcagcccttctgccacaaccgcattacaccacatcgtcatagtccatactgggcaacaatctactatcatgcttacgcagcaagcatctataggcgcagacgacccattataacagccgcactcgtttgatcggcgccatcatgccgttaacatcatcgcatatcaacgcagttacaaaactactactctaccctacatacagtcgactctcatcggcgcaacgaccgcgca

SEQ ID NO: 679942 - DNA, 876 bp, Homo sapiens
  misc_feature (349)..(349): n is a, c, g, or t
gccgcgcccgcggagttttcctgcccggcgctgacggctgctgcgcccgcggtcccagtgccccgagtgccccgcgtgccccgcgagcgggagtgggacccagccctaggcagaacccagtgcgccgctgcccgggacgccacgcaggagatgagccactcccgccacactgtcccatttcagacccatcgctgtcctgtgagttccccagtggccaagatctaaccatgagctacccatggcatatcccccgaccccaggtgtgcataaccaaccaagactgaaaccaaggatggtgagttcccattgaagcgacaggccgttgccttgcccttaaccacattcccanacacaggcaccctagacaattgacacacacaaccaagtacggggagctatggaactacaccaggtttgagaccaacccccttattttgccggcgcgcggacaaggttataaagagccaaagtggaccttaaatcatcaatacaggagaggaaactcgcaacagcgcacaagaacaattggtacaattgcgggaaccaaagtatctggcgaagggagaagaccacagaaatactattcgcacacaaacaaacagtttggtaaaccccgattggaggtgggaaccccaccactatggggcggagacaattggggactttaaacacgcaaaccacacaagagttgtggcaacagcacacacattaggagagcgcaggaccataatttgggggcgacaacggacacaccaacatcacgctcaataccaattagcatccacgcagtcgataaaggacacactaagtaataacacattcaccaacagtataaattagagagaacgtaacggataagttgccaggagcagcaac

SEQ ID NO: 679943 - DNA, 3781 bp, Homo sapiens
  misc_feature (3445)..(3445): n is a, c, g, or t
cggacgcgtgggtcgacccacgcgtcgcggacgcgtgggtcaaagtgcagttactgatgttgttttgattatgcaactaagtaggcctccagagcctctctagtggcagagcagctcacactccctccgctgggaacgatggcttctgcctagtacctatccttgtgtttctgatgcagtggtagcattggttcaagttctctcctgctgtggtcagagttgcttcgatgttggccaagtgcttttcttcttgggctcccttctgacctgcaggacagttttcctggagccatttggtatgaggtattaatttagcttaactaaattacaggggactcagaggccgtgctcctgaccgatccagacactattactggctttttttttttttttttaacaatggtgtgcatgtgcaggaaatgacaaatttgtatgtcagattatacaaggatgtattcttaaaccgcatgactattcagatggctactgagttatcagtggccatttattagcatcatatttatttgtattttctcaacagatgttaaggtacaactgtgtttttctcgattatctaaaaaccatagtacttaaattgaacagttgcaaagatgtcttaattgtgtaaagaattggtgtagtcatgactttagctgatactcttatgtacgagatctgtctctgctgtttaacttcattggattaatcagctggtttcaactctactgcgaaacaaaaatagctccttaaaagtactgttctccttcagtggcatgtagttatctaatcaagacacctcattcaaacaaaacctgccttaggaaaatttaatatattttaaattattttaaaagaaatacaacatcttattctttagctttcttaatcggtgctttatggaggccagtgtaacgttacatgactcgttgagaaagttgaggaatttcctctaccacctttgttgcttgaagaaaaacatgtcttttcaaaatgagaggctttcattgaagaaaagaaaaaaacaacagttaaaagcttttggctctctgtttcatttttttccattaagaaaaaaaaaagtccccttttaaaacaagcagggctgggtgtgacggcacatgcctgtaatcccagcactttgggaggctgaggtgggaggactgcttgagcccaggagttcaagatcagcctgggcaacagagtgagataagacccaatctttatttaaaaaataaataaataaatagccaaaaaaacttagtgtggtgctggtgtgcatggtagccccagctactcagggggctgaggatgtggtggcatttacctgtggttctgtggttccggctactcaggaggctgaggtgggagaactgctcgagcctgggacatggaggctgtagcgagccacgatcgtgtcacggtattccagcctgggtgactgacagagcatgatcttgcctcaaaaaataaacacataaaacaagtagtacagcagaagagctgggaatggattggccaacgtttacatttcatggttatcttgaagttccaggtacagcagatgctgagcctctgggtggtttgaggcctggttggccatcagatatttagcttcatactttgccgctgtccttaagggggtgagtcctccatgaacaaagggaatagtgactttttccatttgacagtttaagaatttgacattttttaaagaacagcatctaaagaaagtttattctgtgatattagagacagaaggttttcatataaatgcaagtttgacaaagtcagcatctttctagctgtctaaggaagagtcacttgtaacacagccagccaggaggctgctttgttttttattataaagaacactaacacaaatgcagcatgattgctgtaaaataaatgtgaaatttgtacaaaagtcccagtccttccgcagttctaggtttacagtcaggctcaaccttacttgccccgctcctgcatgaaaacaagtgcgttttatacagcctctgccacccagtggcatagtttaaggctctatattatatttaaaattaaggtttttttcctatcatacacatcaatttggaacctgctggtgactcttctaccacagagggtaaataaaaagaccagtttttaaagtaagaggattcagctcatcttataaaagtataatagtttcggccagacgtccattaacatctgtttaaattagatacagacacaatgccaaatattagaatcataaatgtaattttggagataatgtttaccttgagtaggaagacacttggaccatattaaatttgaaagtcttctgttccagaccaaaatggggtaggctaattccctgtcatccaagcaactaaaaggtaaaaaccttataactttaaaataaaaaaggttatttttttcccctataaaagacaggcagtatgagttaatacattaaaattattttgtacatccctgctccaaacaaccacaaaaatggtactttttaaatgcctgcccatcctctcctggaagggggtttttccaagattcggggtgactgattcatcccacagccccaggcagcagtttatcctggaactgtcctctgttctcccatcactgctgagccctgagaattgtgaatggccctcagagcatctaggcctctgcaacaatcaggtctctggtgacttgaaatgcagcaatgagggagctcagctggatcttctcgttggtgccaacagaaagcctgtactcaatgtctgccattttggtcaataaatgtattcgaactgaagatggaaagtcaactctatgcacaaacaagtgtatctctgtcaggatatcatgcagtgccaaccccttcagagttttcaactctgtaatatttctgtaggctgtggtgaaatcttgattcaacatccagtccaggatgttggcaatgtctgacttgagcgggtgcccggtgcaggtgtagacagtctcctctgtcaccttcccaaaggccatattggtgctctgcaaaatgttcagagccctacgcatgtctccactggaaagagtgactagtgctttcattccatcttcacttatatcaactttctcttcttccacgacatgttccaggcggggaaccatgagttcaggagtcaggggaccgaaccgaaacctcgtgcagcgggactgcaaggcagggatgatctttgacagatagttacagatgaggcagaatctggtattttctgtgaatttctcaattactcttctcaaggcattctgggcgtcctgagtcatggcgtctgcttcatccaagatcactagcttaaagcctttcttaaatattgtccttgtgctagcaaagctcaggatcggtcctcgaatgatgtctattcctcggtcatctgaagcattcagctccaagaccatggagccaaattcnttgtctttatatagctgtttcgcacaggctaggataggtagagtgtcttgccgtgtgccctgggggaccgtagagaagcaagtgtggcagtcggtccttcagttgactaaagcttctgaatggtacctcagaagtgctcctagactgagcaaatagaagatcattgcagggtcatgtggccggtatcttttcaacccagggcaggtatcctgatctgtggtcggccgcgggcatgctcctgcatgcgttgagctgctgaggtctgccatggcggggagacgaaggtgaccagatccgctgagatcgtcgcgtcacaccaagcgcctgcacagtgac

SEQ ID NO: 679944 - DNA, 509 bp, Homo sapiens
agaagaagacagtgtgattcgcacaatggcagggtcatgatacaatccagatctctgaccccgtggaggtgaaggggctcgtacagcatgccaggctgaggactctcgggactgaggcatccagagtcgcagctataaatcataagggttccctgcccattacatcacacggtagcagcatccaaagagtggcgtagaagaaaatctcatcaccgtgggctcagtttagattgctagtcggctcagaaagctacctgcaatatgcgtttccaaggatgcaccacaaatactctccacatgagttgagaacatcagtggatgaaactcagcatgcttagtgcggggccaagtcctctaacaaaggacaacagcggttaacctgcatatcgaggacaggcactgtcaagccctcatcagggattcatccagagaactttggtaattcttggcaaatccctggtatcagacaatttccttccttactgtgatgcagtgtaatggacacatct

SEQ ID NO: 679945 - DNA, 3375 bp, Homo sapiens
  misc_feature (3039)..(3039): n is a, c, g, or t
ggagctcggcccttattcgtgtgcacatgtcagattatacaaggatgtattcttaaaccgcatgactattcagatggctactgagttatcagtggccatttattagcatcatatttatttgtattttctcaacagatgttaaggtacaactgtgtttttctcgattatctaaaaaccatagtacttaaattgaacagttgcaaagatgtcttaattgtgtaaagaattggtgtagtcatgactttagctgatactcttatgtacgagatctgtctctgctgtttaacttcattggattaatcagctggtttcaactctactgcgaaacaaaaatagctccttaaaagtactgttctccttcagtggcatgtagttatctaatcaagacacctcattcaaacaaaacctgccttaggaaaatttaatatattttaaattattttaaaagaaatacaacatcttattctttagctttcttaatcggtgctttatggaggccagtgtaacgttacatgactcgttgagaaagttgaggaatttcctctaccacctttgttgcttgaagaaaaacatgtcttttcaaaatgagaggctttcattgaagaaaagaaaaaaacaacagttaaaagcttttggctctctgtttcatttttttccattaagaaaaaaaaaagtccccttttaaaacaagcagggctgggtgtgacggcacatgcctgtaatcccagcactttgggaggctgaggtgggaggactgcttgagcccaggagttcaagatcagcctgggcaacagagtgagataagacccaatctttatttaaaaaataaataaataaatagccaaaaaaacttagtgtggtgctggtgtgcatggtagccccagctactcagggggctgaggatgtggtggcatttacctgtggttctgtggttccggctactcaggaggctgaggtgggagaactgctcgagcctgggacatggaggctgtagcgagccacgatcgtgtcacggtattccagcctgggtgactgacagagcatgatcttgcctcaaaaaataaacacataaaacaagtagtacagcagaagagctgggaatggattggccaacgtttacatttcatggttatcttgaagttccaggtacagcagatgctgagcctctgggtggtttgaggcctggttggccatcagatatttagcttcatactttgccgctgtccttaagggggtgagtcctccatgaacaaagggaatagtgactttttccatttgacagtttaagaatttgacattttttaaagaacagcatctaaagaaagtttattctgtgatattagagacagaaggttttcatataaatgcaagtttgacaaagtcagcatctttctagctgtctaaggaagagtcacttgtaacacagccagccaggaggctgctttgttttttattataaagaacactaacacaaatgcagcatgattgctgtaaaataaatgtgaaatttgtacaaaagtcccagtccttccgcagttctaggtttacagtcaggctcaaccttacttgccccgctcctgcatgaaaacaagtgcgttttatacagcctctgccacccagtggcatagtttaaggctctatattatatttaaaattaaggtttttttcctatcatacacatcaatttggaacctgctggtgactcttctaccacagagggtaaataaaaagaccagtttttaaagtaagaggattcagctcatcttataaaagtataatagtttcggccagacgtccattaacatctgtttaaattagatacagacacaatgccaaatattagaatcataaatgtaattttggagataatgtttaccttgagtaggaagacacttggaccatattaaatttgaaagtcttctgttccagaccaaaatggggtaggctaattccctgtcatccaagcaactaaaaggtaaaaaccttataactttaaaataaaaaaggttatttttttcccctataaaagacaggcagtatgagttaatacattaaaattattttgtacatccctgctccaaacaaccacaaaaatggtactttttaaatgcctgcccatcctctcctggaagggggtttttccaagattcggggtgactgattcatcccacagccccaggcagcagtttatcctggaactgtcctctgttctcccatcactgctgagccctgagaattgtgaatggccctcagagcatctaggcctctgcaacaatcaggtctctggtgacttgaaatgcagcaatgagggagctcagctggatcttctcgttggtgccaacagaaagcctgtactcaatgtctgccattttggtcaataaatgtattcgaactgaagatggaaagtcaactctatgcacaaacaagtgtatctctgtcaggatatcatgcagtgccaaccccttcagagttttcaactctgtaatatttctgtaggctgtggtgaaatcttgattcaacatccagtccaggatgttggcaatgtctgacttgagcgggtgcccggtgcaggtgtagacagtctcctctgtcaccttcccaaaggccatattggtgctctgcaaaatgttcagagccctacgcatgtctccactggaaagagtgactagtgctttcattccatcttcacttatatcaactttctcttcttccacgacatgttccaggcggggaaccatgagttcaggagtcaggggaccgaaccgaaacctcgtgcagcgggactgcaaggcagggatgatctttgacagatagttacagatgaggcagaatctggtattttctgtgaatttctcaattactcttctcaaggcattctgggcgtcctgagtcatggcgtctgcttcatccaagatcactagcttaaagcctttcttaaatattgtccttgtgctagcaaagctcaggatcggtcctcgaatgatgtctattcctcggtcatctgaagcattcagctccaagaccatggagccaaattcnttgtctttatatagctgtttcgcacaggctaggataggtagagtgtcttgccgtgtgccctgggggaccgtagagaagcaagtgtggcagtcggtccttcagttgactaaagcttctgaatggtacctcagaagtgctcctagactgagcaaatagaagatcattgcagggtcatgtggccggtatcttttcaacccagggcaggtatcctgatctgtggtcggccgcgggcatgctcctgcatgcgttgagctgctgaggtctgccatggcggggagacgaaggtgaccagatccgctgagatcgtcgcgtcacaccaagcgcctgcacagtgac

SEQ ID NO: 679946 - DNA, 2314 bp, Homo sapiens
  misc_feature (63)..(63): n is a, c, g, or t
  misc_feature (66)..(66): n is a, c, g, or t
  misc_feature (72)..(72): n is a, c, g, or t
  misc_feature (74)..(75): n is a, c, g, or t
agcgggtttcttaccgtaggtttctccctgttgaggcgaacgagctaaatgacctctccgggnggnggcggngnnctggccggggcgggcggcgcgggggcggcatgagggcccgcggcccggggggctgaggcgcccgccgcctgccgcgggggccgctcgcgtcctccatggaggccggagaggaaccgctgctgctggccgaactcaagcccgggcgcccccaccagtttgattggaagtccagctgtgaaacctggagcgtcgccttctccccagatggctcctggtttgcttggtctcaaggacactgcatcgtcaaactgatcccctggccgttggaggagcagttcatccctaaagggtttgaagccaaaagccgaagtagcaaaaatgagacgaaagggcggggcagcccaaaagagaagacgctggactgtggtcagattgtctgggggctggccttcagcccgtggccttccccacccagcaggaagctctgggcacgccaccacccccaagtgcccgatgtctcttgcctggttcttgctacgggactcaacgatgggcagatcaagatctgggaggtgcagacagggctcctgcttttgaatctttccggccaccaagatgtcgtgagagatctgagcttcacacccagtggcagtttgattttggtctccgcgtcacgggataagactcttcgcatctgggacctgaataaacacggtaaacagattcaagtgttatcgggccacctgcagtgggtttactgctgttccatctccccagactgcagcatgctgtgctctgcagctggagagaagtcggtctttctatggagcatgaggtcctacacgttaattcggaagctagagggccatcaaagcagtgttgtctcttgtgacttctcccccgactctgccctgcttgtcacggcttcttacgataccaatgtgattatgtgggacccctacaccggcgaaaggctgaggtcactccaccacacccaggttgaccccgccatggatgacagtgacgtccacattagctcactgagatctgtgtgcttctctccagaaggcttgtaccttgccacggtggcagatgacagactcctcaggatctgggccctggaactgaaaactcccattgcatttgctcctatgaccaatgggctttgctgcacattttttccacatggtggagtcattgccacagggacaagagatggccacgtccagttctggacagctcctagggtcctgtcctcactgaagcacttatgccggaaagcccttcgaagtttcctaacaacttaccaagtcctagcactgccaatccccaagaaaatgaaagagttcctcacatacaggactttttaagcaacaccacatcttgtgcttctttgtagcagggtaaatcgtcctgtcaaagggagttgctggaataatgggccaaacatctggtcttgcattgaaatagcatttctttgggattgtgaatagaatgtagcaaaaccagattccagtgtactagtcatggatctttctctccctggcatgtgaaagtcagtcttagaggaagagattccacttgcacggcaacagagccttacgttaaattttcagtccagttatgaacagcaagtgttgaactctttctgcttgttttgattcaaagtgcagttactgatgttgttttgattatgcaactaagtaggcctccagagcctctctagtggcagagcagctcacactccctccgctgggaacgatggcttctgcctagtacctatccttgtgtttctgatgcagtggtagcattggttcaagttctctcctgctgtggtcagagttgcttcgatgttggccaagtgcttttcttcttgggctcccttctgacctgcaggacagttttcctggagccatttggtatgaggtattaatttagcttaactaaattacaggggactcagaggccgtgctcctgaccgatccagacactattactggctttttttttttttttttaacaatggtgtgcatgtgcaggaaatgacaaatttgtatgtcagattatacaaggatgtattcttaaaccgcatgactattcagattttaacttcattggattaatcagctggtttcaactctactgcgaaacaaaaatagctccttaaaagtactgttctccttcagtggcatgtagttatctaatcaagacacctcattcaaacaaaacctgccttaggaaaatttaatatattttaaattattttaaaagaaatacaacatcttattctttagctttc

SEQ ID NO: 679947 - DNA, 341 bp, Homo sapiens
aaaaaatttacatcatgcaatggcacgtacaataggtctaatggagtggtggaccaagagccatatcagtgctagcaaaatggcagaattcatatagcatcaacagttcttggggcctttttccccccccccgcctctcttgcggcgggcccccccataacaccagcacccgcgcggcgcacacgggcccattattcccgcgacggcatgcgcttaacaccttggcaagctgagcttctctatcaaacactgcgcaccaagcaccaaagttcaagtttcggcaacaacacacactcgtttccaccgcccctattccccactggcctcccagggtcaccccg

SEQ ID NO: 679948 - DNA, 2300 bp, Homo sapiens
  misc_feature (63)..(63): n is a, c, g, or t
  misc_feature (66)..(66): n is a, c, g, or t
  misc_feature (72)..(72): n is a, c, g, or t
  misc_feature (74)..(75): n is a, c, g, or t
agcgggtttcttaccgtaggtttctccctgttgaggcgaacgagctaaatgacctctccgggnggnggcggngnnctggccggggcgggcggcgcgggggcggcatgagggcccgcggcccggggggctgaggcgcccgccgcctgccgcgggggccgctcgcgtcctccatggaggccggagaggaaccgctgctgctggccgaactcaagcccgggcgcccccaccagtttgattggaagtccagctgtgaaacctggagcgtcgccttctccccagatggctcctggtttgcttggtctcaaggacactgcatcgtcaaactgatcccctggccgttggaggagcagttcatccctaaagggtttgaagccaaaagccgaagtagcaaaaatgagacgaaagggcggggcagcccaaaagagaagacgctggactgtggtcagattgtctgggggctggccttcagcccgtggccttccccacccagcaggaagctctgggcacgccaccacccccaagtgcccgatgtctcttgcctggttcttgctacgggactcaacgatgggcagatcaagatctgggaggtgcagacagggctcctgcttttgaatctttccggccaccaagatgtcgtgagagatctgagcttcacacccagtggcagtttgattttggtctccgcgtcacgggataagactcttcgcatctgggacctgaataaacacggtaaacagattcaagtgttatcgggccacctgcagtgggtttactgctgttccatctccccagactgcagcatgctgtgctctgcagctggagagaagtcggtctttctatggagcatgaggtcctacacgttaattcggaagctagagggccatcaaagcagtgttgtctcttgtgacttctcccccgactctgccctgcttgtcacggcttcttacgataccaatgtgattatgtgggacccctacaccggcgaaaggctgaggtcactccaccacacccaggttgaccccgccatggatgacagtgacgtccacattagctcactgagatctgtgtgcttctctccagaaggcttgtaccttgccacggtggcagatgacagactcctcaggatctgggccctggaactgaaaactcccattgcatttgctcctatgaccaatgggctttgctgcacattttttccacatggtggagtcattgccacagggacaagagatggccacgtccagttctggacagctcctagggtcctgtcctcactgaagcacttatgccggaaagcccttcgaagtttcctaacaacttaccaagtcctagcactgccaatccccaagaaaatgaaagagttcctcacatacaggactttttaagcaacaccacatcttgtgcttctttgtagcagggtaaatcgtcctgtcaaagggagttgctggaataatgggccaaacatctggtcttgcattgaaatagcatttctttgggattgtgaatagaatgtagcaaaaccagattccagtgtactagtcatggatctttctctccctggcatgtgaaagtcagtcttagaggaagagattccacttgcacggcaacagagccttacgttaaattttcagtccagttatgaacagcaagtgttgaactctttctgcttgttttgattcaaagtgcagttactgatgttgttttgattatgcaactaagtaggcctccagagcctctctagtggcagagcagctcacactccctccgctgggaacgatggcttctgcctagtacctatccttgtgtttctgatgcagtggtagcattggttcaagttctctcctgctgtggtcagagttgcttcgatgttggccaagtgcttttcttcttgggctcccttctgacctgcaggacagttttcctggagccatttggtatgaggtattaatttagcttaactaaattacaggggactcagaggccgtgctcctgaccgatccagacactattactggctttttttttttttttttcaatggtgtgctttgtgccggaatctgcacacatttcgttgtgtcagcattactccccggcgtggttttccttcaccgcatgagtattcaggatgggtacctggagctttcacgggggccctttttagctcctatctattccgggtttccccaccggtgtcagggcccccgggtgtttcccggatatctaaaccctcgtttactcggcccgtggcgcatctctctggcgcagcaatggggggccgcgtccgggagccttgtgaaccg

SEQ ID NO: 679949 - DNA, 163 bp, Homo sapiens
tctagaggatcccgtctctctctgatcaggtcctcagagatctagagagaattgactctttcatttatatatgaattcttcatatattgaacatgattggaatccaaccactattataataatttgagtatattttaactatttgccttaacaaattaatttt

SEQ ID NO: 679950 - DNA, 2229 bp, Homo sapiens
  misc_feature (63)..(63): n is a, c, g, or t
  misc_feature (66)..(66): n is a, c, g, or t
  misc_feature (72)..(72): n is a, c, g, or t
  misc_feature (74)..(75): n is a, c, g, or t
  misc_feature (2038)..(2038): n is a, c, g, or t
agcgggtttcttaccgtaggtttctccctgttgaggcgaacgagctaaatgacctctccgggnggnggcggngnnctggccggggcgggcggcgcgggggcggcatgagggcccgcggcccggggggctgaggcgcccgccgcctgccgcgggggccgctcgcgtcctccatggaggccggagaggaaccgctgctgctggccgaactcaagcccgggcgcccccaccagtttgattggaagtccagctgtgaaacctggagcgtcgccttctccccagatggctcctggtttgcttggtctcaaggacactgcatcgtcaaactgatcccctggccgttggaggagcagttcatccctaaagggtttgaagccaaaagccgaagtagcaaaaatgagacgaaagggcggggcagcccaaaagagaagacgctggactgtggtcagattgtctgggggctggccttcagcccgtggccttccccacccagcaggaagctctgggcacgccaccacccccaagtgcccgatgtctcttgcctggttcttgctacgggactcaacgatgggcagatcaagatctgggaggtgcagacagggctcctgcttttgaatctttccggccaccaagatgtcgtgagagatctgagcttcacacccagtggcagtttgattttggtctccgcgtcacgggataagactcttcgcatctgggacctgaataaacacggtaaacagattcaagtgttatcgggccacctgcagtgggtttactgctgttccatctccccagactgcagcatgctgtgctctgcagctggagagaagtcggtctttctatggagcatgaggtcctacacgttaattcggaagctagagggccatcaaagcagtgttgtctcttgtgacttctcccccgactctgccctgcttgtcacggcttcttacgataccaatgtgattatgtgggacccctacaccggcgaaaggctgaggtcactccaccacacccaggttgaccccgccatggatgacagtgacgtccacattagctcactgagatctgtgtgcttctctccagaaggcttgtaccttgccacggtggcagatgacagactcctcaggatctgggccctggaactgaaaactcccattgcatttgctcctatgaccaatgggctttgctgcacattttttccacatggtggagtcattgccacagggacaagagatggccacgtccagttctggacagctcctagggtcctgtcctcactgaagcacttatgccggaaagcccttcgaagtttcctaacaacttaccaagtcctagcactgccaatccccaagaaaatgaaagagttcctcacatacaggactttttaagcaacaccacatcttgtgcttctttgtagcagggtaaatcgtcctgtcaaagggagttgctggaataatgggccaaacatctggtcttgcattgaaatagcatttctttgggattgtgaatagaatgtagcaaaaccagattccagtgtactagtcatggatctttctctccctggcatgtgaaagtcagtcttagaggaagagattccacttgcacggcaacagagccttacgttaaattttcagtccagttatgaacagcaagtgttgaactctttctgcttgttttgattcaaagtgcagttactgatgttgttttgattatgcaactaagtaggcctccagagcctctctagtggcagagcagctcacactccctccgctgggaacgatggcttctgcctagtacctatccttgtgtttctgatgcagtggtagcattggttcaagttctctcctgctgtggtcagagttgcttcgatgttggccaagtgcttttcttcttgggctcccttctgacctgcaggacagttttcctggagccatttggtatgaggtattaatttagcttaactaaattacaggggactcagaggccgtgctcctgaccgatccagacactattactggctttttttttttttttttgttgntttgtttttttttttcagatggagtttcgctcttcttgcccaggctggagtgcagtggtgcgatctcagctccctgcgacctcccccctcccgggttcaagctattctcctgcctcagcctcccaagtagctgagatttcaggcatacaccactacaccaggctaatttttttgtatttagtagagactgg

SEQ ID NO: 679951 - DNA, 1835 bp, Homo sapiens
  misc_feature (63)..(63): n is a, c, g, or t
  misc_feature (66)..(66): n is a, c, g, or t
  misc_feature (72)..(72): n is a, c, g, or t
  misc_feature (74)..(75): n is a, c, g, or t
agcgggtttcttaccgtaggtttctccctgttgaggcgaacgagctaaatgacctctccgggnggnggcggngnnctggccggggcgggcggcgcgggggcggcatgagggcccgcggcccggggggctgaggcgcccgccgcctgccgcgggggccgctcgcgtcctccatggaggccggagaggaaccgctgctgctggccgaactcaagcccgggcgcccccaccagtttgattggaagtccagctgtgaaacctggagcgtcgccttctccccagatggctcctggtttgcttggtctcaaggacactgcatcgtcaaactgatcccctggccgttggaggagcagttcatccctaaagggtttgaagccaaaagccgaagtagcaaaaatgagacgaaagggcggggcagcccaaaagagaagacgctggactgtggtcagattgtctgggggctggccttcagcccgtggccttccccacccagcaggaagctctgggcacgccaccacccccaagtgcccgatgtctcttgcctggttcttgctacgggactcaacgatgggcagatcaagatctgggaggtgcagacagggctcctgcttttgaatctttccggccaccaagatgtcgtgagagatctgagcttcacacccagtggcagtttgattttggtctccgcgtcacgggataagactcttcgcatctgggacctgaataaacacggtaaacagattcaagtgttatcgggccacctgcagtgggtttactgctgttccatctccccagactgcagcatgctgtgctctgcagctggagagaagtcggtctttctatggagcatgaggtcctacacgttaattcggaagctagagggccatcaaagcagtgttgtctcttgtgacttctcccccgactctgccctgcttgtcacggcttcttacgataccaatgtgattatgtgggacccctacaccggcgaaaggctgaggtcactccaccacacccaggttgaccccgccatggatgacagtgacgtccacattagctcactgagatctgtgtgcttctctccagaaggcttgtaccttgccacggtggcagatgacagactcctcaggatctgggccctggaactgaaaactcccattgcatttgctcctatgaccaatgggctttgctgcacattttttccacatggtggagtcattgccacagggacaagagatggccacgtccagttctggacagctcctagggtcctgtcctcactgaagcacttatgccggaaagcccttcgaagtttcctaacaacttaccaagtcctagcactgccaatccccaagaaaatgaaagagttcctcacatacaggactttttaagcaacaccacatcttgtgcttctttgtagcagggtaaatcgtcctgtcaaagggagttgctggaataatgggccaaacatctggtcttgcattgaaatagcatttctttgggattgtgaatagaatgtagcaaaaccagattccagtgtactagtcatggatctttctctccctggcatgtgaaagtcagtcttagaggaagagattccacttgcacggcaacagagccttacgttaaattttcagtccagttatgaacagcaagtgttgaactctttctgcttgttttgattcaaagtgcagttactgatgttgttttgattatgcaactaagtaggcctccagagcctctctagtggcagagcagctcacactccctccgctgggaacgatggcttctgcctagtacctatccttgtgtttctgtgacaaagtgacatggggtaccga

SEQ ID NO: 679952 - DNA, 314 bp, Homo sapiens
ttctacttctgtttaacgagatagcatctcagttgtttaagctggaatgcagtagcatgatcatggcttactgcaaccttgacttcttaggctcaagcagtcctcctgtctcagcctctagagtagctgggatcacaaatgcatgccaccatacctggctaacttttcttttcttttcttttttatttttttgagatggagtctcacactgtcaccgggctggaatgcagtggcgtgatctcagctcactgcaacctctgcctcctgggttcaagtgattctcctgcctcaacctttcaagaagcaggaactgg

SEQ ID NO: 679953 - DNA, 618 bp, Homo sapiens
  misc_feature (555)..(556): n is a, c, g, or t
cttaggagacctgagtcctaaggcccttttctggaagtatcggctccttcagaccatttaatggaacccactattttaaaggccccaactgcaggaaaggcctgggaggcaaactacaatcatcctcctgaggcagattccgttggaactgcattcaacttagggccaactgttaaccaaactgagccaaatggggattccaccaccggggccactgacctgtcccccgagcccaaaggcttcaattacccatggttcagttggaaattcagttaacccagcagttacagtcctttatccccaacaccattgtgagagggctcatttctaaggttatccgaaccttgaagatggactgctctggggcccatgtgcaagtgacctgtgccaagctaatctccaggacaggccacctgatgaagcttctcagtggccagcaggaagtaaaggcatctgagatagaaggggatacggaccaatggaagactgagaactacattatggagagcacggaagcccagagtgaacaggaggagaggtcgctggagctcacannagaggttccaggatcacgctatactgacaaacttatcttggcatttgtgactgaattacttg

SEQ ID NO: 679954 - DNA, 355 bp, Homo sapiens
gcgtcgacatccattcagctaatctttatctatctaactatctaatctatttagaggcaggggattgctctgttgctcaagcaggagtgcagtgacatgatcatagctcagtgcagcctcaaactcctgggctgaagtgatcctcctgcctcagcctcccaagtagctgggactacaggcatgtgccaccacacccagctaattctttaattttttttacataagaggtctcaatatgttgtccaggctggtcttgaacttttggcatcaagcaatcttcctgtcttggcctcccaaagtgctgggattacaggtatgagccaccacagccagcttcgatctacatcttttaaat

SEQ ID NO: 679955 - DNA, 405 bp, Homo sapiens
tcaccgagcagcttggatgcccaggttgttgttgtggatggcctgctccgtccggcattaacacacagcaagggaccctgcagcagccgcagtttagatgcatggccaagtggaataactagctaacgacctcttcccgaagcgctgtgacctacaaaaggccagctgcttcactcagtttgttctgactccttctgtgtagctctcaggctctgggcgcccagctgctgcagagtacaggtatcctgtactgaaagttcgcactccacaccagaccctccttcccatgtttgagcgctgcgctttgccccaagtatatttctgtgggcctttcccttgagtcaagattttgtgttgcactttcaacccgagaggatttttataagacaatttgctgtaaaccag

SEQ ID NO: 679956 - DNA, 2666 bp, Homo sapiens
  misc_feature (2330)..(2330): n is a, c, g, or t
tcctgtcatcagagggctgtttccctttataaaaggggaaaacaattgctttttaaatttcttttcttcttggagtctaagattttaaaagttgcagcccacatgtgaatccaaatttcctttgaaccatcaaatttgaatccctctaattcggatttcccattcaaatcatgtcagggcagttacttgttgaactttgtcctgaaatcctgtggttctgtggttccggctactcaggaggctgaggtgggagaactgctcgagcctgggacatggaggctgtagcgagccacgatcgtgtcacggtattccagcctgggtgactgacagagcatgatcttgcctcaaaaaataaacacataaaacaagtagtacagcagaagagctgggaatggattggccaacgtttacatttcatggttatcttgaagttccaggtacagcagatgctgagcctctgggtggtttgaggcctggttggccatcagatatttagcttcatactttgccgctgtccttaagggggtgagtcctccatgaacaaagggaatagtgactttttccatttgacagtttaagaatttgacattttttaaagaacagcatctaaagaaagtttattctgtgatattagagacagaaggttttcatataaatgcaagtttgacaaagtcagcatctttctagctgtctaaggaagagtcacttgtaacacagccagccaggaggctgctttgttttttattataaagaacactaacacaaatgcagcatgattgctgtaaaataaatgtgaaatttgtacaaaagtcccagtccttccgcagttctaggtttacagtcaggctcaaccttacttgccccgctcctgcatgaaaacaagtgcgttttatacagcctctgccacccagtggcatagtttaaggctctatattatatttaaaattaaggtttttttcctatcatacacatcaatttggaacctgctggtgactcttctaccacagagggtaaataaaaagaccagtttttaaagtaagaggattcagctcatcttataaaagtataatagtttcggccagacgtccattaacatctgtttaaattagatacagacacaatgccaaatattagaatcataaatgtaattttggagataatgtttaccttgagtaggaagacacttggaccatattaaatttgaaagtcttctgttccagaccaaaatggggtaggctaattccctgtcatccaagcaactaaaaggtaaaaaccttataactttaaaataaaaaaggttatttttttcccctataaaagacaggcagtatgagttaatacattaaaattattttgtacatccctgctccaaacaaccacaaaaatggtactttttaaatgcctgcccatcctctcctggaagggggtttttccaagattcggggtgactgattcatcccacagccccaggcagcagtttatcctggaactgtcctctgttctcccatcactgctgagccctgagaattgtgaatggccctcagagcatctaggcctctgcaacaatcaggtctctggtgacttgaaatgcagcaatgagggagctcagctggatcttctcgttggtgccaacagaaagcctgtactcaatgtctgccattttggtcaataaatgtattcgaactgaagatggaaagtcaactctatgcacaaacaagtgtatctctgtcaggatatcatgcagtgccaaccccttcagagttttcaactctgtaatatttctgtaggctgtggtgaaatcttgattcaacatccagtccaggatgttggcaatgtctgacttgagcgggtgcccggtgcaggtgtagacagtctcctctgtcaccttcccaaaggccatattggtgctctgcaaaatgttcagagccctacgcatgtctccactggaaagagtgactagtgctttcattccatcttcacttatatcaactttctcttcttccacgacatgttccaggcggggaaccatgagttcaggagtcaggggaccgaaccgaaacctcgtgcagcgggactgcaaggcagggatgatctttgacagatagttacagatgaggcagaatctggtattttctgtgaatttctcaattactcttctcaaggcattctgggcgtcctgagtcatggcgtctgcttcatccaagatcactagcttaaagcctttcttaaatattgtccttgtgctagcaaagctcaggatcggtcctcgaatgatgtctattcctcggtcatctgaagcattcagctccaagaccatggagccaaattcnttgtctttatatagctgtttcgcacaggctaggataggtagagtgtcttgccgtgtgccctgggggaccgtagagaagcaagtgtggcagtcggtccttcagttgactaaagcttctgaatggtacctcagaagtgctcctagactgagcaaatagaagatcattgcagggtcatgtggccggtatcttttcaacccagggcaggtatcctgatctgtggtcggccgcgggcatgctcctgcatgcgttgagctgctgaggtctgccatggcggggagacgaaggtgaccagatccgctgagatcgtcgcgtcacaccaagcgcctgcacagtgac

SEQ ID NO: 679957 - DNA, 255 bp, Homo sapiens
ggggcaactcctcccccagcgccaaggacattcaagaagattttggaacagcgtgggtatcgaggcggacgacgacccgcttcaacaaggttatcagtgagctgaattggaaaaaacatttaagacgtcatttcccagggtattttgcaagctttccaagttgtaccctcttggtgggggctgtagccgttctttgcttgccccagggtttttcagcccctgcttctttggttcttccccttcttgcagcagagg

SEQ ID NO: 679958 - DNA, 1525 bp, Homo sapiens
  misc_feature (63)..(63): n is a, c, g, or t
  misc_feature (66)..(66): n is a, c, g, or t
  misc_feature (72)..(72): n is a, c, g, or t
  misc_feature (74)..(75): n is a, c, g, or t
agcgggtttcttaccgtaggtttctccctgttgaggcgaacgagctaaatgacctctccgggnggnggcggngnnctggccggggcgggcggcgcgggggcggcatgagggcccgcggcccggggggctgaggcgcccgccgcctgccgcgggggccgctcgcgtcctccatggaggccggagaggaaccgctgctgctggccgaactcaagcccgggcgcccccaccagtttgattggaagtccagctgtgaaacctggagcgtcgccttctccccagatggctcctggtttgcttggtctcaaggacactgcatcgtcaaactgatcccctggccgttggaggagcagttcatccctaaagggtttgaagccaaaagccgaagtagcaaaaatgagacgaaagggcggggcagcccaaaagagaagacgctggactgtggtcagattgtctgggggctggccttcagcccgtggccttccccacccagcaggaagctctgggcacgccaccacccccaagtgcccgatgtctcttgcctggttcttgctacgggactcaacgatgggcagatcaagatctgggaggtgcagacagggctcctgcttttgaatctttccggccaccaagatgtcgtgagagatctgagcttcacacccagtggcagtttgattttggtctccgcgtcacgggataagactcttcgcatctgggacctgaataaacacggtaaacagattcaagtgttatcgggccacctgcagtgggtttactgctgttccatctccccagactgcagcatgctgtgctctgcagctggagagaagtcggtctttctatggagcatgaggtcctacacgttaattcggaagctagagggccatcaaagcagtgttgtctcttgtgacttctcccccgactctgccctgcttgtcacggcttcttacgataccaatgtgattatgtgggacccctacaccggcgaaaggctgaggtcactccaccacacccaggttgaccccgccatggatgacagtgacgtccacattagctcactgagatctgtgtgcttctctccagaaggcttgtaccttgccacggtggcagatgacagactcctcaggatctgggccctggaactgaaaactcccattgcatttgctcctatgaccaatgggctttgctgcacattttttccacatggtggagtcattgccacagggacaagagatggccacgtccagttctggacagctcctagggtcctgtcctcactgaagcacttatgccggaaagcccttcgaagtttcctaacaacttaccaagtcctagcactgccaatccccaagaaaatgaaagagttcctcacatacaggactttttaagcaacaccacatcttgtgcttctttgtagcagggtaaatcgtcctgtcaaagggagttgctggaataatgggccaaacatctggtcttgcattgaaatagcatttctttgggattgtgaatagaatgtagcaaaaccaga

SEQ ID NO: 679959 - DNA, 1024 bp, Homo sapiens
  misc_feature (63)..(63): n is a, c, g, or t
  misc_feature (66)..(66): n is a, c, g, or t
  misc_feature (72)..(72): n is a, c, g, or t
  misc_feature (74)..(75): n is a, c, g, or t
  misc_feature (1004)..(1004): n is a, c, g, or t
  misc_feature (1006)..(1006): n is a, c, g, or t
  misc_feature (1010)..(1010): n is a, c, g, or t
agcgggtttcttaccgtaggtttctccctgttgaggcgaacgagctaaatgacctctccgggnggnggcggngnnctggccggggcgggcggcgcgggggcggcatgagggcccgcggcccggggggctgaggcgcccgccgcctgccgcgggggccgctcgcgtcctccatggaggccggagaggaaccgctgctgctggccgaactcaagcccgggcgcccccaccagtttgattggaagtccagctgtgaaacctggagcgtcgccttctccccagatggctcctggtttgcttggtctcaaggacactgcatcgtcaaactgatcccctggccgttggaggagcagttcatccctaaagggtttgaagccaaaagccgaagtagcaaaaatgagacgaaagggcggggcagcccaaaagagaagacgctggactgtggtcagattgtctgggggctggccttcagcccgtggccttccccaagtgcccgatgtctcttgcctggttcttgctacgggactcaacgatgggcagatcaagatctgggaggtgcagacagggctcctgcttttgaatctttccggccaccaagatgtcgtgagagatctgagcttcacacccagtggcagtttgattttggtctccgcgtcacgggataagactcttcgcatctgggacctgaataaacacggtatgggaagtgaaggaactactcggcaactccaaaaatactgtatttgctttctccactttaccagtgtcatttttatctaaaacagtgtttcttgatgtttttttctgtgattgccccttaaggagccttttagacagttttttcctaatcgcccctgcccgccccaaagataatactataccaaatagagtttaataccgaacatatactgtgtgtctatttaggctattttaatatcgaagatatattgtatatctacttatgtgctgaatgcatgtctatgctttgtatgtaaaaaaatgttaanantttnttggctaccaaaaa

SEQ ID NO: 679960 - DNA, 667 bp, Homo sapiens
  misc_feature (510)..(510): n is a, c, g, or t
accagcaccaatgtaagtctgccttatgatcctgcagccaattgcaaagggtctcaaaagtctatggacctgtgcacaccgtgtatttaggcctgaatcccataccggtgttgcatgcatacgaggcagcgaaagaagccctgattgataatgtataggagtcttctggaagaggcaattccccaatatctcaaagaactactaaaggacttggcaggtgcacatatttctgcgtcagcttgggctactgctgagactgcgatgcaaaacagagccctagcttgtcagcagagcttagtctatctgcatggctgtcgagcgttgcactactgtctatcttggctgtcaatgctcccagtttctgccactccatgctattaggagtcatatgcagcgatggatacagatggaacgagagccagcgatggtagctcacgacctttgcggaagtacgcaatggagcagaggagcattgatgaccgagatcattaggaagctcactgccttgtngaggagtttagaataacccaagaacgattcgagtattacgatatgaaactactagccctgtgaaagactcatgaacacttaggattctgaactcccatgcatccaggctgcaataatctcctgtactcagtgatagagccccagcctctgcttgctt

SEQ ID NO: 679961 - DNA, 793 bp, Homo sapiens
  misc_feature (457)..(457): n is a, c, g, or t
gtaggcactttgcaaagtcgttttccaacattcctttcctttacatacgaaccagccagtgatcccacaagcctgtttttactacactccatccccaaagggccgcaaaatactcactttctcttcttccacgacatgttccaggcggggaaccatgagttcaggagtcaggggaccgaaccgaaacctcgtgcagcgggactgcaaggcagggatgatctttgacagatagttacagatgaggcagaatctggtattttctgtgaatttctcaattactcttctcaaggcattctgggcgtcctgagtcatggcgtctgcttcatccaagatcactagcttaaagcctttcttaaatattgtccttgtgctagcaaagctcaggatcggtcctcgaatgatgtctattcctcggtcatctgaagcattcagctccaagaccatggagccaaattcnttgtctttatatagctgtttcgcacaggctaggataggtagagtgtcttgccgtgtgccctgggggaccgtagagaagcaagtgtggcagtcggtccttcagttgactaaagcttctgaatggtacctcagaagtgctcctagactgagcaaatagaagatcattgcagggtcatgtggccggtatcttttcaacccagggcaggtatcctgatctgtggtcggccgcgggcatgctcctgcatgcgttgagctgctgaggtctgccatggcggggagacgaaggtgaccagatccgctgagatcgtcgcgtcacaccaagcgcctgcacagtgac

SEQ ID NO: 679962 - DNA, 531 bp, Homo sapiens
ctttccgtgctagtcgtatcagttaatatgtatcaggagatctgatgggttatcagggagccgaactttgcttcttgctgattttctcttgctgctgcatgtaagaagtagcttttgcctcctgttatgattctgaggcctccctagccatgtggaactgtaagtccaattaaacctttattttctttctagtctcgggtatgtctttatcagcagtgtgacaacagactaatgcagattcccactgagagagtgtccacatgacagaataacaaagtcagaaagtatataccatgggccacatctatatacatcttgactggtgtgcgaaacttcaaaataagaccaaaactagactgggtgagcatgccaagaaaaaccagtaacaataaagttcaaaactaatttttacaaagagaacctattttttaacaccttactaatggccaggcatggtggctcaagccttgtaataccagcactttgggaggccgcgcggggcggatcacctgaggtccggagttcaagacc

SEQ ID NO: 679963 - DNA, 197 bp, Homo sapiens
ccatttgaatcctgttaaatagttttagaacatagtctgttaaaagttctggagctcctttccaatacaggcttctcctggtcagttacttaagatagaatataggcatttaggcatggccaggagtcctttggggaaggtgaggtgatggcacaatttaattatagacagatgcattagtttcctgttcgtgctgt

SEQ ID NO: 679964 - DNA, 903 bp, Homo sapiens
atgaatggacagtaccagcagcccacggacagtctcaacaatgacaacaatgtattccctggtttgcttgttgttaaccatcaatggtgaccttgtgagacgtggccactacaccatgctttatcctggcagcacaaagaccatgtggttcaatgtgtgacgatgccatcatcaccaaggccagcatcaatggactgtcctggacagctgaagggtacttgctgttctatcacaaacatgttcctggaatacgagtatgccttatctgcagctggtcagaaaaacaaatggcaatgcatttggcaagcctcacaaagtgatcctcacccttgggccataaaacatacaacacaatacaataaaaggcagaactcaaccaggaccatagatagaacatcgaaataccacaatgacacagatagatgtactaacaatcaagatacattgagtatacagtcgagatagcagaggagtgtcacaccacaaaggatatccgggtgtaggatgctacctaggaggaaatggcgaatagtaatacacttatttcctcatcgcccaggtcttgcatcatcagtgcgcacagtgagcaggctacgctagtataacagtcgatcccggctcaccttaccacccacccaacctactctgatcatcctctgacaattttgaaacttgatcacactactagaatacagtaaatctttatcaacgaagcacagcagagagtagcacccgtttgatgttattagttgcaattacgcgaccctaatccctacatcagtaatcatacgaaaacggcgacatacattgacacaaatctggattaagataattaattgccgataatacagcgaatatgatcaagtcccccagggttgcaactacacacagatgtgattgcca

SEQ ID NO: 679965 - DNA, 1047 bp, Homo sapiens
  misc_feature (7)..(7): n is a, c, g, or t
  misc_feature (77)..(77): n is a, c, g, or t
  misc_feature (94)..(94): n is a, c, g, or t
  misc_feature (136)..(136): n is a, c, g, or t
  misc_feature (141)..(141): n is a, c, g, or t
  misc_feature (153)..(153): n is a, c, g, or t
  misc_feature (168)..(168): n is a, c, g, or t
  misc_feature (193)..(193): n is a, c, g, or t
  misc_feature (199)..(199): n is a, c, g, or t
  misc_feature (206)..(206): n is a, c, g, or t
  misc_feature (219)..(219): n is a, c, g, or t
  misc_feature (223)..(223): n is a, c, g, or t
  misc_feature (225)..(225): n is a, c, g, or t
  misc_feature (227)..(227): n is a, c, g, or t
  misc_feature (234)..(234): n is a, c, g, or t
  misc_feature (258)..(258): n is a, c, g, or t
  misc_feature (268)..(268): n is a, c, g, or t
  misc_feature (271)..(271): n is a, c, g, or t
  misc_feature (301)..(301): n is a, c, g, or t
  misc_feature (318)..(318): n is a, c, g, or t
  misc_feature (333)..(333): n is a, c, g, or t
  misc_feature (355)..(355): n is a, c, g, or t
  misc_feature (365)..(365): n is a, c, g, or t
  misc_feature (370)..(370): n is a, c, g, or t
  misc_feature (377)..(377): n is a, c, g, or t
  misc_feature (382)..(382): n is a, c, g, or t
  misc_feature (387)..(387): n is a, c, g, or t
  misc_feature (394)..(394): n is a, c, g, or t
  misc_feature (400)..(400): n is a, c, g, or t
  misc_feature (421)..(421): n is a, c, g, or t
  misc_feature (428)..(428): n is a, c, g, or t
  misc_feature (430)..(430): n is a, c, g, or t
  misc_feature (432)..(432): n is a, c, g, or t
  misc_feature (451)..(451): n is a, c, g, or t
  misc_feature (474)..(474): n is a, c, g, or t
  misc_feature (492)..(492): n is a, c, g, or t
  misc_feature (496)..(496): n is a, c, g, or t
  misc_feature (518)..(518): n is a, c, g, or t
  misc_feature (523)..(523): n is a, c, g, or t
  misc_feature (533)..(533): n is a, c, g, or t
  misc_feature (547)..(547): n is a, c, g, or t
  misc_feature (568)..(568): n is a, c, g, or t
  misc_feature (580)..(580): n is a, c, g, or t
  misc_feature (593)..(593): n is a, c, g, or t
  misc_feature (600)..(600): n is a, c, g, or t
  misc_feature (608)..(608): n is a, c, g, or t
  misc_feature (613)..(613): n is a, c, g, or t
  misc_feature (633)..(633): n is a, c, g, or t
  misc_feature (658)..(658): n is a, c, g, or t
  misc_feature (694)..(694): n is a, c, g, or t
  misc_feature (721)..(721): n is a, c, g, or t
  misc_feature (731)..(731): n is a, c, g, or t
  misc_feature (748)..(748): n is a, c, g, or t
  misc_feature (758)..(758): n is a, c, g, or t
  misc_feature (818)..(818): n is a, c, g, or t
  misc_feature (837)..(837): n is a, c, g, or t
  misc_feature (845)..(845): n is a, c, g, or t
  misc_feature (875)..(876): n is a, c, g, or t
  misc_feature (881)..(882): n is a, c, g, or t
  misc_feature (905)..(905): n is a, c, g, or t
  misc_feature (907)..(907): n is a, c, g, or t
  misc_feature (914)..(915): n is a, c, g, or t
  misc_feature (934)..(934): n is a, c, g, or t
  misc_feature (937)..(937): n is a, c, g, or t
  misc_feature (950)..(950): n is a, c, g, or t
  misc_feature (961)..(961): n is a, c, g, or t
  misc_feature (965)..(965): n is a, c, g, or t
  misc_feature (971)..(971): n is a, c, g, or t
  misc_feature (976)..(976): n is a, c, g, or t
  misc_feature (998)..(998): n is a, c, g, or t
ggggacngagagaacaagggggacaaaaaagcaggcggggacgggccggaaggcccgggagggggcaggaaaagggngacgacaggaccagcgnggccgcggcgcaccccgagaagcgcaccgggggggcgacggnccggnccaccgaccacngggggggcaaggccncagcagcggggacaccgcaccacgncgcggngaagaancagagcgtggacncggngncngtggacngggcaccagcccggcggagcaccnggcccggcgnccnaaaggaggatggggtgccgctggccgagangaagacagcaaacaggnggcagagcagcccgnagcagcccacagagacccaagngacccgcagnggccngcgggcnggggnagccnacacggngcaggngcgagcagacacagcgtggcngaggggngncnggagccagacccagcgcgncagcagcgggcagggggcggagnggcgcagcggcggcgccncccnggggagcggccggagcagccgncgcgngggcggccgnggcgaccgtggccngaacagggccgcacggcaccngtgcccgccgcngcccacaccctgngccagcnccgccatngagtnccctggagggaaggagactnggcagtggatcaacccagtggactnccaggaagaggcatccctgcaggaggccctggtggnagagatgtcctgggacaaaggcgagangactgagccnctcgagaagacagagcnacctgagggngccctggagctgggcctgggatacagagttgtgcttgggaggatggagacagatgtgatngtggaggctcagagacggngagtgacncgcccgaggcgacgtagcacacacaggagnnacatnngggacccaaatgaaccagagctncnccaggcnncagtgcacctgcctgctgngcngccccgtgcctgngggcacccatnctgncggggnaaccnagatgctggcatgaaatggaantgctgcacccggctgggctggcatccgtggggcaggacagacctggcat

SEQ ID NO: 679966 - DNA, 673 bp, Homo sapiens
cgtcccgggctggcggtgctgggcgcggacgagcgcatcttctcgactgacgcgcaggctggcgcacggagaggagctgcggttcggggccatccacgtgcgttgcctcctgacgcccggccacaccgccggccacatgagctacttcctgatgggaggactgattgcccggacccacccagacccatgttctcgggcagacgcagctgtcaggtggccaggactgcggctcgtgcctggacgggcagcgcaccagcagatgtaccagagcctggcacgagacatgggtaccgctgacccccgagacaggtgtacatgcggaccacgagacacacgcattagcaacctggagttatgcccagaaagtggagcccatgcaacgaccacgtgagagccaagcatgtcactgggctaagagaggagccgagtgcgcaagttcacgggcaaggcggtccccgccgacgtcctggaggcgctatgcaaggagcgggcgacacttcgaacaggcgggcgaagccgcggaagcccaaaggcgcgaggacctcacttgcgctgacagtgaggggctcctgaagtgcaggcaccacacgactgaaccacccaaacctcacaggctggggactgcgtcctcctcgtgaactcggcagctggaccacatgagggccactctgaa

SEQ ID NO: 679967 - DNA, 274 bp, Homo sapiens
  misc_feature (8)..(8): n is a, c, g, or t
  misc_feature (13)..(14): n is a, c, g, or t
  misc_feature (18)..(18): n is a, c, g, or t
  misc_feature (21)..(23): n is a, c, g, or t
  misc_feature (165)..(165): n is a, c, g, or t
cacactgntcgcnntgangtnnncacacttcgatcgcggagaatttggcagtccgattgggggggggtcccttcagagacccacaggccggtggcatcggcgcggagtgcccaggttcacagtgcagcttgtggctcgtgtccatcttgcaggtggctcttcctncacatcacgatctggggtctcgaagaggatcgggggtaggaaatcctccaggatcttaggaaatttcactccgcttctcctgctacaatgctctgctttaggtcacgag

SEQ ID NO: 679968 - DNA, 148 bp, Homo sapiens
gtagaggaaagagggtcccattcctgccgaaccccgtaaggaggcaaggttgcgcttcaggcacacagccagctgcctccatgctgcccagtccactccagcccagcgtgatccatgtacctgtcaagcacctttcacaggggggtac

SEQ ID NO: 679969 - DNA, 192 bp, Homo sapiens
tttaaatttttttcccccccccccccaaaattgtaaagccaaaagttcccggaaatatttgggaggattaaatttgggggccctggttctcttccaaaaaatttttttccctaaaaacctggtaaaggggttttaaaagtttttccaaaatgtgaaaagggaaacccccgtcttttttatttaaggaattta

SEQ ID NO: 679970 - DNA, 157 bp, Homo sapiens
  misc_feature (8)..(8): n is a, c, g, or t
  misc_feature (13)..(14): n is a, c, g, or t
  misc_feature (18)..(18): n is a, c, g, or t
  misc_feature (21)..(23): n is a, c, g, or t
cacactgntcgcnntgangtnnncacacttcgatcgcggagaatttggcagtccgattgggggggggtcccttcagagacccacaggccggtggcatcggcgcggatgtgcccatgtgttcacacgtgcatgcttgttggctcagtgtccattcttg

SEQ ID NO: 679971 - DNA, 102 bp, Homo sapiens
cctccagccgttatgggtgggctgtggagatgatgacagaaaggctggaagtgaaagggggtgggtttgaagtgccagtgagcaagggtgtcctcatggtcc

SEQ ID NO: 679972 - DNA, 201 bp, Homo sapiens
gttaagctactatggaaaccacatgtcacttagtccagactataccttgtgtagcttcaagaactcgcagtacattaccagctgtgattctccactgaaatttaatttttaacgggagctcaaggtcacaagcaagcaactgcaacggaacaatcagcagccctgttcagcacaggtggtcatcagcgggtcaccgcagct

SEQ ID NO: 679973 - DNA, 112 bp, Homo sapiens
gttgccctggcggagagagacaggccctcggggtggaggtctttggtttcataagagcctgagagagatttttacgagatatgtgtaacacaccacgtactgtgacctagga

SEQ ID NO: 679974 - DNA, 370 bp, Homo sapiens
gcagtctggttaagggagaactagtggaaagggttaaatgacaggttaagttgcgtgcaaagctttcccagtgctgttgagattaagacaattgcggatgtgtatgactaggcttgaatctctgggctgcagattgcttttgccctggcagagaaagaggagtctttgcataggctagctgattcttgcagattacaggcatagaggcacatagaaactttgtattgcatgctgattcagttacaagtgctgctgacttaggccaggaattacgtgagagtacgttgctgccatcactggtttgaatgagactgtctcatcacggggcaagagttatgattgaagatctcattgtcccagcagctttggg

SEQ ID NO: 679975 - DNA, 570 bp, Homo sapiens
taatatcattatcgtcagctggccaagaacctgttctagcggcaaagacatcctcttcaataagatgtctggagggaaaactggatatctatgtgcacaagaatgaaactagccccccgactcttgccatatacaaaagtcacatcaaaatagattcaataattaaacctaaatcctctagctatgaaactactacaagaaaaaatcggggaaactctccaggacatgagtctgggcaaagatttcttaagtaataccccaaaagcccaaatagccaaagccaatcctgagcaaaaagaacaaagctggagggatcacactacttgagttcaaattatgctacaaagctgtggcaaccaaaacagcatagtactggcacaaaagcagacacatagagcaatgaaacataatagagaatccagaaataaatctactcatctacagtcatctcatttttgacagaggtaccaagaacatacagtgggggaaagaacagtctcttcaataaatggtgctgggaaaagtggattccatatgcagaagaatgaaccagacaccatctctcgcata

SEQ ID NO: 679976 - DNA, 133 bp, Homo sapiens
attcgcggccgcgtcgacctgttgatcagagctctcatgagtaccttacttgctcatgactgcgcatacctcattttagccttctgctccgacttcttagggtgacatctactattagcatctcatagtacgt

SEQ ID NO: 679977 - DNA, 332 bp, Homo sapiens
  misc_feature (19)..(19): n is a, c, g, or t
  misc_feature (40)..(40): n is a, c, g, or t
  misc_feature (69)..(69): n is a, c, g, or t
  misc_feature (73)..(73): n is a, c, g, or t
  misc_feature (145)..(145): n is a, c, g, or t
ggggagctttttttgtttntggggcctcccccaccatagntttgattcccaccccatataggaatagcntgantgagggggaaggggtgggagagaagatacagacatggaggaggggaggttgttttggtaaagtttttaaggnttttgggggttcaggcttggggtcaagaaggaaaatgtgtgtgagcatgtgtgtgagtgaggggtgtgtgtgagggtgtgtgtgagtaaggggtgtgtgtgtgtttttcttaggacccaccataccctgtgtatgtatgcatgtttttgtaaaaaggaagaaaatggaaaaaaatttgaacaataaa

SEQ ID NO: 679978 - DNA, 185 bp, Homo sapiens
ctcgttccgagatagcatccacgttggaaggaagaatataaatgaaaacctcatgagctcacgtgaggagaatgtgcttcttcaaataatgcttcgcagcgagacagctgtgcaattaagattgctatcgcttccagtaaagtggggcttttgaggggcatcctcgtagcagtctgacctgccag

SEQ ID NO: 679979 - DNA, 568 bp, Homo sapiens
  misc_feature (38)..(38): n is a, c, g, or t
  misc_feature (63)..(63): n is a, c, g, or t
  misc_feature (66)..(66): n is a, c, g, or t
  misc_feature (88)..(88): n is a, c, g, or t
  misc_feature (91)..(91): n is a, c, g, or t
  misc_feature (102)..(102): n is a, c, g, or t
  misc_feature (113)..(113): n is a, c, g, or t
  misc_feature (122)..(122): n is a, c, g, or t
  misc_feature (131)..(133): n is a, c, g, or t
  misc_feature (145)..(145): n is a, c, g, or t
  misc_feature (147)..(147): n is a, c, g, or t
  misc_feature (169)..(169): n is a, c, g, or t
  misc_feature (188)..(189): n is a, c, g, or t
  misc_feature (195)..(195): n is a, c, g, or t
  misc_feature (277)..(277): n is a, c, g, or t
  misc_feature (308)..(308): n is a, c, g, or t
  misc_feature (310)..(310): n is a, c, g, or t
  misc_feature (314)..(314): n is a, c, g, or t
  misc_feature (323)..(323): n is a, c, g, or t
  misc_feature (325)..(325): n is a, c, g, or t
  misc_feature (347)..(347): n is a, c, g, or t
  misc_feature (356)..(356): n is a, c, g, or t
  misc_feature (371)..(371): n is a, c, g, or t
  misc_feature (391)..(391): n is a, c, g, or t
  misc_feature (416)..(416): n is a, c, g, or t
  misc_feature (418)..(418): n is a, c, g, or t
  misc_feature (420)..(420): n is a, c, g, or t
  misc_feature (422)..(422): n is a, c, g, or t
  misc_feature (434)..(434): n is a, c, g, or t
  misc_feature (445)..(445): n is a, c, g, or t
  misc_feature (550)..(550): n is a, c, g, or t
aaacaggcacgaagaaacaaacgtgtgtatcctcttanttcctatatcacaaatatagcagangcngcaatctgtacagtaaaatgcngtnatggaaaaggnatctctctaangcatctganatacttaannntgtttaactttnanatgcatagtgatcaggaaaggnatacttgggggggggaggnngctganctcccacgttctcatgaggcatcccccatcgtttcttaaagcatatgttaagtaggacttatttgggtctcaaaccacaagnataatataccactggctaaggggctatgtgntnaatnatcaggggngnatctattcatgcactagtttgntacagctanattctttacagtacncaaaacccattaataatgtngtatagtgaccaaaatgttaagtgngntngnttacattactgntgtgtgggttnattccagttcaggcatctacttgtgttacagcacagctgtcaaaaggcgataatgagtaaatcataaaacgggtttgtttcttcccacattattctataaatggncaccggtgggtagtgaag

SEQ ID NO: 679980 - DNA, 159 bp, Homo sapiens
  misc_feature (137)..(137): n is a, c, g, or t
aggatccccctctctgcttgtctgcctctggagggtgactcatgagcagcagaggcactgccaacattaaatactgttgagtaagctgaacaaagactataccatttcacttatctggaaactagagttactacacnccttctcaactagtcacactaa

SEQ ID NO: 679981 - DNA, 134 bp, Homo sapiens
ctgtgctgatccttaaaccatctacacagtccattcacggcttgggaagatctggccccgtgctccggcaatccctctggagtcaccgattactctattcttatccttgggttttaccctcggggcctggttat

SEQ ID NO: 679982 - DNA, 367 bp, Homo sapiens
aattaatataattaatggttttaaccaacgagaaacccggattataaattggccaaaaaaagggtcatgttcctttgtttaaattttttttggtatggctgggcacgggtgctcacgcctgtaatcccagcactttgggaggctgagacgggcggatcacaaggtcaggagttcgagaccagcctggccaacatggtgaaaccccatctctacttaaaatacaaaaattagccaggtgtggtggtacatgcctgtaatcccagctactcaggaggctgaggcacgagaattgcatgaacccaggagccatgcattgagctgagatcacgccactgcactccagcctgggcaagagtgactcagtctc

SEQ ID NO: 679983 - DNA, 998 bp, Homo sapiens
atttaccatctcacttctaggactactagtatatcgctcacagctcatatcctccctactatgcctagaaggaataagttactatcgcgtgttcattatagctactactcataaccctcaacacccactccctcttagtcaatattgtgcctattgccatactagtctttgccgcctgcgaagcagcggtgggcctagccctattagtctcaatctccaacacatatggggctagaacattacgataaataacctaaacctactccaattgcaaaaactaatcgtcccaacaattatatataactaccatcctgacttgagctttccagaaaacacatcatttgaagtcaacacaaccacccactagactaatcataagcatcatcccccgtactatttataaaccaaaatcaacaaacaacctatttagctgttccccaatacttttccttcggaacccctaaaaaacccaccacactaaaagcgtcacgtggcaggggacgcagaagcccaggcagaacaatgaggcagacagacagaacggcaagtgattacgatacaacgcacagagacgaaagaaacacgtgcaagcgcacgaaaggaaggcgtacggaccaactagtcgtaaggacagagctgccagggacaggaacaaagaaattacatgatctcaaggcaaggaaaagagacgccgcacatgagtagacgggcccggggggcgagcaggaggagctgacacgagggacagcgtcgagaaagaggcaaggagggaccgcgcgcagagcgagagaagaacggcagagcacaagggcgagagcatgaaagcaagagcgcagagagagcaggaggcgagaagagtggggagacgggagggaagagagaagagcaagaaacaagcagaaccaggaaacagcgagcaaaagaggtcagaaaagcagcaagcgaaacggagagcgagagaaagacagcaaacacacagacaccaccactataggggg

SEQ ID NO: 679984 - DNA, 934 bp, Homo sapiens
taccccccgcatgcttaatcgtatcaatcaaaacgcccagcagaacagttatttggaaagaggcctcatgtagatgctgaacacatatcgtgactaccattgcgaagtagggacaccagaatgcacttgccgtctcattccttttccagccacgacttaatacggatacaccatggaagatgctgctctgtactaacctcaggatataccaggctgggacaagagaagaaaacgtcaggatgattacatgtccctttgcagatgggactgcaagcaagttggataggaggcttcacttaaactgcaaaggtcctcaggaccataatggcgtggatcaccctttagagaagaaaccattgaacaagttggaaaacataggcaagttcacaccctggggtgatggaaaacttcccggaaatcgtcacatgccttccaacctgtgttgcaaaactccccatcaggttggccgttgttcaagatgacgcacctccttttactggggattccctggaggcaccacatataacactaaattatcttggcgcataagatttaaccatgtatatatacgtttcgaaaggactaccttcctctgtcggggcagagaaaggtgacacagctcaagctgagatcgtgcctccaatgacttttatattggccttgcaaggggttatgcaatgggagaagaagcctaatgttacctggcaataaggaagggaaatgctgcatagtctcctaccataatgaagacagtgttgttcttccatggcaggatgtccaaattaaaaacccctggtgccagtgggtctgtattaaccgtaatttgggtggcacacacggagttaggcacgggacactcttgacaataaaatggaggatcatctaaaacattttaccactggcagtcatcgttacgaaaagcagaacacccggt

SEQ ID NO: 679985 - DNA, 515 bp, Homo sapiens
  misc_feature (49)..(49): n is a, c, g, or t
  misc_feature (101)..(101): n is a, c, g, or t
  misc_feature (108)..(108): n is a, c, g, or t
  misc_feature (160)..(161): n is a, c, g, or t
  misc_feature (196)..(196): n is a, c, g, or t
  misc_feature (249)..(249): n is a, c, g, or t
  misc_feature (256)..(256): n is a, c, g, or t
  misc_feature (386)..(386): n is a, c, g, or t
  misc_feature (442)..(442): n is a, c, g, or t
atgtttagtttttttttttacagttctaccacgagagatacagcaactnagaacttggccacaggtcttgcttagacacacattaatatgaaacaaaaaanatttatntaaataagttaattaaacttcacaaaaactaaagaaacacaagagaaaaatnnaacaaggaataaaaactgtacaatattggtcagtnttttatatttgaaaaatgtgtaacttaaaaaaaagttatttatggtataaaanaaaagtnttttatatttgtgttagctggagtgaaaacttgaagactcagactcagtggaaagagatgaatgtgcacgtcggtttggtttggagaggatcttgaggctggagcctctgctgagagaggtgagtgcgtnctgggcagaggttttaaatttggctccaaggaaagcatagaggatggggttcaganaacagtggaagaaagctagggcctcggtgatggaaatccacttgtgcacagtgttctcaaactcacacccttg

SEQ ID NO: 679986 - DNA, 251 bp, Homo sapiens
taggaattacagaaacctggttgataaagcagagccagggtgtgagagagttgacttcaattttgaaataagttccactggctgggtgtggtggctctcacctgcaatcccagtactttaggaggccgaggcaggcggatcaagaggtcaggcgttcaagaccagcccggccaacatagtgaaaccccgtctccaccaaaataaaaataaaaataattagctgggcatggtggcaggcacctgtaatccca

SEQ ID NO: 679987 - DNA, 80 bp, Homo sapiens
ggaacttggaagtgctgctcttcaccattcacagcaagatgagggccaacaaccagaaggtctacatgccccgggacgca

SEQ ID NO: 679988 - DNA, 282 bp, Homo sapiens
tagaggatccccctgaggttatccccaacacacctttcaaagcacttctcagaaaaaaaatttatgggttttggagcggcagaggcgggaatccttttaaaaacactggcaggaggccaagaatttttttttaacacctgtaaacatttttaagataggaggttagttaacagtaattaaactatcccagggatttaacagaagtgattctactggggaggattcaaggcaatttcccattatctgtgtgggccgataggggacccgggctcgaattcgaaa

SEQ ID NO: 679989 - DNA, 356 bp, Homo sapiens
ccataatgccatgtggcactctaggtccaaggtctccagagggtgacaagctggatgatctgtcactgtcctactgagacagcacagccaacctagctagcaacatttgttttacgtctgaacaaatttatacttatagcaattcagtcaacagatacacaagtctgaaacagcttcataggggtgtgactctaaccagtagtcgcaatgtaatagacatgagactatacttctctgctatctagatctgaactccttggcttcatttacttagtacaagccccagcctaggaaaagccagttacataaaagttggctcaggagtcttagagctttacctaaatatgagacccgca

SEQ ID NO: 679990 - DNA, 403 bp, Homo sapiens
atttttgctataacatttctgagccaaaggcagagggtatccattaacttcattgttgccttaattgaggggtgggtggcaatgccaagggtgggaacacaaggaagaaagaaatattaacgtcagctaagaaatcacatgttctcaggctatcatgcagtcggtcgcttatgtgtagctgtacatagggaatgctatggtgtcagatgttatattggtggtgaactatggagtctcccaattcttagcaatggtttaggcaaaaggtgtaggaaaagttgtatgctttgcgttttatatataatgggtatatgtcgcttatatggagattatagacgaaggttaatatggacttagctatatgggtggctatggtcaggcgttctgtacagggtcttcccta

SEQ ID NO: 679991 - DNA, 134 bp, Homo sapiens
ttggtcgatctctagcaggatcccccttctcccaaaggcaacattctgtggtgcagctccaccgtctccagtggctatagcggtgccgagtgcgtgtcggcagtggcttcgcgcctggtgtggagtgaacgcat

SEQ ID NO: 679992 - DNA, 1439 bp, Homo sapiens
  misc_feature (783)..(783): n is a, c, g, or t
  misc_feature (806)..(806): n is a, c, g, or t
  misc_feature (1168)..(1168): n is a, c, g, or t
ggtttgccgacagacatacaagtgtcgtgaaaattacccctaaaacccaaaatgggaaaggagagtgactcatatcgaacatgtgtcgtcattgagacatgtcaggattctgtggcaagctgcgatcgactactgggcccatcatggatctgagtaaaactgtcggctgtagcatgcgacgaccacagacaccatggtgaaataacttctgagaacggaggctgcttgatcatgggatcagggacttgctcttcagagatgactgccatggagtcttgcgactaccatctgatagaagcattgcaggcgagtgaaacagtagtgtatgcaccaagttatgccttatctttcctcttggtgtgtaacacttgatgcatgacaaccagacgtaacacgtctacttactcgtttgaattagtccatcttgtatcggcacccccatcgtagcgaccagggaggaatccttttaattccaaaaagagaaccatttgcactttcagcctccgggggaaccaaatccttcgatggggcgaatggagccgtgatggctttgtgccccatcgaacgtctggaactaggcgtcgacaggggtgcatgcgtataggggctcggaagacatgtggtcgcactcagaccacttggtgggataaatcgctgccacgcgagacgggtaaaactctcgtgttgtccgaaggtacccccgtagggaaagagataaggccgaagattgacatcccgtattgcaaatcgcgcacgtctttgatcatgacactacgcaatggngaaagtggtggagtttccgacgngagcaagacagccataaagtatatggtgctacagcgtgaggtgtgctaccatggagaccgggaacaccacgctgggggagacctctttctcaagtcaattggcaacgggacttcggaagggcagctatacagcagacggaacacccgatcgctagcaagtcacaggcacattgagttaggcccacggtgagacaccaaaaggtctcggcggtctctcagcagagagtggaaaacctcatacccatagcgcatgagactcgatgttataggccggcgtgttacgccctagtggtcagccacgagcaagctgctgagcagcggtttccggaagccaaaaacgtgcgcgcgcggggtatacgaanagcgcatatgtgcggtactgtgtctaactcctggcttaggttccgggccggcaggaactctcgtgctcctcttgggcgttacccagcgataagaagtaccgcggagtttggcagacccacaaccgcgcaatttcgccgtgtggggtgaatctgcgccccccacatgtgttctgttctggtgagcccgcgagttagaggtctctgacgggcgacttgtgtgcgacccattgcgcctgtccatccgggtgtaacccgtatgggttccccgcca

SEQ ID NO: 679993 - DNA, 264 bp, Homo sapiens
agctgccctcatccacagtagcaactcattttctccatttggatgtctggccccttaactctgagacacaataaccctgcttacctgaccagtcatctgaactgttccgttctgacagcagtttatgtgtataatttcctcccttatgtattctgcaaatcgtacagtagaaatagcaaatgaaagacattgcaacggcctagctctctcccaccccttctttccctggcctggtgtcttttgagctcagtgagtctctagaaa

SEQ ID NO: 679994 - DNA, 342 bp, Homo sapiens
cttgcaatccacgcatgcggttcatgaagagggcccgagagaacctagaagaatgagagggatatggaggagcatcagagaatagggcatggtgcgccctgcgtctagacagacccgggttgtgtcgatcctcccagttcttctggcgccttggggcttcacttcctcatctgttacattgatgcgaggtgatgtgtgagagagcatgcacagggcagggtccgcatcaccaccaccatcaccatcaccatcaccaccatcaccatctatcgtcatccatccatagttatcaccatcatctaccacttccactagccacccccttgcgtgaatcgccagggt

SEQ ID NO: 679995 - DNA, 368 bp, Homo sapiens
cgcgtcgacgatataaaggactgtatctaatgtaggtgacgacgattgagtatttgacatatgagtgcgaaccctcctaataagacacctggaaagataaatacccagggcgcagaatagaaataacttttaccgtcatgtaaaatggcgcctaattcaggaatagggggttttactcctaaaccaataaaggcgagaccggaaatacttaacattaacttaccaaaatctgcagtaacaagtgccataatgtcactgatgagatgtggcacaatgtgatgtattgtaacttggaacttcgacatcccactaagtggcgcaaatttaacgaacggttgtgtcatcgtgtcacgtgctaaagtcgacgc

SEQ ID NO: 679996 - DNA, 238 bp, Homo sapiens
tagggcatagctgtatccagaggatccccttcagcacatttagggtaataccagattcatagaggttatgtagaagatgccacatagaagacaagccatcacagactacccatatggtataggtggtgcatggcatggggcagaaaatggaccaaggaagaataatcacaaatacatctatgatgagagaagctgcaagaaaaatagaagaaaggcattttacacaaccatgcaacac

SEQ ID NO: 679997 - DNA, 233 bp, Homo sapiens
ctcaactcatgctacccattctaatttgagcaaagctaaatcatgggtcttagtctgtttagcaatatctcctcaagatgaattttagttgactaccccaaattgtacaatgtgttgtgtccaagtttagacacatcaaaatgttttataatcctagcacattagattcaactgaactttttcataaaaccaagtcatgtttgggcttataagtttgcattatgttgtagagt

SEQ ID NO: 679998 - DNA, 436 bp, Homo sapiens
acgatcctggtcctccagctgctccaggacacgaaagtgggaattccagcactaagccaggcaccgggcataagctgggccttccggctcccttggatggggtcaagactgcaggcctggcacacttaggagtgtgctggctaacagctctcacctagacccacgacacgcgcccacacactatgagtctctcaagaatgtaatttattgggggcgcccccagactgtgtttcctcacctgtgcctgtcctaccttatagccccagccttggacttctttccaaatagcaaaagtgtggtataataattgataatctttatttatagcgcaagaaatgggtatagaacatgcagagaagctggaatttcttaacaaagctaagtgttaacaaagctgagggaagaggtaaatctgaatggaagaaagaagaatgtc

SEQ ID NO: 679999 - DNA, 127 bp, Homo sapiens
  misc_feature (107)..(107): n is a, c, g, or t
cagatagcatgtgagtgaatttatgaatggaatgaatgacatgtgagaaaactcttgctagacatgacggttcctatacagaagaaaagatataaacttgattgctncagtaaaaacacttttagag

SEQ ID NO: 680000 - DNA, 674 bp, Homo sapiens
  misc_feature (16)..(16): n is a, c, g, or t
  misc_feature (23)..(23): n is a, c, g, or t
ccaggctggtccgcancgggtantgggattgccttctgcccttaggctccggtagattgcacctgaccttgtttctttctgttcccgggcggcatcggacccgtcggagagtaaatcccaagtaaggtacctgccgttggcagatttgagctttcttcttggacacctaatacccacagtcctccaggctccggtagattgcaaatgacctgctttctttctgttcccgggtggcatctgacccgtcggagagtaaatcccaagtaaggtacctgccgttggcagatttgagctttcttcttggacacctaatacccacagtcctccagtaaatcccaagcaaggtacctgccgtcagcagatttgagctttcttcttggacacctaatacccacagtcctccaggctccggtagattgcaaatgacctgctttctttctgttcccgggctgcgttcggacccctgtgggatagtaactcccaagtaaggtacctgccgtcggcagataggagctttcttcttggagacctaatacccacagtcctccaggctccggtagattgcaaatgacctgctttctttctgttcccgggctgcgttcggacccctgtcggagagtaaatccgaaaaaaacagaaaagacatggatttactgtgcatattagcagatcca

SEQ ID NO: 680001 - DNA, 151 bp, Homo sapiens
tgtgtggtgatctagagatcccttcacacaggaggggacgccccatacctcaccaagggccctagatgcagctgctgtcgctgtgcctccctcagtatggtcttcaaaccaggcctggccatgctgtagcagctccagtaccctgccacag

SEQ ID NO: 680002 - DNA, 429 bp, Homo sapiens
  misc_feature (409)..(409): n is a, c, g, or t
  misc_feature (420)..(420): n is a, c, g, or t
gagggcatcccgttggacagcgagcgcgtcttcctgcagaacaaccgcatcggcctcctccagcccggccacttcagccccgccatggtcaccctgtggatctactcgaacaacatcacctacatccaccccagcaccttcgagggcttcgtgcacctggaggagctggacctcggcgacaaccggcagctgcggacgctgggcacccgagaccttccagggcctgggtgaagcttcacgccctctacctcttacaagtgtggggctcagcgccttgccggccggcgtttttgggcggccttgcacagccttgcagttacctcttaccttgcagggacaaccacattcggagttacctccagggacggacattttttcgtgggaactggggtcaaactttaaggccacntgttttttttncacggggca

SEQ ID NO: 680003 - DNA, 484 bp, Homo sapiens
tccataaggtgtgccagtactattttttcaatttttttattttttttggagactaagtttcactctggtggccaggctggagtgcagcggcgcaatctcggctcaccgcaacctccacctcctaggctcaagcaactccctggcctcagccccccaagcagccgggatcacaggcatccgccaccacgcccggccaatcttctgtattttcagtagagatggggcctcgccatgtgggccaggctggtcttgaactcctgacctcaggtgatccacccgcctcggtctcccaaagtgctgggattacaggcataagccatcacgctcggccgcccatcctttaatctatgatggcagtgaccctgttttggcttctgctagagaacatggtaacgctgtagaggagggggtggcggagacaaacagagacactgggctcagttcagcctcttctaagacaagcagttgggcacacattatggag

SEQ ID NO: 680004 - DNA, 1859 bp, Homo sapiens
  misc_feature (618)..(618): n is a, c, g, or t
  misc_feature (1310)..(1310): n is a, c, g, or t
  misc_feature (1322)..(1322): n is a, c, g, or t
  misc_feature (1423)..(1423): n is a, c, g, or t
gctgttgttcagggattcccagtcgtaatttagacggcgaacacgtttcagccgacattgtccggagagccctctgcatgctccctgcataagtgaacggaggcaggcatgtccagttaagcttccttatgcagtcatggaatcgccacattaggctggcacacaagtcttctgacatatccagaatgggaacacatgcatacatctcgtacataaaaacgcgcacagaacggtgcaatgcggcactcctcactacttcgagtaacaagctcatccaccgcagcgcaccccctgcgcgcaaggcacagccatccccatgtcctgcggcaggcccctccgattcgcccaaacgactctctgaataattgtcaccgacgatgctgtgaacaacagacaactgcacccattgtaccactctggcatccattcgccttcccacgtgggctgtggcttctctaattaaattaccaccatttcaccaacagcggcaaaaacgttagccatttggtgcccccacaacggcaacggtggtgcccactgtgactcggtccttggaaaacggcttgtcttggcctttgaccatttggcagcaaagcagctttgaggcaacgagccccntagacgttccacacacacactattcgaccatacgaggcgccctggccacatttgaccaataccgcatacaccgcttagggccaacaacccccatttattccatatcggttaagcatcgcgaacaattcagaatcatccccctatagcgggaccataggcccctattttgtctccacccgtgatgtgagcaacatgcgtccacgcaacgacgtgaggatgcggcgcttcatattaccgcatctctagggctattcaggcgagtatgcctaaagcccgattttgacaactatgccgtccgcgcgaatctggcgtgacacccattttgagaatcaccccgagcgactccaaatgtgagccaccttatatccgagttccgaataccatcggcgcaccgcgcggcgccacaatattcacctattcataaacacatcgagcatctgctaaacaacaccggccccttttaatagcatcccaatttaatcaccacgcaaaagagtacaggtggcgcatggcccctcttcgtggcagagggcttaagaaccgcacaatactccaagcagccgaaatcattattcccccttgtccccccactttctccacatttgagacgcatcagcgccccatacaagactattgtggtttgtacggatcgcgacacgcgcaacacacttacgcgcggcagacacgaaaanatgtctgctccnctccgatgaactatgtgcgcgctcactcaacactcgcacacctacgcagccatacctacacgtggcgatcggaacacagaggccccgtgcctgacacagcnactattccctaaaaacagtcgcatagtggacgcagcagaccatcacatacaaacaacactttagggacgtcaggccaccgcactggggcagagccgacacctatggcccgctcgatgagcgaccacactctcaacacaactgaaggacgcagcaaacggtgcatcttacaccaactgatcgtccacgcgaccccaaaactttggcacaccgaccatagtgaggcacaacagcaccgacccaaaccacatggataataacacccacagccgctggctgtgtcgcaacacacgccaacaccaccgcccccacaccatggacgccggcacaacaagcagcgggactacccaacgcatgaccgccgcccacgtagcacaacataccaccacgaggatacaaaacccaatttcatacccattaacaaccacatgagacaac

SEQ ID NO: 680005 - DNA, 405 bp, Homo sapiens
ctctgaccagacgtcattcttgcatggatgaatggacagatggacatggatggatgaatggatggatggatggatgaatggatggatagatggatggatggagggatggttgaatggatggatggatggatgaatggatggatggatggacaggtggatgtatggattgatgcatggatggatggatggacaggtagatgcatgatggaagggtggtggacagatggatgcatgatggatggctggacaggtgcatgcatgatggatgaatggacaggtggacgcatggctggatggctggatggatggacagctggatgtatggattgatacatggatggaaggatggatggctggatggatggctggatggatggatggacaggtggacgcatggatggatgg

SEQ ID NO: 680006 - DNA, 888 bp, Homo sapiens
tcatagcgtctgccgagaaagaatttactgctatgggtgttcgctacaacaggatatgtgacgtcagacagccccagaaaccccttccagatctgagtatgggactattaatcttcatgctgtgtacttggtattcattcaggcaattgcagttgaatggggaaggctccactgcattctttggctaaggccctgagactgcttgtctcattctgtaatatctatactcgaggtgtgttttccttttaaaatttctttatggagagagggactggttctgccggggtgctgaaagtatgattcaatgtgcaacatacaggtaggtcttcatcataacgtctgagaaatatatgcttgtaaaaactctgacatcttctgtttaattatccacttgcttcttaactttacttctctttgtgtcccgcctcactcctagtcttactagcaagttgaggccaattggatgaagtggtaggcaccggaagacacatggaagattgctctgtgctttcaaagccaaggtgtacccccacaagcccaaattgagtctaatgcactggccatgctgttgtggacattgttttctacaaacacaatgctgggtgtttcttcttcttttgaacatagagggtacccacccacaaggggaatgccctacttctctcgcagctcttttgaaagcatttctgtttgaggggaaacggtctcttggggcacgcaagtggtaattgggatagcttggctccccttttttccagctgggaccttgtaatccttacacataccgtaattccaacctcaaaacttattattgcctagcccagtgaatcagcaaagtacctttctgcccccggtggcacttatcaggcgcggggtcgcacctgcaaa

SEQ ID NO: 680007 - DNA, 228 bp, Homo sapiens
tttatcatcaagtgattttcaaagagggtaccaggactattcagtggggaaaggagtagtctccattcaacgaatggtgctgggaaaaggatatctgcatgcaaaagaatgaggctgggcacctagggcacaccaggcacaagaagaggctgggcacctatttcacaccatgcacaaaagttaagtccaggtggttcaacaggcgtgttagtgcggaagaaaaaaaaa

SEQ ID NO: 680008 - DNA, 250 bp, Homo sapiens
acgaggtacggatcgtgcacccattgtctgagaggatgtgccagcttcacgctgaggtgacatgactcgtggaacggtgggaataagctggtctcagtgggactccccggcggtctaggagcagctgggcggatagcaccgggcatattttggaatggatgaggtctggcaccctgagcagtccagcgaggacttggtcttagttgagcaatttggctaggaggatagtatgcagcacgatcctaactct

SEQ ID NO: 680009 - DNA, 426 bp, Homo sapiens
acggctatatgaatgacgggtcgagggttacacgatctacctatctagcgcgactctattaatgtagtcgtggctaaaggcatccaattgtgtgactatgattcacccgccgaatcccgcgcaactaagttaaacaactcaaagtctaactgtgctcagggctgtttactctacgcgacttctcccgccgcgggccaacgcgtagcaaagaaatttaatttctgacggtaaccccaggaccgctcctgaacattgacggtagcatggcgccggccgtggcgtggcgtccgtgcgtggtcccgtcaattcaagcggacccgtcaatccaagttgccgttaacagctgttatacctactcttcaggcggccgcacgttgcctagcaacatgtgggcccttaacgtcccatatgagtgacgataatctt

SEQ ID NO: 680010 - DNA, 2061 bp, Homo sapiens
  misc_feature (10)..(10): n is a, c, g, or t
ccccgctccnccatctatttctgagatccaaacggggaaattgaaagcccactgaaacctatgccagcatttccagttttccatttaaacaccttagttccagaaacccttaaaggatttggaatatttcaaattgcacacgtcactccagcatctctgtaaaataattggaatgaaaatacttcttgcacttaaacactgcacatgccgtactttgaggttagtctgaatcttgaactttaataccaaattaattttgaatgcttttgtttcctaagagataatggcatggtttcatatgttatactttggacagacagagttttaaaaatggaattattttttctttcatgcctcttgtaatgttctgaacaaacttgaatgatgaaagtattaaagagatatcagtatttgaggtttgtattttcttctgtctctggggaggatttctcagtggtggtgggagcccagtcttggagtgaaagtgacacctgctgtccataattcagcaagctcaagtcttctccatgggactggggtcgggcagcctctttattctgcagttgctcttgtggggctgtgcctgtggaggaagaaaatgggaagaaagagaaaaaggtacacaaaggaaagaaaactatcatctatctgtggtggaggaacagtccagtgacccaagtgccctccagcaggcgaggttttgaatctgttctctggtgcctggtattccttcagtgtgtaaaggtgcttagtgcgtgctttgctttcttggcttttctgtccccatctgtctgaaagcagacttgccatctctcattctgttgattgttctgtgcagtactctcctttttggaaaaactccagggtatgcttgggaaggaaaaaaatttttttccttaccaaccaacgctgtgttgttgagtaaacactgatctctacccacacagacaacaggaatccagctttctgcagccccacagcctagacagcagcaacctggggagttgtttgttagcaaccattgcacagaaggacgcagcacacgttcctgagtgcaggggtgttactcttagaaaagcgtcttgtagtcgaaagagaggaacttccccactggttaataagtaaagcctgttgaaatttacatgtcaattacctttcatagtcatggtccgaaaacagctagaacagctgtaaatctggtacattttccttccctcctcatctacacgcacccacatcttcacacacactcatgcccctctttcacacgcagtttgctgcacacagtgggatttagcagatagaatgcattctcttgtcctgtgtagtccaataagacatttactgaacacctggtactatctatgctaaatgctctgaatagctctctaggtgcaaagagaagagtaaggcatggtcccagatcagtggaacttaggttttaagaatgttcacttactatacattctgtgacgaagcctaaaataaacttagcctaccatctctataggttttataaaatttgcaaaagtaatcctttctcagtaaattcaagtaatggaaatgtatatgaaaaaagtaaacttctttgttcttcaccagtcccactgcgtggagctaactgccataaacagtttgctttatatggtcccaggtttttccattcctggatgatgatgtagctatataaatagatttagaagaacaaagacaggatggtactgacataggattttgtaacgtgcttctccaaacgaacaaaatggatctctttgcatttcagcacttacagatttgcctcattctatttagaggcagaatattgcattggatgcatgtcatcatggactcggtacttctatttatggacaggaggtttttttttcccagtttgctgctattacaaacaatgccacaatgaatgatctgaaacataaaactttgcgttgtgtggtagcattttggggaatagattcctggaagtgcaatttcaagatccaatagtgggaatatttttaaaatttgaataaatatagccacatttccttttgtaaaaaaaaa

SEQ ID NO: 680011 - DNA, 410 bp, Homo sapiens
  misc_feature (10)..(10): n is a, c, g, or t
ccccgctccnccatctatttctgagatccaaacggggaaattgaaagcccactgaaacctatgccagcatttccagttttccatttaaacaccttagttccagaaacccttaaaggatttggaatatttcaaattgcacacgtcactccagcatctctgtaaaataattggaatgaaaatacttcttgcacttaaacactgcacatgccgtactttgaggttagtctgaatcttgaactttaataccaaattaattttgaatgcttttgtttcctaagagataatggcatggtttcatatgttatactttggacagacagagttttaaaaatggaattattttttctttcatgcctcttgtaatgttctgaacaaacttgaatgatgaaagtattaaagagatatcagta

SEQ ID NO: 680012 - DNA, 1107 bp, Homo sapiens
  misc_feature (434)..(434): n is a, c, g, or t
  misc_feature (674)..(674): n is a, c, g, or t
  misc_feature (684)..(684): n is a, c, g, or t
  misc_feature (731)..(731): n is a, c, g, or t
  misc_feature (1107)..(1107): n is a, c, g, or t
gccagcagaacacaaaaggcgactgttacaggaggcagaaagaaatgatttaggtagacggggtaaagccagtccccagcagaaaatttgccttttaacaaaaagcagctcaaaaatagctccctttctaacctcggggttcaaaatcacttctcacgacaagcagccagaaagagcagactgtgaatcacagatgagacagctcgggcacaggagtgcggggggtgtctcctgggtgatcaccaaacttcacacttccacaatgggccccagtaaaacagtggaccctaataagcacattcccgtccccttaggtgcactaagggaagctaaaagcagactgaggggtgcctgtaaccccaagaagatgtctgggagcagacccagagaccctcgcagaaaagtgtcacagagcagcacagactgagtctganagaaactctctatacaaatagcacaccttgtcccagctaaaaccctgggccctgggaggacaagacatccctcctctaacccctcgtcactagcccatttgtaaaaaccttgacaggccgggcacggtggctcacacctgtaatcccagcactttagggaggctgaggcaggcgcatcacctgaggtcaggagatcgagaccatcctggccaacatggtgaaaccccatctctactaaanatacaaaacntagctgagcgtggtggcgtgtgcctggagtcccaatactcaagaggntgaggcaggagaatcacttgcccgggaggtggaggttgcagtgggccaagatcagcccactgcactgagctgggacagagaaaatgaaacttgacactttactacagattgaaaccggttaggcccgtttgaaggaaaggctttcttcatataggaattaacattaggacagaagaaagaagtagacgaagacaaacaagaaataagagagagaaataaagaaaaaaaaaagaagagaaataaaagaaaacaataaataaaaaaaaggagatgacatgagaaagaaaagaaagagtccgaatacaggagaaaagagtatgaaatgaggtccattattttgtagatataggagggcagaactgaaagaagagcgagn

SEQ ID NO: 680013 - DNA, 625 bp, Homo sapiens
  misc_feature (10)..(10): n is a, c, g, or t
ccccgctccnccatctatttctgagatccaaacggggaaattgaaagcccactgaaacctatgccagcatttccagttttccatttaaacaccttagttccagaaacccttaaaggatttggaatatttcaaattgcacacgtcactccagcatctctgtaaaataattggaatgaaaatacttcttgcacttaaacactgcacatgccgtactttgaggttagtctgaatcttgaactttaataccaaattaattttgaatgcttttgtttcctaagagataatggcatggtttcatatgttatactttggacagacagagttttaaaaatggaattattttttctttcatgcctcttgtaatgttctgaacaaacttgaatgatgaaagtattaaagagatatcagtatttgaggtttgtattttcttctgtctctggggaggatttctcagtggtggtgggagcccagtcttggagtgaaagtgacacctgctgtccataattcagcaagctcaagtcttctccatgggactggggtcgggcagcctctttttctgcagtgtactgggggctggctagaaaaataataaatttaaaaacatctgagaaaatatcacattaac

SEQ ID NO: 680014 - DNA, 623 bp, Homo sapiens
  misc_feature (51)..(51): n is a, c, g, or t
  misc_feature (281)..(281): n is a, c, g, or t
  misc_feature (457)..(457): n is a, c, g, or t
  misc_feature (470)..(470): n is a, c, g, or t
  misc_feature (490)..(490): n is a, c, g, or t
  misc_feature (497)..(497): n is a, c, g, or t
  misc_feature (608)..(609): n is a, c, g, or t
cttgtgggcaaggggcggggcctcaggggactgcccaaaagaagaggattncagttcaggaacccgtggaggggggatggggttgaagccctctctgccaagccgttccttcgctggtcaggcaggaagtagcatgctccgagttgggttatgggggtggaccgggatacccctcttttgagcatctatgcggcaccggaggtttcccctacatccgtcccagcacctcttatggaagtcccagcacaggatcctggaatgcacacggacgctggggctgnccctgtgtgtgtgaggagtgtggggcagtgcccttggacaggagcctgtgagagccacctacacgagatcagagcccccagccagggcaggccataggagacctcccgcagcacttccccggcggggcaacgtgggaggcaggagctgacccttgcttgcagagatatatgacatnctatcgtactccncctgatgaagcctgtaactnaagcatntaatcccccacaggattctatgcagtgattccaggagttgacattgtatgatgtgtaacaaaagaatctatttgctatcgacaaacacgtatgtagagagagacatgccgnncccgaaaaaaaaaa

SEQ ID NO: 680015 - DNA, 553 bp, Homo sapiens
ggtatttagatcggtacttaagcgcggaccggtgtgtccttggtacttgagaggagtggggacgtcctggctgtcgtgaggcagggagtgtgcgtcgtgcgcagtgaggtaaccatagtagatagttagatcatgggtagatagttgagagaaaggctaagagagatttctctagttgatgaatgtgtgctccagttggctatagactgttgaaactggcgaggtcaagctaccaagactaggagccaaatcgtccaagtggtctacgtttcgggctggattgacttggtcaaggccctcatggaatattgctatacaactagcctgcactagtaatgcaacagataggcagtcaatcatgggcggatgaggataacatgtagactggatgtatgtaggaggagatcccattagaagtatcggtcctgctggaggcaatacaatgactacgtgtggtcgcgcattgaaggaagcaaggaatgaacaggagtagagcttaagtatgcgttatctctgtaatagaggtacttacatgacgtaactacattgtgac

SEQ ID NO: 680016 - DNA, 478 bp, Homo sapiens
  misc_feature (7)..(7): n is a, c, g, or t
  misc_feature (35)..(37): n is a, c, g, or t
  misc_feature (40)..(40): n is a, c, g, or t
  misc_feature (56)..(56): n is a, c, g, or t
  misc_feature (399)..(399): n is a, c, g, or t
  misc_feature (442)..(442): n is a, c, g, or t
aagaacnaggttgttctttgcttgtagtgaggggnnnggnctttctccaactggcnagtgctcagcaaactgaccatgagttctgaatcctcaagtataggcatccaggtcaattagagaaaagaggggactaaggaggaagcagaatatggcttctttctctgctgtcagaatcatgaatatttctctactttataatgacatattattattggttcagaatatttctttctttctacccttatcttttctaagcactacaactccctaaatcatatttctctttgagaattgtgggagaactcagaatgagagtgacattttcttttggtcttattgggccaaagatgaaacctttacctcggagttgatttgtcctatgccacttccagaggatgnccattggtaactggtaaaaatccaagtattttttaatttaatnaatcctccaaaaggccctcccttccttgggtggttc

SEQ ID NO: 680017 - DNA, 448 bp, Homo sapiens
atacgcggcctgggctctggtgtctcccagtacttgaccttaataaacaggccccgtacatgggcccaattccaatccaagtgggaacttcccaagctagtcggccccccccggggggggcaaaggaaccggggagcgggggcgtggccatccctcgctcccgaggaggcaaaccgttgaaaccgcagggagcgccctcacggcagactgagccctgggagaccatcgaccatcaaacacaggaaccccccggtttaacctttagtccccaacttgggaaacacgggaagaagccccaaatccccatggggggggttccttaccccctttaattggcacacatggggccataagaagcgttcctggcgccccgtgggaaaccaaccccttgttccaagcaaaagccacagtggaagggggtgcacgtcctaaccctgggggccaacta

SEQ ID NO: 680018 - DNA, 133 bp, Homo sapiens
gcgtacaactcgaagagtgtgaactgttatcccatagacacgaccgagcggtatgtatgtctggatacataaaatgcacgcaaggccattatctctccatgggcaagctaagttataacaataggtgcttggt

SEQ ID NO: 680019 - DNA, 897 bp, Homo sapiens
  misc_feature (557)..(557): n is a, c, g, or t
acatagaaattaaacaatatggtcccaaataaccagtggtcaatgaagaaattaaggaaatcaaaaaaatttttgaacacatgataataaaaacacaacataccaaaacctgtaggatacagaaaaagaaaaactaagagagaagttttgctataagcacttacatcaaaaaagaggaaaaatttcaaataaacaatctaatagtgcatcttaaagaattagaaaagcaagagtaaaccaaatccaaaattagtagaagaaaagaaataataaagattagaacagaaataaatgaatttaacatgacaaaaatcacaaaagatcaataaaacaaaaagttgattttttgaaaataaacaaaattgacaaacctttggccagaataactaagaaaaaaaagaaagaagatacaaaaaaatacaatcagaactgaaaagggagacactacaactgatactgcagaaattcaaaggatcattaatggctactatgagcaaatatattccgataaactggaaattctagaagaaatggacaaattcctagaaacatacaanctaccaagattgaaccatgaagaaatccgaaagccaaatagaccaataacaagtaatgggatcaaaaacatactaaaaagtcttccaggaaagaaaagcccaggacccaatggttcacttctgaattctactaaattttgaagaagagtaataccatttattcaaactattctggaaaattagaggagggaatacttccaaactcattctatggagggccagtattacctggtgaccaaaaccggacaagaccatttagaaagtaacctcaggcatatctctgatgcacattgggcaaaatcctacgaaaaataggaaccaattcacaaggcttacagaa

SEQ ID NO: 680020 - DNA, 131 bp, Homo sapiens
  misc_feature (40)..(40): n is a, c, g, or t
ggcgatctagaggtcccagttctggtccccactcacccanacaatcccagcttttttatacaaaaattctcggttctcttcactcaaggatttttaaagaaaaataaaagaatgtctttctgtctctctat

SEQ ID NO: 680021 - DNA, 707 bp, Homo sapiens
tgtgatggtactcgggtgtagcttccatctcttgggagcagcctgagcgtgggaggatcgcttgagcccaggagttcaagaccagcctgggcaacatggcgaaaccttgtctctactaaaaatacaaaaattagccaggcatggtggctcatgcctgtaatcccagctactaggggggctgaggcaggaagatcgcttgaacctgggaggcggaggttgtagtgagctgagatcgtaccactgcactccagcctgggcaacagagcgagactccctctcagagaataataaaattcggccggtgtgttggccgacaccaagtatgtcccagatacacaacgaggtctgaggagggaggatcatctgagccaggaggatggagattcggtctgaggcgtagattctgagcgattccatttggactggaggggtagggaaaatgaggcggggactttgctggggctgctttcccatgaaggtcaggcatgttgtagcctctagaatgtcaagggttaagggaacagattggatcatgttgattgaaagagacccggacttaggagtggtccggattagccccgtgtctggagaaccgagaagcattcttgaattgggcttaccattatattaaatatcgattctggcaaacatataggggattagggaaaatggtggaatcaaaaagcctgttgggagagcatattccc

SEQ ID NO: 680022 - DNA, 314 bp, Homo sapiens
agttgcgtgggacacatcttttttgaggccaccattcaacccactacaaaatccaactgaagcccagcgaagtggctcatgcctgaaatccccgcactgtgcgaggccaaggcaggagggtcacctgaggccaggagttcgagagtagcctgggcagcgtagggagatcctcatctcttttttttttcgagatggagtttcgttcttgttactcaggctggagtgcaatggcgcaatcttggctcactataacttcctcctcctgggttcaagcgattctcctgcctcagcaatcccgagtagctgggattaca

SEQ ID NO: 680023 - DNA, 100 bp, Homo sapiens
tctagaggatccggcacgaggctgggcgaggggcggtatggctggggcgtacacgactgtagctgtgctcgagcgctggggaactccgaaagagtgagcg

SEQ ID NO: 680024 - DNA, 224 bp, Homo sapiens
  misc_feature (215)..(215): n is a, c, g, or t
ttgaatgggcacagaaattgataggaaatgctaacagttttaaaaagacagttgatgcctctcttggtaatatcgggagctctggattaaagcttcccatgccaccctattgtcttcctctatcttatctcctagtcttatgctatattagcagagcttatatggcatttactcgtcttcggaaaaggcttacttgtacattgctattactattncaacattac

SEQ ID NO: 680025 - DNA, 1629 bp, Homo sapiens
  misc_feature (217)..(217): n is a, c, g, or t
  misc_feature (340)..(340): n is a, c, g, or t
  misc_feature (349)..(349): n is a, c, g, or t
  misc_feature (354)..(354): n is a, c, g, or t
  misc_feature (374)..(374): n is a, c, g, or t
  misc_feature (465)..(465): n is a, c, g, or t
atggtgacccttggaccttgttggatccgatgatgttgaccgctgctctagatgaggtcgctaaatgagagcggtgtagctggtgttccttctcaccttcactatgaatcatcccattattttgaatttcacattgttgttgtgacgcccataggtcgcttctcgattctgcgtagctagtctcggccacaagcctcacacaaggctcgcttcacantggtcagagacatatcgattccgcacatggtgattttcccaaacacacttagggatgtgagtacttttgtgcacatattccatgtagagacatgggcatatcattcgataatctcaattctantccgtatgnattcnatcttcgttgtcacatggcnacatgtgtgctagctctaactgcttggtgcgagtatgtgtgcacgtgtgcagatctcgtaggtggtcgttcaagatagcgtgcgcatggangagcgacaggtttaggcgtgaggcttcacgttgtaagtatccgaaggttaattgtcccttgtaagtctgattgtcccttccattttgtaagggcgtggcaccttgtcgcgtgcagtgagacacctcgagaacttctatctttcctttgtgacatatggcgcacagagagctcccccgatctttaacctatgagaacagatcatctattctagggatttcggcatcgatctatataacagattggacagttgcccgcatttttcgttttgacatgcgctttaacttggccattggctcgaaaaacgctcgaacatggggcatttcacattggcccaacgtttgtgtttgctttgaagccaaattgaagccattacaccggaacaggccaatacgggtctccaagagggtggctagttgtggccacgggttaaaccttggaggatctctgcctgaaaatggcgttgagttgggggtatacccacttgtggtcccactctagccaatattgtgtgggacacacaaggggatatctttcctatatggggcaacaccgtcagcgtttcggttcccttggcggggaccccagaagcgtatgcggagaattggccctccggtaccccgtgtgtaacacagtttggcgtcccgttgtgggcggttaaaccaacttctgttttattgccatcttgaaccttggggttgtgtggattgtgcgcggggattccttgggccacgtttgccttttttcgacctccgggacacgctttttggtctagcctttgcctttgggcgccacaaatctacgcgtcttcggcccgggtctgtgcgcgcctttcatgatttccccgatttgttccccggggtgggcgcgtttgatgtggttcaacccggagctttgttttgcccccatgcttaagcgacaccgttgtttcaacgcaagaccaagacacacatatggcggcgcgggcgccgcctacaatagaaaagtaatacgtgccaccgaggagagtggtggcgcaccacatcttacatgtgcgtatttcacccgcagtattgtctgtggttcacacagtggcgcgccgccaacaaagtaggccacctgcgcttcataatgatcagaacacagcgcacgcgaccgtattacaacaaacacttgtgtaatgtgag

SEQ ID NO: 680026 - DNA, 279 bp, Homo sapiens
  misc_feature (128)..(128): n is a, c, g, or t
  misc_feature (236)..(236): n is a, c, g, or t
  misc_feature (273)..(273): n is a, c, g, or t
atgaagccagtgccagagtgggtggtgggatgatggggctctccctaggctgctcccagctggctgtgaatgttggaatttctgctcctcctgcctgctcccctccccatagagagatggaagagagngagagagagctgaggtggcacgctggcgtgggctcagagggaggtgatgtcattgagtgcgttgtcagttctcgctaatggcttgtactcatcttctgggcatagctnatcttctaggcatcgtggtttctccactttgcacagnctctcg

SEQ ID NO: 680027 - DNA, 842 bp, Homo sapiens
atcgcacccacctggggaaagggtgcaacatatatatagcttgtgaggccccccaacaggagcgcatatgtatatggctggttaaatatatatgtgtagaaaatgtgtgagagagggagtcttcactctggaggcggccccgccacttatagaagagtttttggttctttacacaacacgtttagtcctcttttgaggaaatgtgttatagggtgaattttttgtgggagagattataaaaaagagatgatccacggggggtcttttttgtgaagtactttgtttctgttgtaaaaattttggtagagatgcgccgtgtctgcaaaatgtttatgagattatcacatatataataaatgtagagaggcgccatttctacataacttatggggacacacaaccacacacaggggtatacatggtgaacacgtcttgccccaccttttttttgtgtgtgttccacaaatttttgtggtttgtgttttggaggcccacgcagatggagatgtagaagaggttaacacataaagcacatttgagaatgcttttataataataagaggcgtaaatgagattttcttggttaagtgtgtttgagaatatattttctacattctctctctctccaaattctacataccacgcgttcttattttaaacctggaattaaataaccacatattggaaaaattttttgggtgttccccccttttaacaccacgagtaaattattttttgtcacataacacctttttaaatgtgtttttcaatacaataaggggcccttgctgagaacataccacaaaaaggggtcacccaatttaaatttgatgtggatgata

SEQ ID NO: 680028 - DNA, 929 bp, Homo sapiens
gagaagagagggcgacacgagccgacacaaaaaaccaaggccaggctccggctcgaaaaacaaaccctccccggccgccgagaccctgggctgaaaccacaggtagaacctctcgcaggacgggcgtctagtgttgtccccgtgaggcggcgattaacacccggatgcttggagcacgtgttgttcgagaatgcacgtcggttcgacaaaaaaccacacaaaggcaacactcgggatgcggcctagtaccccttcaatccccggccggggagaacttggatgacatccaaggagccttctgaatcttggggaccccaggttgggctccccggaagagacaagctgaggaagactccggcctcgcacttccgggggggcttgccaagagagggttccctaaccacaacagcccagcccgggacgccgggggcaggtaccccaacggaggagcgggccaagtgacggcaaggcaaggaaccggaggagccgggggcaacagcacgttggcagaggaaaggccagcagcacgggcgcttgaaacgatgtctggaggatgcggggccacttccgcagggcaaccttccccccttgagggcaagttcgaaccccggggggcgggaggctggccgaccccatgtgccgggaagcccaagagcggagaagcggggtgcgccaaaaggtttgtgtgcgttgcgcctgacgcacgatggagacaacgctggtgtgaaacaactctttgtaacaaaggaacagtgggccgaagccagaaacaggaagcacgccgggacaatccaagagctgctacatcggacaaagggtgggtgggagaacaaaacccttcagtgatgagaacggcgagcacaataacacgcaggagacacagcagcacacacacacagagagagggaggtcaacgccacaaggagcac

SEQ ID NO: 680029 - DNA, 418 bp, Homo sapiens
  misc_feature (132)..(132): n is a, c, g, or t
  misc_feature (143)..(143): n is a, c, g, or t
  misc_feature (146)..(146): n is a, c, g, or t
  misc_feature (177)..(177): n is a, c, g, or t
  misc_feature (186)..(187): n is a, c, g, or t
  misc_feature (189)..(189): n is a, c, g, or t
  misc_feature (193)..(193): n is a, c, g, or t
  misc_feature (199)..(199): n is a, c, g, or t
  misc_feature (210)..(210): n is a, c, g, or t
  misc_feature (214)..(214): n is a, c, g, or t
  misc_feature (216)..(216): n is a, c, g, or t
  misc_feature (218)..(219): n is a, c, g, or t
  misc_feature (253)..(254): n is a, c, g, or t
  misc_feature (257)..(257): n is a, c, g, or t
  misc_feature (265)..(265): n is a, c, g, or t
  misc_feature (268)..(268): n is a, c, g, or t
  misc_feature (301)..(301): n is a, c, g, or t
ggcacgttctaagatccacactgatgcaagcacagaatagtaaagaagtccgtggtagaatgtgatcctgggaggtttactcaagcccatagttccagaaagtgcaataccagatattggtttatgatcagnctttcaatcancantttgatgattagggatctctacattcgtatntcaggtcannanaagnacaccntttcttgaganaagncnannaaccctagtctaccaccagcatagttttatcatnnatnggtcctgngtnagccatgattttcttcccttcatacatcaccantctaatgaaacccgtctttggcctgtggctgaaacgccatctgttggcagtgaactctttccagcctatgtgaagagggtcatagccacagagtgcagcaacctggtcagtgcaggt

SEQ ID NO: 680030 - DNA, 465 bp, Homo sapiens
tatgagcatgccaaagcccaaattgaggtgaagtgcgttctatcttgttaaaacaatcgtccaaaaatgcacctaataaggatgctttgaaaacatctctgggagagaatttggggatgacggatttttcatcatgacacaaaaaattagatgaggtcttctaaagggccacacttgaccatattcataatcgaagtgagttggggttagtaaaaaaatgcttaccttgctctaacccagggtttggtgtgcatgtccaaaccacttccccagttgccatgtttttctgaagctggtggcaaaaagcccttttctggggccagctcctgtgcaatggccctgatgtggtagggctaaaatccacagcacccgccagtgtacctgacccccaggttgtaggcctctgtggcgtatttttgaatatcccatctgggggcaactatgggttccagtccaaatgggaat

SEQ ID NO: 680031 - DNA, 480 bp, Homo sapiens
tgcccccggttttgtaccccaaaaggtgcgcgccccccccggtttcaacctggaggagttcagggtggccggctttcccaaaaaggtggcccggcccctcggcttttttttggttccaaggagggggaacaagtccccggagtccctccaggccaacgtgcagggggtgaaggaggcccgctccaaatttttccttttccccaggaagccctcggccccccaaaagggagacatttttttttaaaaatttaaattggcccccccattgcccgggccggttttgcccgtccggaaagttttttaaaaggaaaaagctccggttttcccctggggaaaaaaaaaattttaaaccctttgtttttttccgtttggcccggccccccccccggttttttggcataggggcaaaaaaaccccaggaaccccccaacccggttttttaaaaaaaaaaaaaaaccccccctgggggtttgggttcca

SEQ ID NO: 680032 - DNA, 107 bp, Homo sapiens
gtcaatctgatcttatgccagactggcagcagatagttggcttgtgttgaatgatgcctgacacggcatagtgcaaaattcttctagatgtggaaccacttgagtgt

SEQ ID NO: 680033 - DNA, 115 bp, Homo sapiens
gcattcggcacgaggttgtcatgattttcaggtttacttttttaggacttacttttcaattcaggaggtcaaaattgtatatacttataggtgtacaacatgggtatattggaca

SEQ ID NO: 680034 - DNA, 341 bp, Homo sapiens
gatcgacggtgactttgcacactgaaaccaatattttatttaaatttttaaaaattgggaccgtgcgtggtggttcacgcctatattcccagcactttgggaggccgaggcaggtggatcacaaggtcaagaatttgaggccaacctggctaacatggtggaacccctgtctctactaaaaatacaaaaattagttgggtgcagtggcaggtacctgtaatcccagctactcgagaggctgaggcaggagaatcacttgaagccagaaggcggaggttgcggtgaactgagttcacgccactgcactccagcctgggtgacagaacaagactccatctcag

SEQ ID NO: 680035 - DNA, 802 bp, Homo sapiens
cctgcttcaccagtgcttggacggaacccggcgctcgattccccatccccggtcaggccgtcccatatgccacgccctcctgctcatccctcttcaccgctaccctcggcatcctgtccccaatggcccccgccgccgttccagcgccgcgcatgcacaccaagcaagcgctgcactgcccgcctctccttaggctctgccgccactgaccgacgcttgcgatccaccgtcagcagagtagcgccgataactctactcatcctaggacctcacgagagcctgctcatcaatccagccaaggatacaaccctaggaagcctcttaccagcctctctacggtataagccctgttcccatgctctataactaactatttgacccgcggatagatagttaggcgtgttaataagcacactgttgccaaaatcactattacttcaccaaatctcaattgagtgagcaagggaacaatcgctcgacgcaacactggatcgaatgcttgctaggaacctaaccgatggtaggcccgaatcttccttcaggatatcaagaaaccaggactgtgcattgactagggagagcgtggctgtacatgcaatatggaagtgtgctattacatttgggaaagaaaaatgctgagatcagctcacttactgtgaaactgcacgaaactggcgcactgcaccaataaatgacccccccattggtgtgacttcattgagacaccattacctgaatgagcaggtgaaagccatcgactgaattggggtgacaacgtgacaattgcgcccagggcacgcca

SEQ ID NO: 680036 - DNA, 112 bp, Homo sapiens
  misc_feature (3)..(3): n is a, c, g, or t
tantgagtgtatcaccactgcggtgcttgctcctgtacagttcatcacacgtgagcacgtgctgacctccaaatatcgttaagctggagcctggtcgactctttaggatcct

SEQ ID NO: 680037 - DNA, 373 bp, Homo sapiens
  misc_feature (179)..(179): n is a, c, g, or t
aaaaattggggggggggggggggggggggggtttaatttttaaaaagttttttttgggaacccagccaaacccaaaaggctttcccccttttaaaggggcccattcagggggggggggaaattcataaaatttaacctggggggttatttataagatttatatccggcattttcataanaggggccctttccccggggggttctttataaaaattcccgacattttttttcccccccaaaggggacccctggaaccccttggggggttttcccctttccccccccccattttttccctaatccctagaaaccccccatttgggggggttttttttttttgccccccttttaaataaaggggctccccccatta

SEQ ID NO: 680038 - DNA, 575 bp, Homo sapiens
gtaacttcataatagcaattattgcccgaagctatagtggcatatgaacaaaagttcttatgactgggcggactgataacatataaaaaataattgtgtttgaccccaaaatgacattgatccgcccaattctacgatagatacatatagaagatctatctttgttcgttacgctttcagcatgttctacttaaataactcagctctttgaagcagcaagtttcccagggcatccacacagtatcatgttgtgtatgaagtatctcaaactggaacataaatttagtgatcaaactgccattcacagtgtaaggcagcacttaaatttcgaacctaaagtttagatgcattgtataaaaaaacctaaaagcagtatctggttatttagctgtaaaccaagttggaagctattcggataaatttcttaaatattgatgaacctttgggagtactgtttctttccttcaaactgaatgtacttaattcatgattaaattgcacccttatatgtttaaaccaatctttgtatacttttggggatttggggcttatatgctaaatcacattcagcatgt

SEQ ID NO: 680039 - DNA, 243 bp, Homo sapiens
cgaagtggagacatcaggaacgcattttacactacccaccagcaatgtatgaacattcctttttctccacaaccttgctgacatctattcatcttttaacttttaattaatggccattctgactggtgtgagcacagtcatcttgtggtttgatttcacattactagtgatgatgcacattttttcatatatttgttggctgcacgtttgtaatttgagaagtgtctgttcatgtcctttgcc

SEQ ID NO: 680040 - DNA, 208 bp, Homo sapiens
gtgatggttaatacctgagtcctcaacattgattgaatagaaggttgcaaagtgtttgccgggtacactctgtgagggtgctgccaaaggagatttaacatttgagtacagtggagtgggaaaggcagtccatcctcaatttgggtgggcaccatctaatcagctgccagcactgccagaataaaagcaggcaaaacatttgcggccg

SEQ ID NO: 680041 - DNA, 899 bp, Homo sapiens
gtccatttgcgatccgtcatctgcggtggagccgcaccaaaagtgcagatgtgcgtgaaaacccttacggggaagatcatcacgcctcgatgttgaaccctcgagtatactgatacacactgtataatggccaatgatccagagataaggaacggaattcctccgtgaatcagcagagactgatctttgcttggcaatccgtctggcatgatggatcggtactttgtcctgactacagatattctagacacaggagtgctattcttgcatgctggtgtctgaagactgtcgtcggtgtgtcgctctcgaacatgggatagaacgaagtcttagaccagtcccaagacgaatacgcacataccagtatagaagtgtctacatcgtggctgttctgaacctattatccggtggatgagaatggcccaattagatcgccttcgtcgagtagttgcccttctgagtgactgtgagtaggctcggggtagttaatgggcgagggtcactgttggacatagattattgctgacatctgtcgtctgacgttacagtatcaacaaactggatagacccgtacctgtactgcattcagtagcagacctgaagcagttggaaaggactggaacagtacgggaacattgggtcacaagctgtctggtacactctcatcttgccaaaccaggatggggcagtggctcagttaccgagatgaccactctagcaaacttattggccaagcagatggttcccagcgctcattgcagtgaaccttccactttagaaagaaacccgggaggtgaacgacctttttgtgtaactgccgaacatacgagatcttgatgacacgctcaacagggccaaggcaaagatgtggtccaaagcagcgacataattaaaaaccg

SEQ ID NO: 680042 - DNA, 288 bp, Homo sapiens
atcgaagactatcagagactaatcgccaaggtcgacagaagcaaaaggacctaatccatctgagagcccagagaaggatgaaaaacaagattacaaggcgtccgtcttcaacaggcctttatcaaagtatccccagttagggaagagaagagagatcaatccttcactcctcccacccgaatttccttcgtttcaagaagctccgattcaagctaaaacagagagatgaatctggcctttgagacgcctatacgcttgctgagcacacagtaggatacagaagggaga

SEQ ID NO: 680043 - DNA, 229 bp, Homo sapiens
  misc_feature (23)..(23): n is a, c, g, or t
  misc_feature (33)..(33): n is a, c, g, or t
  misc_feature (46)..(46): n is a, c, g, or t
  misc_feature (62)..(62): n is a, c, g, or t
  misc_feature (67)..(67): n is a, c, g, or t
  misc_feature (73)..(73): n is a, c, g, or t
  misc_feature (77)..(77): n is a, c, g, or t
  misc_feature (92)..(92): n is a, c, g, or t
  misc_feature (96)..(96): n is a, c, g, or t
  misc_feature (100)..(100): n is a, c, g, or t
  misc_feature (109)..(109): n is a, c, g, or t
  misc_feature (111)..(111): n is a, c, g, or t
  misc_feature (115)..(115): n is a, c, g, or t
  misc_feature (128)..(128): n is a, c, g, or t
  misc_feature (134)..(134): n is a, c, g, or t
  misc_feature (136)..(136): n is a, c, g, or t
  misc_feature (139)..(139): n is a, c, g, or t
  misc_feature (151)..(151): n is a, c, g, or t
  misc_feature (155)..(155): n is a, c, g, or t
  misc_feature (159)..(159): n is a, c, g, or t
  misc_feature (196)..(196): n is a, c, g, or t
tggagaagaaaggggccctaagntctggccccnctttctttggggntccctgtccctggggnacccnggcccngggnggctttgcgggtctnctcncccncggtgagcnanagtntcagccattcaancaggananaanggtgactgggtncccntggngagctgtgtatttcctaggaggtagaaaactgtgggnaactgtggctaataaaaactaagtgtgagcgtc

SEQ ID NO: 680044 - DNA, 263 bp, Homo sapiens
ggcacgaggccaagaacccttaccctaccatggactaacagtttgacatgagggaaacgacttaacttctcaaatatttccttttctggataacatggccaatgacaccagaactggtgggaagacaaaaagaaatatgtgtaaagcatcatgtatagaacctagctcacaaggagtacacaatgaatgctagccctctactttctttctttcctgtggaagatgccctctgagacttcatatatattttttataggagaaaa

SEQ ID NO: 680045 - DNA, 107 bp, Homo sapiens
acaccggctatattagtattgttagtagagacggggttctacacgttggtcaggctgctcacgaactcctgaccatacaggtagatccgcctgcctcagcctaccca

SEQ ID NO: 680046 - DNA, 1157 bp, Homo sapiens
acaaacaggagagacagagccttggagagtctccgaggactttgtctcctactccatcagacagaagggtaccaggatgattcgggatcggatgatccatcggtccacgagccagggctccatcaaaatccccatgtgtacagacgccacagactacactccaaccacgtcccgctcatcccacagcaatttccacagaactgatcaaggaatcaacatttaccgaaagccaaccatctacaaacagaatgctgactatggcagaaccagagcaagtcctcagaacgatatcatacaagtaaatccaagattcccaagcaagaccaaggcaccagaacaccagcgagacaaccaaacgatagagacggaccacatggcctggtacccacccatcatatatgctgtcagtagagacctgcacatgaaaacgacaagatctagtggcaagagaagggcaagatgatgaggacactaactgaggacagtcgagcagaatacaagacaagcagcacaaaaagaagcccaacactcacgggcctgggaccagaggaacctagcacaagaagcagatggagcacaagagaaccgggcaaaggacaaaacagaaacgccagacgcaacgcaactacccatacaaaacagaacaaaatacatccacccacctacaaactgcaacatcgcccctgacaaatgaagcacaaggggagaacaccgggccaggaaaccaccgacaatacgaacacgaacaacaagcaaaggaggcagaccaaagagagagcgcacgcagacaacgaacaaaccagcacggcaaatgacagcagaacaaggaaccaaaaagggaaatgacccagacgagaggacaccaagacaaccccacgcaaagaccccgttgggacgacaaagagacgaaaagaagacaaaagaaagaaggacgacaccaaagcgaggacgaaagcgcagaaaagtgggaacactaagaaagagacgaagacaacagaacacagcagaaagcacgaaaaaatagaaaacaaaggcggtcagaagaaactccgaagcgacaaacaaagaaaagtagacagaagcgacaagaagaaaaaaaaaaagcaacagaacgcaaaacgacgactcatatgacaaacacgaagagaaacaaaaga

SEQ ID NO: 680047 - DNA, 532 bp, Homo sapiens
tgtagagactgggtcttgccatgttgcccaagttggtctcaaactcctgggctcaagcaatcctcctgccttggcctccctaactactgggattacaggtatgagtgaccatgctcagtccttatttctttttcatgaaacaatctgagtctaaaggatccagggcggacatggtgccatcacagtactgaggacctaggtgctttttatcttgctactctgtcatcctcagcatgcagctttaatctcaggatctgaaatggcaggtccagcccataccattgtatttattttccagccagaagaaagaagagaagaaaagaaggaaggcatgctcttttccttttaaagtcatggcccaaaacatcacataaagttctgctcccatcccagtagacagaacctagtcatatgactatcccttaaatgtatagtctttacttctgttatagaaatttctattactatgaaaaaggatggatattgaggagacaattagccatctctgtcacagtaactaaacgtattgtag

SEQ ID NO: 680048 - DNA, 287 bp, Homo sapiens
catctgtccggcattaagcacgccacgggcgaggccgtctactgtgatgacatgcctgccgtggaccgggaactgttcctgaccttcgtaacaagttcaagagctcatgctaagattgtgtaagccatagtttttttcccaatggacagcactggttgcctttttggttaagtcgtacgagtgaaaagtaacagtatgaaagagataagctatttgttggcaaatgtccaacgtagacttgacgtgacacgggacggagacgtcggacttactataggagtttgtcc

SEQ ID NO: 680049 - DNA, 185 bp, Homo sapiens
cactctagaggacccctgaggggtgtgtgatcgacgctgatgtgacgtgtgcatgtgtgtggggtgtgtgagtgcgttgggaagagggggtgactccttgggggttgggaagatgtgtgacctcagtctgggcctggccattggcctaactctgggagacaccggtgctaaccaatggagttagg

SEQ ID NO: 680050 - DNA, 201 bp, Homo sapiens
ttgtttctgtcacgccctggcgcagattctgttgttcatccgtgccgttgatcgtattccagaccactaacagtgtgtcgtgggccgggctggcgttttttgtcgagtccttgccgcgctacctgtcgttcccggtgtgcggggcattgtgcgacaagtatcccgccgtgcgcatcctgcatatcagccaggtttatcggg

SEQ ID NO: 680051 - DNA, 429 bp, Homo sapiens
agaggatcccgcgtccccgcaagacggtgctttgctaaagcggataagttgtagttcaaagtcctggttggacgtgttgcgtgagaaaggtgcaatcattgtagcacagagagtggatcttgttgttcttggtccctgatatcacagggtcacactggcctggacaccatatggctggtgggctttcagaattgtgttatggggggcaggacgctgcatgttcctgtaatctcggtcaattatagttatccagcatgacaagatgtgccaggaagagcccacatcagaggcttctagcggcacagggacggccttaggacgccacgccattcatgacattggtcacatttatcgagtagatcttggcaacgtcattggtgtacttcctgcttgcctcatgataagtgctcctcttcaaggcccaggtga

SEQ ID NO: 680052 - DNA, 343 bp, Homo sapiens
agcaatctccggtataggctcctgagtagctgagactacaggcgccaccaccacacccagctaattttgtatttttagtagagacagggtttggccatgttggccaggcgggtctcaaactcctgacctcaggtgatccacccacctcggcctcccaaagtgctgggattacaggcatgagccactgtgcccagctcttactggcccttttaatccacttggaccctccttcaggtcaacctcatccttctctctaaacacagatctgaatgcctcttttcttgtaaaccctttcgtagctctccttcacttcccaggaaggtcctgttgcagtgtgcttccg

SEQ ID NO: 680053 - DNA, 166 bp, Homo sapiens
ctccttgaggtagcccaacatgcgaacggactgatcttgtccccgagctgccctgttggctcatgcccttgtgctgttggcttgtgcccttgcatggtgcttggccacttggcccttcttggagcagacactttgtgccccccatccacagccctcgaatctcagc

SEQ ID NO: 680054 - DNA, 409 bp, Homo sapiens
agtgctcatgtagggcttcatgctataaatggctttgcatttccgcatatgaacgaagtctcttcaccacagagctactgcagatcatagccgtatggtcaggctggctgtgtcaatctgctagttcagggtcagtgcaaagtacatccgctacacgtcaatcacacatacacagatggtgatgattccgatatacaggcacttggaatgcaaccacagtcttgctttcgcatagcatccctccgctattcgatctgaggggcaagatgctggtgggccgctggtccaatcactcgtgccatttataccacaactctgcagaaatgactggatggagtcccacactgccttggtgctattgtctgagtggtaacggtgcatgctgtcggtcagacccttaccctcatac

SEQ ID NO: 680055 - DNA, 987 bp, Homo sapiens
  misc_feature (119)..(119): n is a, c, g, or t
gagctgctggaggggaatcgaggcgcggctccgtgggactttcggctcgggccgctggctctgctctgctggggagggagcgggcccggccgcggtggccctgagcccgtcctgtgatncttgtcccgctcgcctgctggtcaccgccgccctctgtgagactccgtctgtgcttgctctagagggttcagcggtggcctgtggacccgcgggtccggggctgcctattgctgggcatcgcctgcgttgcttggtcggtgcattgcggaccgcatgggccctgtgtgccctgtgtggcagtcgtccccgtgtgggtctttcggcgcgcatgaggctcttgcgtcaagaccgcttcaacctcgggggctggaagggaagcccgtgcccgtgtgcccatggtccccagggccccaagagcctggtaggaactcttgaggccttgcccggccatgctgccgggcctacaccaggcacacagccggtgcctgagcggcccctgtagcaccccaacagttttcgagcgtttgacagaggccccctgtgaatggctgggggaattcagcctgaacgagagtgcccccctgtggtgggcccctgcaggttgaaaacagcgtcagcccctgtgcgcgggcatggaccatttgcggaggaatgtcctgtctgagacgagtacttcatgggaccagtaagcgcaggctccgtttggcaagatcaagttatgcccccctgttggctcaaagtggcgacataggatgcctacaaaacactaggatggcccggcttccgagggagtaatcccctccggtgtcttgccatcgtccaatggccatatcggggggacggctatcagggggcgcgacatttccatgtggcaccaagatcagtgcacttgcgcttgtggtagttgcggtgcctggtgcagtctctttgataggccgtcccttcaaggaacctgatccgaacatttggcccgcgaccagccttgta

SEQ ID NO: 680056 - DNA, 1086 bp, Homo sapiens
tggacggcatgcacgtgactataagcacgagttacgaccatggctgtcaaattcgctggtttcgcctgaaagattctcaaggggtgcactagctccgtgggacccgtgtcgccgagctcttcaagcgtctaccagcagtgtgtcagaacgcaataaaggacaaatagattccctcattgaaaggactgggatgtactatggtggcacactggcgaaaaagaattcaggtcgctggaatagagttcttctatacgcttgacagctcgaccttgagaggagtttcggcacggtgtctcatgcaaccttgaggtgctcttgggatcttatgtcctgagcgtaactgctgctgaacaatagccatcatgtatttgcatgcaggcacatcttaggtccagagagcacttcgagtttgcctccttccgactggttcttcctctcactgtgttacacagcagttggacagcataccttgtgaatgactcgaatgtctcggcagcctgtttgttggtacatcttgcaatgagcaagtcggtgttgctatcaaatctgcaccattgcatctggaggattccttggtgtgcataagtgacttggggcctggcatgtcagcttcactctaactgtattctctggtatagcgaccttcatggttccctacttcacgatgaagtagaagttgcctgcgctcttgatattttgctacgaatgaactttttgcgtgtgcatgaagtcaagtaatgaatgaggacagcaatggggcttaggagctttctttccctctcagtgtaatcgtatctgctgctggaacaaaggcatctggggcccccccaaagttatccagttcaggatgctatttgagcacaacgtcgagtttatcctgtagtaactaggcgggtaaaattggagggtgccggactaagcaagaggaagaacggtttaccacagtcctggcgtacaagaagtgttgcgttaaatgttaactgaactgttcctgtacccataaacccatgtgtacgaataactttgaagcgagaaccaatgagatgtgcacctcgagtagcaataagaagaataatgaggacaaca

SEQ ID NO: 680057 - DNA, 747 bp, Homo sapiens
gcgaggaggaggagtggggagcagtgacgaacccacagaacgcaacccggcagcagacagctggagtgggatgactccaccctcagctactgacccgtgcccccgtgccacctcggtttctgctttcgaagactctgctgcacatcgcgttctcccagtcccaagggatccacgatgtacaaagatcattatcaggacagataggttgtgcagacccactccaccgcacacgatcagatcgcatgtgacttggtagtgtaggaccctaggcacaacaagaagcaaaaactcgtggacatgaggtcgacagcatccatcaaaatcacacaccgaagagaagactgaaccacgatcactcctacgtggaacccgcacagtcgcaggaatacgcagacaaggagagaccgtaacaaaggagaacaaaaagcggcacaagaagattatgaaggaatggaaggtagaaccagcccaagagaggaaaaaacggaacaaaacagaaacacccatagcaaaacaccacaacacaagagaagacccaacgcaccaggcgcagggaaacctccaaaaagagaaaacaacaaggagccaaaaacagcaaaaggacaaccaaaacaaaacccgaaggaaacaaaaaaaaaaaaacacgacacaaaccaacaaaacaaaaaacacgaaaccacaaaaacaagaaccaacacgcacaagacccaaacataaaactacacggaaaaggcatacaaaggcagc

SEQ ID NO: 680058 - DNA, 569 bp, Homo sapiens
caccagcaacactgcaccttcactgaatgcccttgtagaaagcgttgtgaggatacagagctgatacagacctcgcttccgggtgcaggcgatggattggaagctgagttacgtgtgatacagtctatggtcatagctcttgttctcagtgatgcctcctgatctatctatatgctctggaagatagctactgggatgacgatgagcagaatggtcactaggatgcccagaatctgggctcatatttttatgcacttggcgttgtagtcatagtcctgggccccggtcacgtcgccatccatcttcttgtctctatacttcactgagtaggcgaatgctatgaagcccagtctgtagggtttcatgtagagggttttgaacagggaccagacgacatggtcgggcactgaggtctcgctgcggatgtggatctacggtggacgtcgggggtgcagggttgtgtggcgcccccacacagccacctcgtgccctccttgagcatctcatagttggggggctggccactgttgacaggagagttgaatgtttggtcagttgtgattcttggt

SEQ ID NO: 680059 - DNA, 662 bp, Homo sapiens
cactgttgttctatgtcttccgtgccgattcttttaatactccgattcgactccatctaccataccgtaacgatgcgtatccagctcagaccgtatgtaatattgcaatgtgagatgggcatctatgaagtccacctctcgcagaggcccccaagaaaacgttaatcttgtctcagagggtagatagaacatatatgggtcgtaacgagaagatataatcatttttgcagtgttgtgttaaatagtaaagcacaacattgcatgacaacgctaactgttattgcatattttacagtaacccagtgtgctacatcttgaagtggcgactcgagatgtcgagatggtatgcagtttgtcgcatttgtgcgctgacgatactggtagtcattcaatgatcaagaccacgcgacacgagtacaattatccccttgggcaaacgtggagcaataagtgttacttgtgcagtgcagcagaggtcttcctttatgagaggagatgtataggatataacacctatgcacagtggtcattacacgcattactatgttgattctaaggtccatatttatgaattgacgcatttaaattatgtaacaatggtgtctaaatagtcatattactcctgtaacaataatacggggaatgcggacccaattccctga

SEQ ID NO: 680060 - DNA, 384 bp, Homo sapiens
gcatgagagtgcacacggcattccgggtgtatctgtgtgtgtgctgggttagctgtgtgtgctgggtgtgatctgtgtgtggtgggtgtgatctgtgcgtgtgctggctgtgatctgtgtttgttgaggtgtgaacttgtgtgtgctgggtgttatctgtgtgtgtgctgggtgtgctctgtgtgtgctaactgtgagctgtgtgtgtgctgggtgtgatctgtgtgtgctgactgtgatctgtgcatgtgctgggtgtgatctgtgggtgtgctgggtgtgatctgtgtgtgatctctgcatgtgctgcgtgtgatctgtgtgtgtgctgagtgtgagctgtgtgtgctgagtgtgatctgtgtgtggtgggtgtgatctgtg

SEQ ID NO: 680061 - DNA, 221 bp, Homo sapiens
ggaaggtttttttaaacggaggcggaatttatgaatccaaattaatttccaccaggttggaatcagatttaatgtgagttcatgataaccaagcccccagaggaggtatgtttttttttttgttggcccacagtttttttttaatgttttgtgaaaaattattttaagggttttaaaaaagggggcttttatggtttttaaaaattgtaaatggtttccca

SEQ ID NO: 680062 - DNA, 149 bp, Homo sapiens
tagtggagctgtctctggaatgttggggcaacacagctacgcctgaggctacaattgctagcacacgtggactgtccatccccatagcgtgggccgcctgcctgacccttcagtctgttgccgaaactcactcacatacccaggcctgg

SEQ ID NO: 680063 - DNA, 377 bp, Homo sapiens
agtgcgacggaaacgcgggcgttttcgcgccagctaagcacctgtcagagagggggttttttgggtgacttgtatgctcccaaaaactctggagggacagcaaacggtggaccggtgagcaaattcgcagactactgtcggaatttggtgtctgatattcccaatcttgcaaaccataagatgccaccagctgctgctgaagagactcctccgtacggtaattataacacacttccctgtaggaaatctcactgtctctctgaaggtgccaccaacccacaaattagccatagcaacagcatgcaaggcagaagagctaaaacaactcaggatgttaatgcaggcgaggtcagtgaggttgcagacagtgggattga

SEQ ID NO: 680064 - DNA, 745 bp, Homo sapiens
ctactctgcgcgctctgcccgcgcgccgcgcctcagcctcggcctgcgctgcgcgcgcggccgtgctgccatggctgccgtccggaagcccgcgagcctcgagccgctgcgacggtgacgccagcccgccgttcccccgcgacgatggggcctgcgacggaaagcgcagacgtcgagggaatggctgctaggagggccccgagagactgccgaagaagggcaaaagcaccgggtgtgcccgaagcgaaaaccccgaaggagtttttaaccaacttccgtgaagcggccctataaaaaaccccgcgtttccccaaaaattgcccttctggaaacgggcgcccaaggttgccacagcttgacacagaacaacatgaacacatggacgcgaccccagaagatttaacaccaaaaggcaaatctgtgcgcaccgtaatttttacaacgcggaaaacctccctcaatcaaatggattttggcacagaagagaaaacaattcatcaatccagcaaactcgagattccaaaagggagtcatatgtctaagtgggccgggctggacttttggagcaccagattgaaaccgtgcccaaaatggaggacaccagaaagcagatcaaatgaatggaaaagaacacgatgtcgctaacgaaccggtaattattaaagagaaactcccaaagaaccctttcggaccgacctggggtttcaatcccaagagacccttaataacatttaaaaaagaatag

SEQ ID NO: 680065 - DNA, 1189 bp, Homo sapiens
  misc_feature (472)..(472): n is a, c, g, or t
  misc_feature (531)..(531): n is a, c, g, or t
  misc_feature (779)..(779): n is a, c, g, or t
ggctatctatgagctcgtagtaagattacacatgcaagcattcgccgttccagtagagttgcaccctgctaagatcgacgcgagcgatcaacaagggacgatagctagtcaagcagcgcagcgaatgcgacgctcgaaatagcgcttatggcctgatgccgaggacccgcgcacgggcaatagcgagcatgtgatttaaggcttgtagcagatataaccgacaatgtttaaagcatagaggctacgatactgagacctccgagggatgtggtgcgaagttgtacgtagtccaagcacacgccgaaggtcgagcatcgattgatactccaagatcacatacgaaggccgggcagtaaacgagttgtctgtgagaatcgactccgccttgcacccgagagtatatatgctcaaacacgtgcacgcgtggaggtctgtgagaaagaagcgtcctaagtatgaccagccgaaacantacgacgtgacgaacaacgctaggccttgtagagcgatcaattcctggaaagcgagcgnacaagagtcaggcctcatagaaccgcgaatgacctagggaaagtttagcactgacccgccgacggtagtggcgtctaagccccccgtaagagccgtgcagacaaggttgagaagtcaaagcgagaaagccatgctcgaccaagaataccagagtaccgagacccacttagcatgtcaagacactgtcaacagcatgcaccctggcgccaggatgcgtgtcaatatacactccgttcttaaagcagagnaagccttgggttgctagctagatccgcataacaactccggccgaatcgaaacctttcgaaacaacgcatctttgcgtctagaccgtaatattacactgcgcattgcttctagcacaaccactggatcgcaagaggctaccaaaaggtgaaagccgcaaaggatacctcgacagtaagaagaacgttcagaggtcaagagggtgtaagcaccgatagacaggtggacacagcaacatgggtgcttacgatgtttcctaagcacgcagagaaaaacgtacagatgagacccgtctatgcaagaacgttacagaggtcagaaagagtgagactatgaggcgaagaaaaaccttgagcaagttaggaggtggctataaggattcgaagcaatggacccctggaacgccgcgtaa

SEQ ID NO: 680066 - DNA, 184 bp, Homo sapiens
ccacctcgctcgacgggcacacactccgaccgagagccacctgtataagatactgacacgcagatgtacggaagaggagatagtgtagagcgagtagacgagacagacagacacagtagatcccagtctacgcacaccaggatctgcagcacctacctactagtgtgtgtgcacgactcctagt

SEQ ID NO: 680067 - DNA, 331 bp, Homo sapiens
taattatgtattcttagtgtagacagggttttgccatgttggccaggctgttctcaaactcctgacctcaggagatctgccttccttggcctcccaaagtattgggattacgggcatgagccactgcgcccggcctctatttagatttctttagttcttacttaatattcttgtattagtctgttttcatgctgctaataaagatagacttgagaccgggcaatctataaaggaaagaggttgaattgactcacagttccatagggctggggaggcctcaggaaacttacaattgttgcggaaggggaagttaacacatccttcttcatat

SEQ ID NO: 680068 - DNA, 215 bp, Homo sapiens
atctttggggtagtccagtacgtctggggcattcggataggccgagacagtgttgtgggacgaaagttagatttactgccgatgaatatgatagtgacaatggatcttgtgcgtaggtttggtctagggtgtagcctgagaataggggacatccgtgaatgaagcctcctatgatgtgccaatacagctcctattgcataggacatagtggaagt

SEQ ID NO: 680069 - DNA, 371 bp, Homo sapiens
cccccctttgtgggggacctttttttttttccaaaaaaaaaaaaaaaaatttctttcccccctaaaaaggaaaattttccccctggacctttttttccccggggggcaaaaaggccctttgttttttttgggggggggaaaaattggggcccaaaacccggggttgccccctttcccccctaaatctggggttggcatttttttcaaaatggggggggggtaaccctttttcccaaataaaatgttttctggcccaaattccccggggacccctttttttaacaattaaaaaccccccttaaatttttttggcccaaccccccctttgggttttttttaacccaaaaaaattttttttttgggcccccaca

SEQ ID NO: 680070 - DNA, 118 bp, Homo sapiens
caccagctgctggcatccattctacctcgtctctatgaatttgactataatagttacctcgttataagtggaatcatacttgtcatttgacatctaggtatagtttcacattgtggcg

SEQ ID NO: 680071 - DNA, 209 bp, Homo sapiens
tccctgtgctgctcaggtctggacaagcagactaatagacatctacagaactctccaccccaaatcaacagaatatacattcttttcaacaccacattgcacttactctaaaattgaccacataattggaagtaaaacactcctcagcaaaagaatggaagtcataacaatctctcagaccgagcaacaggagacctgagcaagccagt

SEQ ID NO: 680072 - DNA, 963 bp, Homo sapiens
ttcgcttttattgtgacgtattaaagagtggaggactcatggtagttcctgttcatctacaggcaatatggaggcatcatccagtgatgaagcctgtgggtccgcccgtgtgagctctgaacgatggaagctgcactagttggtttgtgagactgataagtgacctcgatcgaagagcacatggagactggcgatactccctgttgcgatgtacttcagaatgtctatctaggtggtagatcctttggatatttgaggataggttggacgccgcattagacacgcttcccgagagatatgctcgcctcataacgtgctcatactatgggcattgcgtcgcggacgttgcccatgggacatcctcgactcttgccgctgatacttccgctgtaagcagacttgtatcgatgctagcatgaaaacctaaggggatatgcgccatagtctcgatgcccttacgaagctagggctataggtacgcctttggcctaagtatgcgcacctttcacgtggacgtcgcaccttggtccataggagccaagcccgatcatgtcacgacgcccttggcaatcaatcgaggagcaagaactacgtcggctgacgcagaggtgcccatctaaacccaccaaactatacggataactctcacttactgtgccagccgcgcgatagcactctgtatggagtccttctccagcccaaggttacgctccagaagccgtagtatacgttttcgccagaacgcaccagcttcatgaatttgccgcacctgcagtaataggccctccaattggttcgttattcgcctgcacagggcatctagagctcgccttaacttggaatcagggcccctgcgtggcggccttggtgctgggaagtgggcttctgatattaccccgttgcgccagagcgtagtctaggcactttaggcactcggggctgacgcgctggtggacggccttt

SEQ ID NO: 680073 - DNA, 428 bp, Homo sapiens
ctagaggagctgacagcatcctaacagctccatccctgtcccaggcatcgtgtcccagcaacttctctttggctctgggtggacttctcgagcgtgtgctgtgttactttccacttaccagataatatggtaaatccagctattagctgtggcgagaaagtttgaagactgtgttaaggtgtgacagcctcctccagacctgattgatactcagtgactgggagctggcgtctccgtgcacccacaaatgtgtctgaagccagccctcctctcctcccttagactctcacagtgaagcagcaggaccacccaggtacagcgcacctcgagctctgcccctcaaagggagtggcctctcctggctattggcaaagctaccagaaacttggcttcagaccattcacatctaaacaggtggtccagatatt

SEQ ID NO: 680074 - DNA, 424 bp, Homo sapiens
catattgtataatcagaatgaatcttcagtggtcatttctgaaaaacaaatactaactttagttaaaaagttaaacttttacttctctttttcaaagtattttcaaaacttcactattcaaattaaataggatattttaataatttacttcaaagatattatataattctgatcccaagagatcttcttgtggtgtttataaataaatctactaacagaaaagagttagaaaagcccatctaggaaagaaaatcgttgaattaagtgagagtcaaaagggctatttaaacctattggggtttttccttcccatcaattttttttacgttggcttttgggaacagagaaaatttgaggccgctcgccctggactccaatttctttttttaaaacctctttgggggggaaaaagtaccagggaact

SEQ ID NO: 680075 - DNA, 299 bp, Homo sapiens
gcggcctatccgtatcttcctcccaccaacattctactcttccttcccacacctctatttaaggatcctctactctctatatccattattccaattattttgatttatacatcccacaaataactcaaaacatttcatatttctctttctatacctattgtacttcacttcacaaaatgatctccacttccatcccttttattccaaattacaggatctcattctttttataactttatagtacttcttactttatatataccgcatctcttttatccattaatcttttactaaacact

SEQ ID NO: 680076 - DNA, 551 bp, Homo sapiens
cttgaatcgtgcagacgataccggctgttgcgagccacaggtagccgatcatgagcagggtgccaatgtaagcggcctggccgccgcgtctcaggccgccacgggcaacgtcatggcggcataaccacaccgccagtccgatgagtaccacaccgagtactcgccatccgatcgccgggctgaccaccgagacgagtagggctgctaccaccgccaggcacaaagctgacaaggcgcgattacgcgccatcgtcagtcgtgacagctccagcctctccccgcagatcgtcaggatcatgtagcaggccagccatccgacgatctgggagacgtgtgccccggttgtcaggagggcagcggccccggcggcgcataaggctccagcgccctggatgacgacggcgtcgtcgtgactgcgccgtcatagggggacgtatatggtcagcagccccaattgggcaagagtgagcagagcaagcccggcccgggcggagtcgaaaggcataggcgccagcaggacgatgacgccaaacccggacatggccgggacg

SEQ ID NO: 680077 - DNA, 155 bp, Homo sapiens
cacgaggccgcatatgcttttttttatattgagatatatttgatataacatacactttaccatcttatagtgtacatgtcagtgcattccagtacattcacagagttgtgccatcatcatcagcgtctaattccagaatgttttcatcactccca

SEQ ID NO: 680078 - DNA, 510 bp, Homo sapiens
taactggattccaagtccccaggagggcttaattttttcttttacaaaatccggtctgggggtatcctgggctctatttggcccggtatgccgaagacgaccggggcgttgggcagcgggccatagcggagaactagccgaaggtcttgtgaaattcttctcttcctcaggtgatgactcgagctttctccttcttatagaacgttccggaaggggcatgtgcaccggctccggctcagacgtgtggtgtggccagttttcagttctctttcagcaagaaactgggtcttccctttcttgtggggggccgaaggggctttccgtgggcgaaagaaggattagagttggggaagcgtgaacatccttttagagacgcggagtgaacacgtttggggccgtgggagaggggaacctcgcgggggacacgtgtgggaccccgcacctccttgcggaatcccacagagaaaaagtgccgaagtggactcgcggggccaacctatatcgtggggg

SEQ ID NO: 680079 - DNA, 234 bp, Homo sapiens
gccagcgtctcgtaggtgtcagccagctgcggcaggatcagtctctccccctcccgaagcacctttactatcccggtagaacaccttcacacaagacaggctgctgttcgatgacggtctgattgttttccagggctggcgccaagcccttgcccatggggaatccctggcgggccacctttgtatgctgggctggtctaggccatgccagggcagctgcccatgtcgttggcc

SEQ ID NO: 680080 - DNA, 277 bp, Homo sapiens
gctaaaatggctgaggagagagtcgcgacggttagcgccgagattctctttagttgcccggccgcaggcaaagggcaagctggcgggtggcttttgtcccatgcagcggttcctgagtagctgggactataggtgtgtgccaccatgcccggctaatttttctatttttagtagagacgggatttcaccatattagccaggctggtcttgaattccttacctcatgatccgcccgcctcagcctcccatagtgctgggattacaggcatgagcactt

SEQ ID NO: 680081 - DNA, 479 bp, Homo sapiens
atcatttgatatggtacgaagtagagtaagagtaaatatgccatggaagacataatctagtttgtcctccatctctcatatttccccacattctacacagaccacacatgtacatcagtcaaccagtcctttatattccacatttttaaatatgcgtgctcagacagtcaccaattacagttctttctccattaacatatggtggcagtgaatgctaacaggtatcaatttctttgatcaggaacaaagaactccttcaggaaactcactttcctggtccttgtgatcctatcatgtaaattctttaaattggtacacctgtttactaattataattgattgctatttatgccaaggagagcatttcccaggcatgcctcatctatttgctaacaacaaagtatgcttactttatttacatagtgccacgggtttctcttttttcttctcttttttattggcgggtcttcgggtcgttt

SEQ ID NO: 680082 - DNA, 1527 bp, Homo sapiens
  misc_feature (1326)..(1326): n is a, c, g, or t
tatccagcccacccaacgcgcccaccaagggtgttaaactcagttttttaactctctcccagggggcaaacacagggggggcacgagggggggccgaggagggggggccccgaggggccacatagaggggaagatagggccctcacctccacaagacagccggggacggggggaaaagagagggtgtctcggggcacaaacacacgagccccaaacctttggccccattatcaaataagagggggtgtcagaggcacgacggggggggtgtggcgcccgcgggaggacgaatcatcctcgcgcggggggcgcgcgcgtggagagcgacacgaggggatacccaaaagagagagcttctccgcgcgcgagagccacacgaagacactcacccacgcgatgtgacagcgggagcgcccaagagacgattcacgcgcgggaccacattctcacacgagagtggaaaagagcgaccaaagagagagcccgcgaggaacaccgcgcgagcccctctctctatctctgatgcgagagaacacaagagagggagagaagaagagaggaagtgacacgcacactcatgtggggggagagaggcacacagagagacctgggaccaagagaggcatacaaccaccacccgcacacccatcccacacgagagacacaagagagccacagagggagaggtgacacaaaagacaccagagcaccacacaaacaaatatggggatatccaccccacgcgacgggacaaccacccagatgggggcccacaatgacacacaagaaaaagagaaaggatagggggagcaacacaagaagggagaggcacaaacggagggagcaggagaaaacaatacgaggagaccagcaggagagcacagacacgaaggagagagatcacccaccacaaagcagaggagaacatcaaggcgctaccatacacgaagaaagaaagaaacaacaagagagagagagagaaacaaggaggacaaggaggcgaaaaaagcacacagccagtcacgaccacccggagccgcaagagagaggcaagacaaaagagggtgagaccgcacgctaacaaaaaaacaaaccaaagaaggcgacacagacgatagaaacatcaagatgcagaggaagagagaagcccacacaacaacagaagcaagacggagagacagcacgcgaaactagactgcttaaaaggacacgaaggagttagacgagcgcaaacgcgactccatacataaaagatagtactaagacacaagtcacgcagaaaagctaacaagatggtagagccacacaaccgaataaaagccagtnacaaacagccgaatctgtaaggagccgtacgtcactacaagccgaaaagcaagcgtagataggagagggacacacaactagaaaatacaacagaggagaaagtaaagaagaagcaccgaagaagggccagtgagagtcgaacacacggagggcacgctcccttttcctgtataggacaaaaataagcggagaaccaacagg

SEQ ID NO: 680083 - DNA, 189 bp, Homo sapiens
gtcatgtcaaatgctccccccacaggccacaggccacctgcctgactgcgctttgaagtactgcctccccacaaactccttctccaggaactgtcacacaggaaacccaggtgtcttcacccagcctctgcttagcaagaaatcacagaatcacagaaaactaggactatcccatattctctccctgct

SEQ ID NO: 680084 - DNA, 389 bp, Homo sapiens
  misc_feature (318)..(318): n is a, c, g, or t
  misc_feature (382)..(382): n is a, c, g, or t
tttgaagacagggtctggctctgttgcccaggcaggagtacagtggcattatctcagctcactgcaaccactgcctcccaggctcaagtgatctgccctcctcagcctcctaagtagctgagaccacagggacacaccattacacctggctaattgttgtattttagtagagatgggatctttctatgttgcctaggctggcctcaagtgatcctcctgccttggcctcccaaagtgctgtgattacaggtgtgaaccaccatgcccagccagagatgctaaattcctgggtgagtgcagctgaggggctagggcctncttcttaccaagcccctacccatttagatggcaggctctacctcaagttacagcaggccacaantattggt

SEQ ID NO: 680085 - DNA, 465 bp, Homo sapiens
aaattgggatgatgaccataagctggaagaagagtttgctccattatagatttatatatggaggactgagtatcactctatgtagcccaggctggagtgcaatggcacgagatcggctcactgcaaactgcgcctcccgggttcaagcgattctcccgcctcagcctcccaagtagctgggattacaggcacatgacaccacgccctgttaattttgtatttttagtacagacggggtttctccatgtaggtcaggctggtctcgaactcctgacctcaggtgatctacccagctcagcctcccaaagtgctgggattacaggcatgagctaccgtgcctggccaaatctgcttgatttaaagagaaaattagggcctttagtttaattagatcccatttgtcaatttcgtctttggtagccattgcttttggtgtcttggacatgaagtccttgcccatgccta

SEQ ID NO: 680086 - DNA, 1436 bp, Homo sapiens
tgagtatgcgctcgtaagacgtgtggtggtctcgatatttattgtgactgcgctgtgggtgtgtttcagtgtgtttgtttgtgtgttgggcgtgccgcatcgtgctcttgggtgtgttgttctcggtatgggggggtttctgtgtacagggtgctcatagtatcttggttgggggcccccgtatgtgtcacgcccgcacacagtggtggtggttcgtacacccggagtggtggtgagatgtggctggcgtttgtgggctcggcgtgtcctctgtgcggtgagcgcgtttccctattggtcggtgttgcggggctggttgggggccgtccccctgcacttgttcctggtagcagccctcgtgagggccccgtgtgggagacgtccctttttccgtggtcatacacgggagttatcttgcacgagcgttggggcctacttccttccgccgctaagggggccgcccctgcgcgttccccctgtgatagggtgagggtttcctggtctagacgcgctcctggcataaatatttgggggataatgcctttcctcttaggaggcatttttttcccacagattcgaagctccgcccctggggctgccttgggctcaccccgagtttagaaaagtccagttgaggtggtggacaaaagaaggttgcggaaaattgaaggtcttttttctgggcccctgaagggccacggttctggccaccctgggaaaagggttagccccacaagtggggctctgagaaccacgtcgttaaagggataagatacctccggggagaagcacctttgggagcctccactatatatgcccctcgagtgctctcattggagggagcccctgcactgggggcccctcggtttatagacgacttgcgcgtcatagacacgtctgaaaatagttcttatcaaaggggaggcacattatgaggatccctgttgtaaaataacaccggacctcgaggttgcccacggcttattctctggtgagttgccgcgctttcccacgagaccacggcttatggattctcctgaggagaaggcccccggagtcttccgggccctcggaatgatggcacggattcctggaggcacatgtttagtagaaggcttaatttgtgggtgcccactaacgcgcaccctggtgggtggaagtggtacaaagaaagactttgcactttcacacacttacactgtatagtgtggcacatttcttgttagaagatgagaaaaggagttgagagaaggataaactgggatcctggtaaaaaagcctttattgccacgcccgagcaccctgctgtgaattggggtgcacatgagctaatggatgtcacgatagttcgttgggagggggaggacacagaagtctattgtttggactgtgtttgtctcaccatcaccgccccatctaaagtgtagtaaaatgca

SEQ ID NO: 680087 - DNA, 520 bp, Homo sapiens
tcttctccccgacacaagaaagtaccatctctgcagacttaagactaaaaatggatggattttatcttgcagcaaaatggtggggaaaggaagtttggcaaggtcttcctggcagaattcaagaaaaccaatcaattttgcgcaataaaggccttaaagaaagatgtggtcttgatggacgatgatgttgagtgcacgatggtagagaagagagttctttccttggcctgggagcatccgtttctgacgcacatgttttgtacataccagaccaaggaaaacctcttttttgtgatggagtacctcaacggaggggacttattgtaccacatccaaagctgccacaagttcgagctttccagagcgacgttttatgctgctgaaatcattcttggtctgcagttccttcattccaaaggaatagtctacagggagctgaagctagattacatcctgttagacaaagatggacatatcaagatcgcggatgtcggaatgtgcaaggagaacatgtcagggg

SEQ ID NO: 680088 - DNA, 882 bp, Homo sapiens
  misc_feature (1)..(1): n is a, c, g, or t
ncctgtgtggcgaaaaaaatattgtgctgtgggggccaaaaacaacaaatggggcaggggggtgcagcccccccccaccggttggcgcgtaaaaacaatggggccgcgtatattggacaagacggcggtctcgcagacattgtcgtgccaaaggttttgtgaaggccccctactaaagctggcggccatatgcggcccacaggctgactacacgccggtctttaaaaaaggagtttgttcaaaccaccgctcttgtaagccatgatgctcagactctacttgtgttcacataaactaacccccccgtcccacatcagcggttataataaagccaaaagatacccaccttgcccaaaaatatcttcgtgcaacccccccccattcttcccagccaagttcttctccacacacagaccttgccacaacccttgcgtttcttcaccaaaaggcctatcccataaatatcgtcttgttacgctcgcaccatatcccccagtttattactctatttgtgttacaaccacaccccccgccgcacgctcttgtggtctgctttatactacaccccaaggcgtttttggcgttgcatctgttcaccctcacacacttgctccccatcatatatagcctactatatgatgaaacacaacagtgctcttcattcccccccccggaaggtaaagcttctcctcccccaaagactgaactacgccccgctcttggtaaatacggctattctgtagacactagatcctgtttcgacgcaccacaattttccaggctgtcagtctccccggcccaacattactactttagcctcctgtgagaagagcacccaaagaaaaaaatcgacccacatacaaaaatcaccgaacatataaa

SEQ ID NO: 680089 - DNA, 166 bp, Homo sapiens
ccttccctgctcagttttaattttcccagttttaatttttagccttttttggttaccaaaataaccccgctcccggccgttcatttgaaaatatttccagttaacgtgtgtgaagtgggttttttgaaatgtaatttccaagcaataaaatgctcctgtttttgca

SEQ ID NO: 680090 - DNA, 106 bp, Homo sapiens
taattaggagcgtgctgagcacgtcgagaaacacaacttcagagtgtaacgggtatggaccatttggcgtttttcatcttggctatatggttccatggaagcccac

SEQ ID NO: 680091 - DNA, 144 bp, Homo sapiens
ttggtgctgctctaatgacatacttgaggctaggtaatttataacaatagaaattatttctagcagttgttaggctgggagtccaagatcaagccacctgcagatttgatgtttgttgaggaccggtctctgcttccaagatgt

SEQ ID NO: 680092 - DNA, 228 bp, Homo sapiens
  misc_feature (213)..(213): n is a, c, g, or t
gccggactggtgaacaacgaactttaatagcggctgcacatcgggatgtctgatccaacatcgaggtcgtaaaccctatggttgatatggactctagaataggattgcgcgttatccctagggtaacttgtcccgtgggtcaagttatgggatcaattgagtatagtagttcgcttagactggtgaagtcttagcatgtactgctcggaggtngggttctgctccgag

SEQ ID NO: 680093 - DNA, 172 bp, Homo sapiens
ggagagtatgttccccagcggtggaggtgggactaacaggagggttggagtcatgggggcagatcccttaagaaggacttggtgccgtcctggggagatgagtgagtgtcttgttctgttggtttctgtgagcatctggcacctcccctcgctcctcctttccctcgtgccg

SEQ ID NO: 680094 - DNA, 555 bp, Homo sapiens
ctgtgagtgaactatccatgccctatcatccatgtacacacggaccaggaacatcccgaccacccgaccacacggcccaggaacatcccgaacataccttgctgggcaaaggcccagctgaaggaacatcctgatcatattctgccgggaacaaggacccaactgcctcatcatgggaacatctctcaacatcttcccaggcagaagccctactgcccaaacccctcccgtccaggcctgtaagtaccccagactgtaagcggcggtgggctctggcattaagctggtcccccctctgtaggttactgcaccatacctctgttgctgtagagacgccctctctctctgtctttctttaaccctcgccttccctttaaaaaacctaacaccaggctcaagccatcctcctatctcagcctcctgagtagcttggactacagccccatgccattatccatggctatatagagcatttaatgtagagatggggtacaccacgttggccaggctggtcttgaactgtagcctcataaccacccgctcacctccaaggtg

SEQ ID NO: 680095 - DNA, 193 bp, Homo sapiens
  misc_feature (25)..(25): n is a, c, g, or t
  misc_feature (44)..(44): n is a, c, g, or t
  misc_feature (60)..(60): n is a, c, g, or t
aggattgcttgagctcaggagtttnagaccagcctgggtaatanagggagacctcatctntacttaaaaaaaaaaaaaaaaattgggtaggcctggtggcgtgtgcctgtagtctcagcctgggagatcaaggctgcaaagctgcagtgacctatgattttgccactgcactccaacatgagacccagtctca

SEQ ID NO: 680096 - DNA, 126 bp, Homo sapiens
ccccccccccccccccccctttggggggcccggggacgttaaattttacccaaaaagggggggggcgccccccccccagggggggtccagccccccccccggggccccagggtttttcccggggga

SEQ ID NO: 680097 - DNA, 835 bp, Homo sapiens
tggaaactttaaaaccccccaaaaactgttttattatacaagtgagtttggagtcccgagtgggctatatcggaaggattcctggtagcgagcgcgggcaccagggcctccaaacttttgggtgactcgcggcgacgaaggtggtcacgtctaccagcggggcccctggtcatactgggatagagggatcgtctatgagatctccttctgggaacgcctcatccacatatttctgggtaatgaggccacccaggggcttggagaagatagagactggacgggatacgaattaaacttcctgggcgcccacggtgaccaccgaccctttatacacgaggaccacgggtttgtcttaccacgcagcaaattcgctctcctttgccggaaaaacgccaagatctgtgcctccaagcacgcctttgatccttggtacgctgtgcggcgtgcctcaatcaactcctcctaggggggccctgaccgcgttgtacacctctgtggatggcagaacctatggtgaccggtcgttttgtgcgagtggtcgcccccactagtgtggtcgcggctgtctctcatctgaggcgtcgcgaagaagacctgtgccaggacgtgcagctggcgcccctgtggacccgagctgtgtggtcccgcagtctggtgggtactaggacgacctcaacgcgcgcgagggttcatctccctcggtacccctgaatccagaaatcttgtgggggccctgcacccatccggtctattttactctccccttcggggccagggaccccccgggaagcacttgttgacgccctggggttgtcacttgtttgaacaacgggtc

SEQ ID NO: 680098 - DNA, 286 bp, Homo sapiens
gctctagaggaccccggggagctgagcagtacctcgggaggtgtcttgaggctcaggtagcttatcacgcttatactatgttgttgagttggatggaggtggctggtggcccatcctgttttttaaatgtttcagctgctgaggtagggccagtagggcaatcctgaagaatgacgatgctccgctgccgccattctgacccagttgctcagagcccttcttgctgaaggggggattttgcactttgtggtagtcctctgcccgccgccgtcagctcttgcgcacg

SEQ ID NO: 680099 - DNA, 125 bp, Homo sapiens
  misc_feature (70)..(70): n is a, c, g, or t
  misc_feature (109)..(109): n is a, c, g, or t
ttaggtttccccgaaggcacactgaaacatctctgtctcattcctaagatgtcaaacgctggtaagggtntcctcgcgttgcgtcagaattaaacccacatgctccacncgcttgtcgcgggtcc

SEQ ID NO: 680100 - DNA, 450 bp, Homo sapiens
gtatcccccgttctccccgtggggtcgggatgtaagggttattgtattagtccattctcactctgctaataaagacatacctgagactgggtaatttgtaaagaaaaagaggtttaatggactcacagatccacgtgactggggaggcctcatgattatagcagaaggtgtaggaggagcaaagtcacatcttacatggcagcaggcaagagagcttgtgcaggggagctcccctttataaaaccattagatcaggcagggcacagtggctcacacctctaatcacagcactttgggaagccggggcgggtggatcgcctgagatcaggagtttgagactagcctggccaacgtgttgaggacccgtctctaactaaaaatacaaaaattagccgcggcgtgactggctcatgccctgttgtaccagatactcgggagactgacgcacga

SEQ ID NO: 680101 - DNA, 307 bp, Homo sapiens
tttttttttctaaagacagggtattgctctggagtgctgtgcttagatcatagctttctgtagcctccaactcctgggctcaagtgatccttctgcctcagcctcccaagtgagctaggaatacaggcatgcagtaccacatccagctagtttttaaattttttgtagagacagggtcctgctatgttgcccaggctggtctcaaactcctggcatcaagcaaccctcatgcctccacctccaaaggtgctgagattacaggagtgagccatcatgcctggtccaggttaaatactttctgtcggac

SEQ ID NO: 680102 - DNA, 383 bp, Homo sapiens
tccgtagttacaccgtcgctagcggttttcggtcgatgcgaccggaatcctttgacaaccgtagtcccacggttgacagactgcacgcggcctcctcattctgcacccgctgcaaaagacagtgggcattgctaaatttctccgcaatgttccccaataacagggtttgatttttacgttgcttgcacctgaggcattcacttcgattgcgccgacggtgatgtttggaggctgaggaaatgtcgaaagcgcccaaccctgttgacaaatatgtcggcagccgcgtgcgcatgcgccgcatcatgttgggcatgagccaggaaaagctcggtgaagctttgggcctgactttccagcagatccagaagtacgagaagggcacg

SEQ ID NO: 680103 - DNA, 136 bp, Homo sapiens
  misc_feature (80)..(80): n is a, c, g, or t
  misc_feature (83)..(83): n is a, c, g, or t
  misc_feature (86)..(87): n is a, c, g, or t
gagcggagtatagttgggcgccagctccaacaccagattgccccgcgcatcacacagtcgctttcgggaggtacagaatncgnccnnaggttgacgtgggaattctctgggctagagtttgactgtaacaggatat

SEQ ID NO: 680104 - DNA, 858 bp, Homo sapiens
  misc_feature (1)..(1): n is a, c, g, or t
  misc_feature (75)..(77): n is a, c, g, or t
  misc_feature (80)..(82): n is a, c, g, or t
  misc_feature (209)..(209): n is a, c, g, or t
  misc_feature (211)..(211): n is a, c, g, or t
  misc_feature (253)..(253): n is a, c, g, or t
  misc_feature (257)..(257): n is a, c, g, or t
  misc_feature (261)..(262): n is a, c, g, or t
  misc_feature (265)..(265): n is a, c, g, or t
  misc_feature (268)..(268): n is a, c, g, or t
  misc_feature (271)..(271): n is a, c, g, or t
  misc_feature (274)..(274): n is a, c, g, or t
  misc_feature (316)..(316): n is a, c, g, or t
  misc_feature (333)..(334): n is a, c, g, or t
  misc_feature (344)..(349): n is a, c, g, or t
  misc_feature (351)..(351): n is a, c, g, or t
  misc_feature (353)..(354): n is a, c, g, or t
  misc_feature (361)..(361): n is a, c, g, or t
  misc_feature (363)..(363): n is a, c, g, or t
  misc_feature (365)..(366): n is a, c, g, or t
  misc_feature (369)..(369): n is a, c, g, or t
  misc_feature (389)..(389): n is a, c, g, or t
  misc_feature (393)..(393): n is a, c, g, or t
  misc_feature (435)..(435): n is a, c, g, or t
  misc_feature (438)..(438): n is a, c, g, or t
  misc_feature (440)..(440): n is a, c, g, or t
  misc_feature (464)..(464): n is a, c, g, or t
  misc_feature (480)..(480): n is a, c, g, or t
  misc_feature (635)..(635): n is a, c, g, or t
  misc_feature (711)..(711): n is a, c, g, or t
ntttattaacttgccaaggccctgaggtacatcactcccttaatacttcagttttatgttatttatttttttctnnnttnnnttttttgtgtgacggagtctcactctgttgcccagactggaacgcagggcggcgatctcggctcactgcactccagcaggcaaaacagagcaagaccctgtctcaaaaaaaaaaaaaaaaaaaacgngngagaataggtcatagaataaaaacatttcagctcaaattttntttngttnnttnctnttnttnttcttttttgtagcatcggggtcttgctatgtcactctagcnggcctcaaactcctggnngggggggggnnnnnngngnnggtttgngngnnggngggattacagacatcaccangccnggccacaacccaaacttgaaaaagaaaatctaagtggccttngangngtttgcaagtcagctgaccaatgnggtacctccttaaggngggcctctggggcgccggtgaaaaaggcttatataaaaggctcatgaccagctctgccagtgatgaacatgtgtcaagtcgttctgctgtccccaactcccggacccaggtggctctgaattagcttcagctaataaagaacaaagacggggggnagaaaggctccccaaacttgtgcaaatccagtgagaaaacactttgcacatcatctgtctcagctgttctgcaggngaggcacactcagaactgcaccaccccaggcaagcagtttgccaggactcgggggcctcagggtttcatctcggggcctccgcctgcaccagcgagtgggcctggctcagggcgagcctgtccttcttctccttctgcaaaacctgc

SEQ ID NO: 680105 - DNA, 817 bp, Homo sapiens
  misc_feature (482)..(482): n is a, c, g, or t
  misc_feature (550)..(550): n is a, c, g, or t
  misc_feature (600)..(600): n is a, c, g, or t
gccgggacctggcggccaggagactgcatgctgaatgacgaacatgtccgctgtgtgtggtcggatctctcgtgcgctctccatgaagcatctacgatggggactactaccgctcgaggggacgtatcggccaagatgccagtcaagtggattgcgcgatgcgaagagtctagctgtacgcggtgtcctacatctatcaacgaagcagactcgtaggtggtcacttccgcgtggttgcacgaatcgttggagatgatttgtcagcagtgagtggccataaccccaatatcgcgtggccgtcgagacgaacagctgaagcatcttattgacttatctcgctgcccacgggacaatcagcctgagaacagactagcggtgacttggtctcggaattggacctgtatcttgcctatgagtcgctctcgctagggtagctattgcgtgagcgctaacagatcctctccatgagaacctggaccaancgatttctataacactaagcgtttgcgaggcgataagagattctatgcgatgagatcatcaacgtganacgagctcgattgtcgcgtcgcttagcccacacgtgaaggccttcgactngaaacactctccgtctaattgtcaactagtgggatcgatcgcggttgggaagggtgtaatccttcggaaactcgggttgcgaatctctcgcacggatgtgccgcattgacctctctcactggacctcgaggtctatggacccttcatcgaatttagcttgttaggataggcctacgacattgttattcggtagactcgtccaatacgttgcctggga

SEQ ID NO: 680106 - DNA, 920 bp, Homo sapiens
  misc_feature (367)..(367): n is a, c, g, or t
ccagacgttgggagagtgctcgtaatcgccaagaatcggagccattctgaccaatggcgttatcaccgcgttctggtgcagaaccgtggcagctaacaccctgaacatcactacgaatttccatacgcacggctgagcactggtatacctggcagtcggtatggttcggtacgtgaccacaaattccgggcgaatgccggcatgttcaataatgtactgccagcacagaccgtcgcagtctctcttcctgcaccgtaccggtaaccagcagggtatattcatctctccagaccgaggctctttaatgattttaccggcaataaaccatagaggccatgccacctatcctggtcggaagtaccgcgancaagcaagtcagttcagtcagtctacccatgccttcgtacggatcgaagtcccagatcctgatgttcgccaatgccgacggtatcgatatgacgcgtacattgcccaccagacgcgggccgtggccgatataaccgagaacgtctgcccatcggcatcgctttcaactttatcccaagccgactcatcaaccatctcttctactctcatcccatgtcactcacgcgtttcctcgtcgccagccactccactgccgcaataccccaccatgacggcacaaggcaagccggacaccatcaatccgcctggcataacctcacagctccacgtacaaaccagccacgaatggcatatccctaccaacatcccctccacacaacagcacaccccgcctctgccggcgacagcccacaggggcaacagcgcacacggcgtcgcccccccaaacacgggagacaccagcaggcgcccccccggcgccccaccacgccacaggtcaccctccccccgctcgcccagggacacccgtcggaacccacgaggcacaccgcaaa

SEQ ID NO: 680107 - DNA, 194 bp, Homo sapiens
ggatttgctggtgcagtacaactaggcttaatagggaaagttagatgggtgtggtggcgcgcgcctgtaatcccagctactcgggaggctgaggcaggagaatcgcttgaacctgcgaggcggaggtggcagtgggcggaggtctcgccattgcactccagcctggacaacaagaaccatgctccgcctcaaaa

SEQ ID NO: 680108 - DNA, 1057 bp, Homo sapiens
tgggcactaacaaaacatgcttatttgataaaaatgtgagtggtaaagggggtgacaacaaggggggcagggcaaaagggtgcagtgttggcaggtgggacgcgggggtctacatagctgggaccgggcccgggggggtgcgacgtctcatcagagcacggatggaaccacgaggtcaaaattcccgaaggtgggcagtccttggtaaaacaagatcattggttttcccaggtgtagacaaagaggagccccagagacctgatgtagagatcggggggcagctgtccagtgacatctagggaagcccagcccccagcatgaagcaggaactctgggggacagtctagccttgtggcaaatgccagcacaagcaagcagcctccgaataagtcccatagcttgatgggcttctaaaaatgggcatgtcaagatccagaatctcaaaggcatcccctcttgggctccatcatccaggggtcgacaaacacagcaagaagcctaagtgaacagtctagattcacacaccttggctaacagtttgcaattgattttacaatatcctcagttcaagaagaaaacatagcgggaggcagaactccaagggtaacgaacctatcccagaagttgtggggcactgccactttcgggaatggcttctagcgccagtggagccccaattctcttccaggtcaacacgtaaatctgaggaaaggtcaccagaagggcccccgaaaaaaagtgcaggggccaaactgtagagtaagcgggccatggtacagctgctggggccctgtggaaaccccccccgagagggccagtgtacacacagagaaatcctcaaacccaagaaagcaaaagggcctgaagcgcgaccagacccaaagataaagggaaagcccccacatccacgagaaggggcctacaacacacaaggggtcaacaaaatcacggaataaagatatgtgcggcacacgacacagggagtaaatcggtcaaccccgtgcagacaagacaacaccaagagtgtgacgacaagggacagaaaaccctacctaac

SEQ ID NO: 680109 - DNA, 1269 bp, Homo sapiens
gtgggcggacgcgtgggctgtgacgcgctgggcagctccggaggctgcgcgctgcagaagctaccgcctgcgcgagtaactagcaaacatgctacgtcctgtgcgcgtatgctagcgcgcccgtggtcctgcgcccttcctcgcgcgaggccggactaggtactaccaccacaatgcttctggcgttccatacttatcacttgcctcgccaaggcacacttccactggccatcgtacaccacctcactccttcacaacagcacctggcgcacctgcctgagcatgctccatcctactccgtctgcacacgcagaccgtaattccttgcgcacgcctgcatacctactagcttcagatcctatcgcaacacgaacactatggggacgtagtacttcacagtcatttgcgtcagcatacgcgtaatatagcccgctgccgcttaccataggggacttcgacggcgaactcgtttccgaactgcaaagcacacgacacacttgcgtcacgaaccggtctatctcttacccgagcagaccatctccacacacgggcgctcaattgcctccccctttgccgacaactatcgcgccacaccccgtggccaccaacagccgctactcgcgctcagcatcccgctcaccgcatcaatctttaccgtagcacaccacttggcacttgccacacccccaacagctcctacacgcggcacaacccgcacgacaccctacctacgcattggcacaaccgcaaggccgcaaccacggagcaacccccccaacactctgaccctgcgcaccccgggaaatgtaccccacagacatcctggactcgacgacggcaagacactgcctcacagcgcgacacggcatggctaccgactcatcggcactatgccgccccaatatggggaccacaacattggccgctaacatatccgagtcggcggcacaaacggcgcggatcccccaacaacttgcggcgactttctcccacaacgcaaaccggacgagcataagccgagcccgcaacagtactggcggattccgttggcaaaaaacggtcgcccgccccgaggcacaacttcaactgtcccccttcccgccagccactatcctccacagcatcgacccggcgggagcacaaaccccgacaacttgggcgccaccggaacgctagggaccacaattcacaacaagaggaccctcgacagccgaacacatacgccactctcggaagtgttgcccacagcattcgaggcaccgcagtaca

SEQ ID NO: 680110 - DNA, 358 bp, Homo sapiens
gctgcggggctccgtcagctccgggagcgcactggcgccgcggcgctcgacgctccgctttcccaccgcccgcagctgaagccatcccgcagcccggcgcgacctccgatcgccgcagttgccctctggcgccatgtccagaacggagcgccgggatgcaggaggagagcctcagggtcctgggtagaactgccctcacgaataatgggaacgggggcagcgttcagcctcggtttctatttataatggagacatggaaaaaatactgctggacgcacagcatgagtctggacggagtagctccaagagctctcactgtgacagccgagctggctcgcagacactgtaagatacgaac

SEQ ID NO: 680111 - DNA, 252 bp, Homo sapiens
tctagagatccctaaatgctgtctcatgtatagtaacaaacaatgtaagggatatggtttggggaaaacttttaaaaatggcttatctctataatacagagttataatataaaacatggtttaaaagggtatatttttcaagcatggtaggtagctacactggaattctggttgaaaaaacttttctatttaagcttataggatggaaatatataattaaagtcttctgatccatagcttgagacagcatat

SEQ ID NO: 680112 - DNA, 719 bp, Homo sapiens
ttgtcctcccgagcgcggtacccgctgtgccccaggcctcgcgctgcccggccggagtcctcgggtcccactccctgggcgctggccctctccgcgagtcccggtgcctcgctcccgcgcgcgcctcttctcggcagtcggcgcgcgagagatggcgccctctcgccaggtcctcgccagtagggctgctgctttgccgaggatgaacggagactttagcgcggtagacgtgcaggaagaatgtgtctggtagaaaactaacgaagctggccgttagactagctataggatggaatcacataatccgtcgaatgccagtgtactatcagctaggtagcgacacaaaatgactgtcgatcttcgcttccaagcctggtctgcccaaaatgttcttggtggatgcaaggacagcacacatcgcacaatggctacgaaacacgttgggcgcaagaagcagccacaaaccttgaaggggccctccagagacaatagattgggcttatgatgcatcctgcactggcgatgcagagccgggctctttaaggccaagcagtgtcaacggcacctccatgtgctggatgtgtgaacactgctggggtcagaagaacagacaaggacactgacaataacctgctctgagcgagtgagaacctactggatcatcatgtgaactaaaacacagaagcaagagaaaaacgcttatgatagtaaaagttgcg

SEQ ID NO: 680113 - DNA, 787 bp, Homo sapiens
agcagcacgtgtctggctgtgccccagctgctgaatgacaccaaaagccctcctcatcgtctctgagctgctggacatcgtaggtgggggcaaatagacttgggggcagctaagaatgtgtggagacctggttctgttcctcagttctgtcccatgccattccagaggctctggtgatcctcccagagtctctgtgtagccacctgcgcaacaggagtgcaccacactccaggataacggggcggcaggctcctgtgccctggtccccctgggttcacacaggagtgccaggaggtagcctgctctagcagttcagggaagatcggtctctgcagagtgtggagagagttcctgcccatccatacagctgtttttcaaaagccacctccccaagaaaggtttgggggctcctactggaagcagagccatgaagaatcggtttctggtgctgggcctggtggctgtggttctggtatttgtcatcatcggctctgtatctggttgccctacacctctgggaagcccgacacgtgtacctccagggcggggtggcacgacgccaagcgctgctcagagatggcacgggatatcctacaggaaggtggttccgtggtggatgcaagccatcgcaagcctgctgtgtatggggctcatgaatgccaccagtatgggcatcggggcggcttgttcttcaccattacagcaagcactacaggaacggtgaggttatccatgcccgtgagttacctccaggtggcataccacttgtcacaactccagacctgag

SEQ ID NO: 680114 - DNA, 317 bp, Homo sapiens
cactagtcatctggatagatgcggacggcacgtgacttcactgagcgtagatgatggacaaggacctctcccactgtgagaccagaacctatgagttcacactgcagagcttaagcccacctctgagcctgggccagtgggctcctgggggggccctgccttgaagggggccactgtggcacaggaaaccttccttttgccataactgcatttggactggcccgtggccttgggccaagcaatccccccgggattcaggggccccttgtgggtacttggcgtgtaaacccaattttggtgtaccccaatttgcccca

SEQ ID NO: 680115 - DNA, 149 bp, Homo sapiens
ccgccgccctggcagtacttatatttttgtaaacatgcctgcctacttacttcatctttccctgccccacaccataggccctttgacgccaggcactgtagctgtctaccactctatcctcaccccacacaatagtgccgcatccaaag

SEQ ID NO: 680116 - DNA, 187 bp, Homo sapiens
gtatgcagaagaacgtggaagtgacatgactggctgagtcttctggtcttcatctttctcctgtgctggatgcttcctgccttcaaacatctggactccaatgtttttcatgctatttggactcttgtgacttaatgtgattttgccatgtgtactctgtgccttatgtgccacatgacttgaagac

SEQ ID NO: 680117 - DNA, 236 bp, Homo sapiens
ttggctgggttacagctgattttatatcattttatacgaatcatgaagttacaagacgacagaaacccacagcatgtaatgtatactttggtttggctagcaaggctggcacatctcgaatgctgtgtgtgtccaggatgtgaaggacggggtgacttctatgtcctaggtttattcctgttttaacagattgacaatcggttcaaagaattaagctttgcctgaagtgtcaacgt

SEQ ID NO: 680118 - DNA, 774 bp, Homo sapiens
cttggaggctgagatgtggttctgcgcgtgtgcggacggctgtctgttaactccgcggtcagttcccggactggtggctggtctgcagggttgacctgcgcaatgcagagtgctgcaggtagtgctgggccacctgaggggtccggccgattccggctggatgcctgcatggcctgcgccttgcctgagctgtgtgcccctgcatggcctcgtgccgctggactgtggttggtggttgcacgtggcggctgcactggccatcttgcctgtggcgggcctgcggctgtgcttcaatggacaccacccccgacgagcttctctctgtggcagtcatgaccgcaggttctcaaggcacgtgaatctgagagccggaacagctgggggacatctgtgtcgtgacatcccggagactgtgcctttgtccactgtcaatagacagtgtacgtacggggctacaaggcagatggccagcatagacagggttggagtccatgtccctggctagacagagggaaccctggaaatattaccttcgcgcttgatggagaaggagaacggccagagatttgcctgattcctatgggggataacctctgagaatgtgggatgagaaggtatggacatttacacgggagaagcaaggatacattagccctggtatccaagagaagtgagtgctgataggggaggaatgtaaaaagggactgaagagtgagagaaagaggttatataagataggtatgaaaataggacaataacaaggttactgatggg

SEQ ID NO: 680119 - DNA, 181 bp, Homo sapiens
  misc_feature (37)..(37): n is a, c, g, or t
ggttaaaacttggaaatcacagagcacaaatgtgggnctgccttaccggaagtccatctgaagccgtaactagggtcacaaacaactttcgttacctatgtagtaaatatacgggacggacccttcaaaattcttacgttatcttttcttcaaaaactggtaagagtcgtggtcccaaaaa

SEQ ID NO: 680120 - DNA, 952 bp, Homo sapiens
ggaggcattgaggcagacagcgcaggggcttctgctgaggtgggcatgcggagcattgaggaaatcctgcagtataagcttttttgtctctttgtaaagatagactatttaatacggaactacttaaaataatatacgctcaataggttactaagatattgcttagcgttaagatttattaacagtcagattttatatagctataagattgtaagaagaaaatatgtaagagttagaagagtagccatgagcgagaggaataagcatgagataagtgtttcttaaaacaattgacggagcgttgagaatgatagcttcttcatggagttaataaaatgtcatttgaaaagaaaatcgggagaaaaggacttagaggagcccctgaattgaattacccaatgaagaagggcaatgcttatgtagattaaaatgtaaggtgacttaaactagggttaaagtattagtttacacaagttgtaggtgatttcaaataactttgaacgcgcgatcttttaaaaaaagagattatatcgatggtgattttcaagaccttgagatccatgatgcaggcagatttgcgtcatttaagatgcctatttatcgcatttacataaatggcagacgaaaatggcacatgattaatagtgaagtggttgtgatgaacaccatttggggaagattgatagtttgaagtgccaaaagtgggtagaagcagtacgggaaggcgaagaaagagcattgatgaaagaataggagattgaagattagagtcttgtgaggatacgggttagttttacctgaagttgcataggataaaggataggagaactgacgttagggagatgttaactggaaaaagtggcagtagaggataaaattacatgtgggcctgtgcatagaagaaaaagtgtgcgcaaaaataacgtgtagaaataattggtttaaaatgtca

SEQ ID NO: 680121 - DNA, 826 bp, Homo sapiens
gatccgcttccggttcccagactgaatggtcagtgagcggagtctgaggtcgctgtggactgcccactgattgtgaacacaaatgaggtcctctttcatagagtacctgacaggtggctgtggatccagaagatgtatagctaaggcttgtgccgtgagatggacagccggatccttatgatgactacccggtgttttctgtgcctgcctatgagaatcctccagcatgtattcctcctcatgagaggggtacaccagccgggattacaaacaatgagttgacccagtttctggcccgaaaccatcacactgaagaagcctcctgagctcagttgggattaaccatcggaggaggaaaggcctcccagtaggcatcttcatctccaaggtgatgcctgatctgatgcacatagagcaggactgcagaaggggccccaagttctagctgtgacatgactgtgcattccacgatatgtgagcacagcaaggttgtggagatctctggcagacagttcgtgaaactcagcatttgcgtgtggggctttttgccctaacaaattatcattcgccaaaaagagaggcctggtgccattaagaaagtggacgcccaacagcctttcatgttggattctggtcattgacttgctaactagacttcatggggcgccacttctgtttcacggcctccctggaatagtggtggacgatgggacacagtaacaatgttaccaacatttggtttagtcctagtctcagtggctcatcctaaggggaggtgcactaggtacaacgttgggctgtgaacaccgattggattggaacctaa

SEQ ID NO: 680122 - DNA, 409 bp, Homo sapiens
ctctaatgaacagtgacagtgtattaatgatgtgcgtagccagcattggctggcatattcttgctcgtatgtctgtgtaggctgaccctctatatgttcacacacgaacctgtatagatacacgtacaaactatatatccttacaaccatagatttgtatgacatgaccacaatacagatgatcgttctgactgcaacactgatttaactactacagatcttgagatatcgctaatactgctactcatgttctttaccgacaatgagcatccctgatcatgtactgcatcgctgccatgtgactcaagtctgctctactcaggataattccttagtgcatggcactatgcctaatgtgattccgtagactcagactcatgaatgcttatgagcatctacgtcatgcctc

SEQ ID NO: 680123 - DNA, 324 bp, Homo sapiens
gtaccgcttacccttactgggtgcatgtacagagaaaaggcagttagcatgatccaagggtggagtttttgagcctctggcctcaaaaggtgaagcagaggacatgaaaagcctcactgcgcatcctctgtagactggccagaaccactccgtggttggtggtctcctattaggaaggaatgctggttggtggttgtgaggaaaccacaagagggaggggcaatgtcaggaggttggtttatattagcagtggagcaagtaaaaaggctggtttctgtttaacccttaggaaagaagcctaatgctgggcagtaaggggtaagg

SEQ ID NO: 680124 - DNA, 251 bp, Homo sapiens
ccttcggcgcgagcacttacattctctgaaagaaaaaaaatatttttttaagtgtcataagcatttaattaggattctaacttcaaaataaaatgctctttgttttccaagaattgaatcttagtaaagttcacccattctgacatttaattcaaaatgttacactttacacacagtcggcatccaagaaaacaatgatcatactactgacaatcccttttcaaaagtcaagttaacaaaggaggcagaga

SEQ ID NO: 680125 - DNA, 776 bp, Homo sapiens
ctaataaatgtcaaccaacattgacattgtaattgggtgattacaataaaaggtgagcagttggtgtttattaataattagctttgcaggtaatgaaatagcagggaagtaacatgctgctttaggactaaaaaaaaaaaaaaaaaaaaaggaatggaaggtttaataccttaatggacccagaagacctagatttataaaggccatataggaataaaaattggtaatttcctgggttttcttccccagaattatattttaatggactccataaattactttccaaattattcaggagattctgaagaacagggattcttaacaagttggtttaaaacttaacatttctttggggtggtgataacactttaattttataaacgtggcgagaacaggcttctctaaaggggcttatatgatatttttttaaacaggacaaggtagtgtatcaagggtgggtacaggtttctttaaaataccgggttttttgggaggaccaaagatttcccccttacgaggggaaataaatatttcacggccggtttttaacccattctttaaatttttaactgggggcttatagagacatatatgtgatggggcggggcgtatctctcaatgggggaaaatacccgtgggataaatccagtgtgttctaaaaagtaaaaaagggggggttaggagatccattagggggagagaaaagcttttttttcccgtgttaactggaagtggagaaggtaaaatttgggaaaatgtctttacactttttaagc

SEQ ID NO: 680126 - DNA, 465 bp, Homo sapiens
ccgcggccatgcagacaggcatgtcttcatatatatattacttaaattaatatatttacataatttttttttttggagacagagtctggctctgtcgcccaagctggagtgcagtggcacgatctcggctcactacaacctccgcctcctgggttcaagcgattctcctgcctcagcctcctgagtagctgggattacaggcacccgacatcatgcctggctaattttggtatttcggtatagatgggaggttcaccatgttggccagcccggttcttgaactcctgatctcaagtgatacgcctgccttggcctcccagagtgctgagattataggggtgagccaccacgcctggctattaacatattttgaaactagagccctttaccatattacacttttcaggtatggaatctcctaatgtatgcacccctgccagtctagatcgtaagggggatcctcta

SEQ ID NO: 680127 - DNA, 434 bp, Homo sapiens
acaccgccgaatgtcatacgtgtctaagcagatgcttaggcatgatcagaatgaagaggagacttgaggtgttgctagctgaagcacatccttgcaatgtgggagtgcacaggagtccacctaaaaaaataatccttgtatactggggcctgtttttaaagtcaccccgtaacaagggcacacatccaggactgtgtcttgcctttcagatcttaacagagcagcagggcttaacttgttgagtatggggattcggcgtgtgcatgcacacgccgagacaccaaacaagtcacgatggacgaagttgttgcaaatctcagtggacgaagttgttgctgcacacgccgaaggcccagaccgccgcaggtctgaatggacgaagttgttgcgcaacaacttcgtccatccagacttgcggcggtatgggccctcgg

SEQ ID NO: 680128 - DNA, 182 bp, Homo sapiens
cttcccaggctgcagtgatctcccacctcagcttctgagtagctgggatataggcatgcacgccacgcccggctaattttgtctttgtttttttagacagagtttctctcttgtagcctaggctggagcacaatggtgcaatcttagctccctgcaagctccgcctcccaggttcaagtgat

SEQ ID NO: 680129 - DNA, 513 bp, Homo sapiens
ggtcagcatgcgttgaaaaataacaacaaaagtgtaaaacgtgtgctcgcatttcgagggccaaagagctacagtaatctatgcccccagagggcacggaagcttttttaaaaattgagtgtaaaatctataacgcatggagtgcatgggcttaaagtatatgaggttacggtaaatgtgcaattccatgtgaccaccaccccagtgaagacacatttctatcacgccaaaaaagttcccttccaattcttaacaatcattccctccatcccaccctgacaaccaatgtgtggattttgacaagagagattagtatggcttctccttgcagtttgtgtcacgggaacataaagtatgtcaactgttgtgtctggcttctgtgggctcaacatattttcttaaagattcagccacgttattgtgtgcgacgtagatcattctgttttgatcgctcagaagtagtccgaattgtctgaatatgccatagtctgtttagccattctcctctagatg

SEQ ID NO: 680130 - DNA, 220 bp, Homo sapiens
ccccccccctttaagggggggggtttttggggggcccccccccccccgggcccccccccccccccttttttttagggggggcccccccccgggggggagggggggggggcccggctttttttttttccccccccggggggggggggggggttttttttttttttttccccccccccccttgggggcccccccctttttcccctttttttgggggggggga

SEQ ID NO: 680131 - DNA, 298 bp, Homo sapiens
ggactgaccggaggcttcgccctatatgagccctcgcccatgatgatggggctgacggagaagcacagggccttcacccacttcctgacaggcgtgcgcaccatcattgggagcatgtacacagagactgcactcatcgatacactcatctaccactcagcacgagccatacagagaaaaatcgatctaggcaggacatcgtagccaccctcggagctacctctgactactgtatctccctggcctgcagctgtaccgcagcctatgccaccctccaccttctaggacagccacagcc

SEQ ID NO: 680132 - DNA, 142 bp, Homo sapiens
gaacgacacttatccccacctgggctatcatcagcccgatgaggcaaccagccagaacgcctgaacgcaggcgcatacttcctatgctacaccctgagtaggctcccttcccctactcatcgcacggatttacagtcagaag

SEQ ID NO: 680133 - DNA, 862 bp, Homo sapiens
cctgcctgaattttcctggactcgtttttcccggatttaaagggaattttccccggatattttacggaactttttgccggattttcaagattggctcccttctgtaatcacatatggtaataggagttttagtctccaactggtgctcattagaagttatcctgaataagctgtttatcacaggcatagattaaaatttttgtttcaaagaacatctccatacccttaggggtgtattgtttcccacctattaagtcagggtggataaattagttattataacttaacatagtatagtcccacattcgttgatccccataccggccaaccacctggtcaaccctttgaagtagaagaaatgaaaattacttgaccagatttaaagttaaaccatttaaatgttttactgaaagtttatatagtatagtctaagtagattaaaagtaccccttgtcttttctgtgaattatgactattccatttgttaaaaatacctaagagccaattatagtgggacaatctaaggtcctcctgtaaaccagtgaattacgccaacctccagcctatgtgtttctaccccgatttttttcttttcatgggtatctgaagcctctaagattttttccaaaaatgggagtatccaccaaattggagtgaaaccaccaataacttaatgtattgtactagattgcccaattcactaaaatgttaatggaagctttttgatgtgagttataatggcactattctggtcacttatcctattttgattttatttaattttttaaagttgaagaattaaatattttaatggttctaatcttttgcattccatgttgcattaaacctgtttatatgagta

SEQ ID NO: 680134 - DNA, 473 bp, Homo sapiens
tttcatggtagatccagctccagctctgtggccctgtggttggagaccgctgctcaagtgcatttgaaaggaaccatcccacgccattcttcagagtcatctttactgctgcagtggtcaacttgtagcacccctaagcttgcaggacatatgcttcaactggcatttcacaatcaacagtatgtggcagcttgagtcattgtgagctcacttcctgtagtcccagctactgggaaggctggcatggtaggattgcttgagcctgggagtttgaggctataatgagccatgataggaccactgaactctatcctgagtgacagggcaaggtcctgtttctgaataacatgttgcccagtcagtttctcttcttggattcagaagtctttcatggtaggtccagctggactatgggtgctgagtgggatttacttgtccatccattttctatattccagcactgggaaactagg

SEQ ID NO: 680135 - DNA, 150 bp, Homo sapiens
cacgccgtaaagtctacatgacagggtctttcttatcaagccaagtacgggcaaaaagaagtgagttcatgctatgtgtccataaacagacgaggacaacggtgatctctaatccatatacaatatagagagagattttcagaaatgagc

SEQ ID NO: 680136 - DNA, 226 bp, Homo sapiens
gtgtgagcaccgtactggccaaaattacataagttatatattgtgttagtcttttgtgttgctatgaagaaatacctgaggctagatgtttaaagaaaagaagtttatttggctcacagttctgcaggctgtacagatagtatagggctgacatttgcttctggggagtcctcaggaagcttatcatggcggaaggccaaaggaagccagtctgtcacatggcaag

SEQ ID NO: 680137 - DNA, 117 bp, Homo sapiens
atggcggcatacacaagaaggtggccaggaccatcggcatattctagtggatacgaggaggcggaacaagtacacggagctcctgcaggccaactgtgcagcggcctgaacggagta

SEQ ID NO: 680138 - DNA, 181 bp, Homo sapiens
cttacaggtgttgtgggtagggcgattgggtagtcagccagctcagactggagtctctaggacacagtgtcaggctggcagctggcctggaatgggggggcctgggaagctgagagcactagccttagtgcctcgtgccagccgtggccctctgctggaggtcctggcctgttcagcaggg

SEQ ID NO: 680139 - DNA, 940 bp, Homo sapiens
agcggggcttccggtgctaggtggagggaaggaaggagggagccggggagtgggccagtgacagcagccgggctgaagtcggcttggggagccagagggagcggagcggaacctgctggggcagaggcaggcggactgcagctggctgcagctgatagcaggaacaggatcaagtcttccataccagtggaccagtgccaaaacgagactgccagtgcacctacattgtggccccactgtccccagacatgcagctgctgtgatcatggcgcaatatctttggaagacttctcaagagcctgattgggaagaaggagatgcgcatgctgatggtgggcctggatgccgatggaaaagagcaccatcctatacaagctgaaactggagggagaatcgataacaagatacgactaacatatgaggtacaaatgatggagaacagatggagtactaagaaacatcagacttaacagtgtgggatgtggagtggcaggaaaacgattcgaacgacatctggagaccagctagtacacaggaacacaccaaaggcgttgagtattagatcggtcgaccacgcaacagaatcgggggacggcgacggtacacaatgacgagcaccggagacagaagccgggcatgcagacaatgcatcagcggcagggaccgaagcctccgggggatgcagtgtaacgaccctagcgcctaagcaagagaaaaaaaggggaattctagacgtacaagtgcgaatgaccgagcaggcatgaagagtccacgcgaacacagaattggagccaatgggaagttacccacaacaggacacacgagacagcattgggtaagctcacaggggccaagcaatgtggcacacaacggagtggcacgagagcatgtcaagaagcgcaatgagagaggaaggagcacaaaaacagacaagcacacc

SEQ ID NO: 680140 - DNA, 223 bp, Homo sapiens
tgcctcgaccggcttgcagtattcacttggtcgatgggttgtacccgtgcgagaataatgctgtatgctttgtttctgttgcgtgtgggttcgtacctggggtttgtggggttttcttctaagccttctcctatttatgggggtttcagtattgcattgttcagcaggtgtggtgcggatggacacgccgcgggttcaacgccagcttgggtaccggagctcg

SEQ ID NO: 680141 - DNA, 348 bp, Homo sapiens
gcaacctccgccacctgggctggagcaattcccctgcctcagcctcccaagtagctggaattacaggcatgtgtcaccacacccggctaatttttgtatttttagtaaagagcgggtttcaccatgttggccaggctggtctcgaacccctgacctcaagtgatccacctgccttggcctcccaaggtgctgggattacaggcttaagcaccatgtccagccagccaagtatttggttttaaacatttgtatttccttgtacagggattgtattcctctgtacagaccttgaagcacctctgagaaatgaggtcttgtgtagcgcaacctactgcatatattgtccta

SEQ ID NO: 680142 - DNA, 208 bp, Homo sapiens
caacggtgttacatgatcaaaccgtgtacagcttcttgtgtgacctgtggattaccaacatttacccaatacctaaatctcttttaaaaaagccattttaaatatagccaagcagtgtcttcttgcacaacaaagtgaagaaagttctacagagaaatagaagttttacatttgtacaatctttttcacattctaatcctctagctta

SEQ ID NO: 680143 - DNA, 256 bp, Homo sapiens
aaagaagagaaagagtcggaagacaaacctgaatttgaagatgttggttctgatgaggagaggaaaagaaggatggtacaagaggaggaggaggagattagggaaagtacatcgatcagaggagctcacaaacaagccatctggaccagaatccgacgttatactatgaggagtacgagatcttatagagctaccatgactgggagatcactggcattagcattttcagttgaggacagtggattcagagccttct

SEQ ID NO: 680144 - DNA, 335 bp, Homo sapiens
  misc_feature (6)..(6): n is a, c, g, or t
gtttgntacgccaaaaattttggccccacgggtattgggtttggagcccttccccaccaagtggaaaagaaagaatgaagaggtgcgccgtttttcagattttttgcgagcctaaaacccttgccaagtaatcctgcacagatggatccctttccccaaaaagcctctcctttgtagtggtacattatgtgtttctcctcaaaagtgatcaggtctttactgaatgttaaaagagccctttggaagaaaattatgtaaagtttaatctataccaaatgctttattatttataaggcttggaatgggagaggcaataaataaatgttttcgggcta

SEQ ID NO: 680145 - DNA, 129 bp, Homo sapiens
gtgcacttatgctgtagtgactctttaggatccccgagtctgggtctgcattgaacagaaagaacaaaacaaggaggagaagacaagctaaaaatgattcggagaatatcggcataatggttgagacat

SEQ ID NO: 680146 - DNA, 1089 bp, Homo sapiens
cgcccaaaggctggaggccacgtccggggtgtgtgccttctcccgcccggtgccctcggctctcaccttcgtggcctccggggaagcgtccccgctaggggtggggtcttgtggactccctgtgtggcttcctggagctgacccgtggggggtctgctgccctcagttcctgctgaccgaaagtcctgcctggatctggcgcctactgatggaccgtggccgggtgtgatgctcagaccggtgggctcggtttcaaccttgcggcattgggaggcctgaaggggtcccctgtggacccgtctgctgagtggacccgggtgtaagtctaacagccagttacctgccatgttgcctcttgggagctcggaacttgctgatgcccacggtgctgctgagctgcctgttgcggcaagaattggaaacagtgggccctggatcatcaggattagaggtttcatcaagggtgcggacacatgtggcagggcttatgccaccagtatgagttgtaagcatgtcaatggactatagacggcgtgtgatgggagtgtacgctaggggctactaggagggctgggtggagggcttggatacaggaagcagtatttcaaagcaagagacacggatcaagggcaagggggcgcagtgagccgccgtgacgcttactgaacagggcgaggacaggggacccagattgaggagctccagggcagcacctagcgtcgtaccgtctacccaagaacgaaggcgcactatgtcccaactccgtcatgcgaacgttgagggcgtcccgctcacgtttgggagcacctcagacgggacccagcacgccggcagcaaagctgggcagtggaccacaccctttcgccccaagtcccagtgggcacgggcaagctgacaggccaggcgggccgttcagcggcccacataggccaacagcacagcagttcacgcccaccgaacggcaggaaaccgaccacaacgaacggcccacccgcagacatacgggcaccgcacggtgcacaatgatgggagcacaacaccaacaccatgggacacatcaacacgacacaacggcgattacaacacgca

SEQ ID NO: 680147 - DNA, 413 bp, Homo sapiens
ctcccagttacatccacacggggatctacaggtttcatgtggacatactgacagttgaactcacaccatatatggaacatccagctatctacaggctcggtaggtctctcgcctctccctatatgtcctcccactcatggacaccatacacgggtgcgctcctctagctgttcataggtagatgctctggtatcgggggtctaagctatggctacccgcgcaaagtgtgatctcgctatttccttatacacaaggcctcggggtcagtccctgtgacatgacgctcggatataacggccgatcgccaccgtgcggcactgatatatagtgccccaggcttcagtacctatcgcggacacggcatgtgggtcaatggcctcgctaagcgcgcatagtattaccctcgagtggct

SEQ ID NO: 680148 - DNA, 691 bp, Homo sapiens
atttctatcatgatgagcttcaatctccgaggcctgtctcagcgagaggtacgtggctccgtttgattaatttgttaccgagcttagacttattgtgataaaatattgcatgttgtattttacacgtcttaagtcttaagcacagtcagaattatcttaatgttagagtgataattgtggtcttttaggaaaaaaagaaacaagagatctgatatttatttcaacaccgtattggaaggcaacgaaacatattacactattggtgccatagtgccaacaaaggtctttcctaagatactccatctggtcatagtacctggtatggtcggacatattcggagttctatttccatacttgaaaacattggacggattccagacgatgcctgaaccaatattattcacgtagctatgtgaccgagctataacattgccgggtcctcggtctcaagtacgattacaattggggaaactgaccaggaccaatgtgctcaacggttaagcattatggtgtcaaaaacctttaacagaaaacctgttagaaggccttagaacctcacgcatattaagtgttgagaagtctctagcttaacttttacacatggtttctataaaagggtataatggtatgaaactagaccttttatatagtggcatatgtataggatagtaatcactattaaacgtatta

SEQ ID NO: 680149 - DNA, 359 bp, Homo sapiens
gttatgcttaccaggattgttagttcttgaccaccctctggttccgaggagcagagactttagaaatggggaaaatgggccgggcgcggtggttcacgcctgtcatcccagcactttgggaggccgaggcgggaggatcacaaggtcaggagatcgagaccatcctggctaacacggtgagaccccatctctactaaaaatacaaaaaaaattagccgggcattgtggcgggcgcctgtagtcccagctactcaggaggctgaggcaggacaattgcttgaaccaggtagtcgggttttgcagtgagccgagatcgtgccgcagcacaccagcctagcgacagtgagactccatctcat

SEQ ID NO: 680150 - DNA, 773 bp, Homo sapiens
aaatgattgctgatattttaaaataaagggtactatatgttcctaagcaattaatcagtgtgtttttgccacatgagaatgaatttaagctatagagggaaaatagaatttagagtttagagcccaagacagctgtattcaagttctcattcctccacttagacaagtggaggttaaccctttgacttctgcttccattgctgatgaaatgagaatactcactacccattggatcatatgaggattaaatgaaatgaagcacataaagcacccacacatcatttctaccaatgaaaacagttatgatgctcaaagaatggattaacaaaataatcacgggcaataaaaatatccaaattagatgctagaatttcaaatttaaaaaagtttcctaatattacaagggatgagaagtacttatcagagtttcaatttctttcctttctttccattacaataggtctctatagactttgtctagaaagggcaaatagtaaatattttaggttttactagccatatggtttctgttgcaatatgaaattctgtgtttgtgatgacagcatagacaataggtagtacgtgacaggtggtgggtctgattaaacactcacaaagcagatcagctggatttggtgtagggcatagatttcgaaccttgctggaatttccaacattcctaacatctcgcagtgaaatacgcttgaagttcagaggagaggctcaatctctgtggccatacaaccttccccaaaattctctcaggtggcggt

SEQ ID NO: 680151 - DNA, 1293 bp, Homo sapiens
  misc_feature (344)..(344): n is a, c, g, or t
  misc_feature (495)..(495): n is a, c, g, or t
cttactttctcagctctcggcgcacgtgaccaggttactcttggtacttagtagcaacttcggcactttcatctcttgacctcggataagttatccctagctgtgcgtggaccgatcagttgtgccatcagtgaatgcgttccgttcaaaaatgtcttagctgtgtcactgatatatgcctagtggcaaacgcttcagctttgggagggtgtcgatccatcatcttagcgaacccacaccataagcgtgtcaactagtgagagtctagtacgaatacgtcctagttacatataactttatagaattgtcttgaagctggtgattgcttgtttgtaacaacttgnaacatcgaggctcattcatatggactcgacatatggatgatgtgattgacgggttccactccgagttagatcgaatctaatttgtatgaacctaaattcatgccaagccaagagtagcgactaaggaatgaacctacggcatcatctgccntatcgtccgtacccacgaagaagggagcacaaaaaagggaacctttggcatttccacggcgaactttgaaaaggctccaaggcgcttttaattcgttgtgggcgccaacctcttgcgctaggaaaccgggtttgcaatttcttagcggaggccccctcaatttggaaacgaaacaacccttgtgctccagctacacttgcaccgggcattattctttgaaagccctgtaaaagaaggcctttacccacaatttggaaccatggcggggcggacctttggggaaacaaccccagagaaacggcgatggggaaccgttcctttcctttccaactttttggcaaggaattaccagtttccgttggactttccccaaggatacatccccaatacaccaaggtggacaggtctttggcccacgatggacacaacctttcaaaacgccaagggaagggttccctcacaccaacaggttggaaaaccaccttggttcaccaaataggcaacgtttggacttccttcgcgaacgagcaaaacggtggaacacaatttacctcttcttcccggggcaccaaacaacttcctttggggagtttggaaacatttttcccctgcgccaaaagaggcgttggaaacttgaagatttttggcccccccctctggtgggcacaagaagcggggtttctaagaacacagcacaggcacaggacagggggaaatgagggcttcactttgtgtccacatatagcgcattctcattcggagagacctctgagacatttttgggaacccccaaacaga

SEQ ID NO: 680152 - DNA, 301 bp, Homo sapiens
gaattacctattatccagcaatcttctttcgtggttatatacccaatagaattgactgcacgacctcaaacatatagtttgttaactcctgatcgtccagcactatccacagtcagtgccagggtcaacccccatcgcatgtccattgttggattaatggatcagcaaaatgtggtatatgcttactatagaatattattccgcctttagaggcaccgaaactttaacatgctatgataacatggatcaaccttgaagacgttgtgctaagttcaatactgaatgctaccacttataatag

SEQ ID NO: 680153 - DNA, 612 bp, Homo sapiens
cagaatcacactcaaaatacactgttggggtcagaaaacagtagcccaaaatgaaagcctcagaatcagcctcagaaacaaaagattttctttgacttttcatgccttcctgtctctcagtcccattctcccctgaggcttgccatagaaactagaattcccattctgtaggtggctcatagaaaccagaatctcttttccccaaagacagtcataaaacctaaaaatagtactctaattttttctccacccttctatgtaaaaactggccatgtaaaaaaataacttaaaaagaaaaaaagttacctgatctaccttgcttgactataggtcataagacccccccattccagagagggtcctgctttacacccagaaggagggaatgccactcagagaggccaagagaaatattgacagacaggccttgttgggtttccccactccatctattagcattagaacatgtccttttttgtccagtcgtatatcttcaaaactgttcgtactttgttgaacctaagcacaaaagtggacaatttcccctgaatctttgggtcttcattctgaaggtctctgtgtacacatgttacataaatgtgtatgccttta

SEQ ID NO: 680154 - DNA, 515 bp, Homo sapiens
acgataccgtaactagtccgtcactagtaaagttcatgatcgaaccgactacttcagtaggaaacaaatggtcgttggatgtccgttcaccccggcgaaggcgacaggtgcgctacaggacagcataatttcgggaaaaagctagcctgaaactgtacaagaccacaccggagtgtcatcttagtatgttggattcagaactcatttgggctggtggcaacgacaactggcttggcatgatttagtgattccctggattatgcagaaggaaaaatgaagcccaaacatagacttgcataggacgactggcgctgtcatgatgcaatgaaacaagacctcaagaaagcaacgaacaggaacgcaagaacagaatgaagaaagtcagggggactgcaaaggccaatgttggtgctggcaaaaagccgaaggagtaaaggtgctgcaatgatgttagctgtggccactgtggatttttcgcaagaacattaataaactaaaaacttcaaaagaaaaaa

SEQ ID NO: 680155 - DNA, 189 bp, Homo sapiens
caacgctcagcagaacgtgcgcggatagcgaagggggttgaacctggcgcgcggcgtttgcgctgacgcaaagcgatgattgctcaggctggatattcatccagccttttttatgttataagctttaccagcaacggcatggcagggcgccatgcccggtcattctgcaggagggtaaatgataggtcg

SEQ ID NO: 680156 - DNA, 259 bp, Homo sapiens
tctgaggctccctcttcgctcatatactctccaactatggctgatatagagtcaactggtctacaacataggaaatagtatggaataggggtcaggatcttgacacgaatttacagccaagtaggagaaatggaatgaatgtggaagggaagatgactattagacatttaggtagacagggtctttccactgttcaggatatccagacattctcccagaatggtatccctgaatatgcaggccaaaagaaaatgacttc

SEQ ID NO: 680157 - DNA, 508 bp, Homo sapiens
  misc_feature (15)..(15): n is a, c, g, or t
  misc_feature (43)..(43): n is a, c, g, or t
  misc_feature (54)..(54): n is a, c, g, or t
  misc_feature (73)..(73): n is a, c, g, or t
  misc_feature (80)..(80): n is a, c, g, or t
  misc_feature (130)..(130): n is a, c, g, or t
  misc_feature (492)..(492): n is a, c, g, or t
  misc_feature (500)..(500): n is a, c, g, or t
aagtaaaaagccccngccccctggatggttttggtttcccttnccctttttaanggcccctaaggatagtaanggagccncctggagcccttaagttttttaaatacaccggagggaaggtgacaaagantctttgcctgggccaaaactttagtcagactccctcaaccttcctcgtaggtttatctgtgcatttcccttggaaaatcccagttagaaccctctaccctcaatatctgatcaggttcctcatcctctacccatcccaaggtgatgtctgatcaccttgacctattttcagcaagaaacccctttactcctgaagttccttcttagtaattttttatccagtgaccccaagctttttgttccttggctataaattcccacttgcccatgctgtatttagagttgagcccactctctctctcctaattcagaatcccattgccatggttgctatacctatcctgatggtccggaataaaatcnaaactaantgtgcttt

SEQ ID NO: 680158 - DNA, 535 bp, Homo sapiens
caaaggaaaaaatacaacgatacaaccaggtctggacagttccccccgatatgttgaggttttagtttccccgaggttttttggggtggacgggagactctagaaaattaacagaaaccaccggtcaccggtagtcaatgggggatggtcccccctgcacggagataactagagatttggttgggtgcccaaccccgctaaaagcccaataccaaccagacacccatgcaatggcgcctcatcctcgggacagaaaacccaccggcagcatgcaaggcttgggctattaatattattacggttggagaggtcgaacacaaccagattccccaggaccccctagaacccccggattttctgggaaccgatagaacccatggaaggaggaaacccaaaaccaaagaaggcgcaacttcgcgagaacggggaaacaaacacaggcctgggggtgcccaaatggcgcactggaaaactcaacacgaactcccccaaaccaggaaatttggccagacagccccttcctcgcactccgcgg

SEQ ID NO: 680159 - DNA, 537 bp, Homo sapiens
ctgaatagtactctgttgcgtatatgtaccacattttctttattcattcatctgttcatggactcttaggttgcttccaaaccttagctattgtaaacagtgctgcagcaaacatagcagtggagatatctctttgatatactgattttctttcttttggataaatacctagcaatgggattgctggatcatatggtagctcaatttttagtttgaggaattgagctcaattttcaatttgaggaacctccaaactgttctccgtagtaattgtactaatttacattctcaccaacagtgtacaagtgttctcttttctccacatccttatcagcgtttgttattgcctgtcttttggatctaagctattttaactggggcgagatgacatctcattgtcattttgatttgcatttctctgacgtgattgaatgttaaacagcattaattgtcatattctgatgaaattttggaacatcatggataaagaaaaacatctaaaacactcttgagaaaaataaatcatattatctacat

SEQ ID NO: 680160 - DNA, 438 bp, Homo sapiens
attcaatagcttgcccatatctatcacgggacgtaggccaacaggaaatagaaaacccacattaaaaaaaaagttacagttcgctaaacgtttacctgaagccgaatctgaagtggagaggacgtcagtcgtcctcgtcattctcgtagaagtcatcgtcctcctcgtcgtcctccccgacgtaggacaccggagtctccaccctggagccgctgtactgagacccattgaagcttgtggccagcatcccatctgcaccgttggtcaggtcacttgtgccgttagacgtgaaacctgccgtcgtgatgaacacggcctccaacagttccctgaagccatttctgtcacgtatggctccagagccttggggaccagacttctggccatttaacggtcttcggcaaaagcaagttccccaaatccagcgtgctgatacaa

SEQ ID NO: 680161 - DNA, 339 bp, Homo sapiens
aagagaaaatcgtggtcatatatatattattgcttcccgttctcaaccagtacacattgttgccactgacgaaactgacagccaggagtcggtcgagaatgctcaagatttgttttattctacacccatgcctgttcacagggggtaaaaatcctaataaataacttatgatgtacttcttgatttcactcataccaaacacagcactactgctaccatccatgcctctgtgaactttggtcctgctataatgagacacgctttgcctccttcatcacgagcaatcttccgtcatcagtctagcgtgcctctgtgcttaagttagctccaataagagcc

SEQ ID NO: 680162 - DNA, 336 bp, Homo sapiens
  misc_feature (133)..(133): n is a, c, g, or t
  misc_feature (156)..(156): n is a, c, g, or t
  misc_feature (238)..(238): n is a, c, g, or t
gccgcactcttgagtccgaggccatctttttttggagaaggcgtcgcgtttggcgttttcccgaggttgggctgtacattgtctcgtccgcggaaaaaaaaagctctgaacccgcgccgcccgacaggccccnggctttcggccgctgctcgccgntccagagctaagccactttcccccagtgccgaggggtttcttgtgacccctcccctccaactcccaattcccttctgaaagnggcacctgctcttggtgagaaaagaaattatagcacgaagagccagtatcagaagagtatccatcacccgcagcaaccccttcgggaccaccatcaaa

SEQ ID NO: 680163 - DNA, 220 bp, Homo sapiens
gtcggcggtactaataaacattaaactggcaggcacggggtcatgccgcatccaccagcactttgggaggccaagtaggaggaccactgaggccaggagttcaagaccagtctgagcaacacagcgagaccctatctctatttttttttaaagaaaaaaaaaacattaaaattactttttccggttcggggctactagaaaatttaaattacaccggtat

SEQ ID NO: 680164 - DNA, 164 bp, Homo sapiens
ctctagaggaatcccctttggggctccattcaggacacctggctcctcagctgggggaccatggccatggcccaccacctggcccttcagtgttcaggcaggggacatgcaccctttagtaaccgggaggggacccatcacatgacaaccaccccaacgaccat

SEQ ID NO: 680165 - DNA, 381 bp, Homo sapiens
ccccactagtgtaggctgtgtgaaggctgggggaaaacatgtagtagttacactgtttctcacaaaacactgtgaggtatggaatacccctaatataactagtggagctcatctactggtgcatgccaataaagaataaacacccagttgttgttgttgttgtttttttttttttttttttcaccaaaaaaaacggtactgatagttggggagtccaagggaaagagataattcggaagttgagattaaactgcgcttaatttctctacttcgaggaatagtccaccatgttgtccccccaagttatctgcctagttcctcacagaggtgtactcttggggcccggccagaaggagaccgggaagacggggttgttccctt

SEQ ID NO: 680166 - DNA, 919 bp, Homo sapiens
aggaatcggaatccaaagggactttggaacagcgtggacagtaatccagaagaaaaggaaagtcaaatcctttggagtcaacagtctctgaagtcctatcactgcctgtcagcagagacgtgtagtgtctgacagccaaatgaggaccgaattgaattcaagcgccacagaatccgccctccgtaaagcccgcttttcccagcccacgtgcgtccaacaaagatgttaatcctgattgaagtttcccgtctccagatttgaaacgcccgctgaaaaggctgcatgtacctggttgagaagaatatgatggagcaaagtgataaacgaacaagtttgatgactgaccagaacagtatgctgtggattctttttctaaggatgatcaaaaagcagaaaatgatatggcaattgaaacgggcagctttgttggacgaaaagattaagaagggaaaaggaaactcagctccggaaacaacaggtgggaagcagacactggagcatacagcaaggcaggacacacaggcgctacaactgagcgaagaacgtcaggaagacaagacagcatgcacagagcacgcagagaactccattcaggcaagaatatatgagggcggaaacatactgaccactaatggacagattatggcatacacgtacgttaaaccccgatcctcaagtacgtaacaccaacaaaaccagggaacaacaattcttatcacagagatcataattggaatcccccaatacaccccataaagggtcctcccagtctcttaccctccttagggatcggttgaaacacgggtgataacgagaaccgtcccatcacggccacagaggcacgccgaagatcagacgtctggagaaaaggcttcttatactccacagtcccaggggcagtcgaaaatggcccaaaagc

SEQ ID NO: 680167 - DNA, 138 bp, Homo sapiens
ccccccctttttttaaaaaacccttttttttgttgggccatcaaaattaacttgggtttccccccctttttgtaatttttgtttttgtggcccctttttttgaatttttttttggtcttttacccaatttgagggcca

SEQ ID NO: 680168 - DNA, 131 bp, Homo sapiens
cgactcttgggatcccctcacgcacaaaccacctctcacccacaaacccctctcacccacaaaccccctctctaggctggcacggggaacagacgggagagggggtttgtgggtgagaggggccttgtggg

SEQ ID NO: 680169 - DNA, 357 bp, Homo sapiens
  misc_feature (225)..(225): n is a, c, g, or t
  misc_feature (257)..(257): n is a, c, g, or t
tagccagcgaccctgggagcacatccaacccccttctctccactatcctggggcacatccagcccccttctctccattctggtcagagtagcacccagcacagcaagtcacccttctttcctgaacaacccctcagccttcccctggacccgcctcgcgtgcccctctctcagcgaggctgctcctgggccgggcactgaagcccagcctagaaccacactcgancccccaaggcttcaaacacctctgccctccanccccacactcacatgcccaaatcccagaggccagctgctggcctcagactgcctgttcaaacgctggcctacagcacatgccggcatgtgctgtaggcca

SEQ ID NO: 680170 - DNA, 1248 bp, Homo sapiens
taactgaggaatcagtattagtccatgaggggtcctcaaacaagaacgacgaaaacatagacacagttcaccagagcatttcttagagctaaatagactttacagtttaaaggactctctttgacttctaaaatttacaaccgttcctaatccttgtggtgcttacaaatgccaattctctattcacaaacaggacttactgattcataaattggatttaccttaattatcaaggccttacttgggaacatcgtatagagagaatgtacaatcctcaaaagaagaacgagctagacaaagaataaccataccaaatctgcagagtttgactcaaggaaatataaggctcaatggctaataggggttcaacttggacaattcccaaaacacgtttagggcacaaagtcactgtgcctttcagaaaagcataccttaccgtgattgcttcgtcaatccaattagttacaccagtgggcaggataattaccgtacctaacagggaaacagaaatgcccaacgccaaggacaccacttacggccagtgaatcaccggaggggattgcacacacgggggtgacatatctacttttaacccgccacaatgatcccctaatgacatcaaatctagcctataccggtgtaaaaccagtttaaatgaccgcgaagcaaggcaatacctataccaagggcccgaaggcaaatgtggccgtgggcatcgggcatcacggcgcggatttaagttaccttacttttcaccccaacgcaaaatgttatatataccactttgatcccctgttataacacgcccattaagctttagtggtgccctgttgacaccgataccacacaaattattttttagcgcccaacacaaagttaagttaacgagattttcataattgatctcgtacacaggtgataaacaactgtctgtcccagaaactataagatgtatgacaataggaaagctaaattttttccaaacattgtaatataggtcggagagttaccatacaatgtataaaaggggaaaacgttgagagggttatgtagtagtgggcgtaatgggtaacaagacaaattagtgcggaagaactctatgaatgtggtatgaaaaacaacgaagacgacatgaaattatgatgatatagagacagaacaacgcaatcaatgtatcagaggagcacaacaaagagaaggagttctccaaaaacattcacgttatgacatacccagaataagtagatg

SEQ ID NO: 680171 - DNA, 319 bp, Homo sapiens
tcagtttttttatttgctttaagagttacataccatgagacacactgctttggtgtttttgaacttttggatgattgtgcgcagtgctcacgcagagcaagtgggtattgaacgtcccagatcgatgagccgaccactgagccgctgttacgcggacccctggggctgcttccggtgcaccccttcctgcagctgttcttctttttggtcctgacatttcagctctttttctaaatgtctgtcttcttgaaggctggacattaccttcttttcatgaccagaacctgaagagatttgtaagtcccactttgtctttctt

SEQ ID NO: 680172 - DNA, 121 bp, Homo sapiens
tgggcagatgaccagcggaagataaggctgagcggcacgtcgctcacccgtgtgtcgtactccacgcggcccagaacccaactcgcgagagccagaacttcacaattgaactacgggcagg

SEQ ID NO: 680173 - DNA, 1081 bp, Homo sapiens
  misc_feature (1)..(1): n is a, c, g, or t
  misc_feature (470)..(470): n is a, c, g, or t
  misc_feature (475)..(475): n is a, c, g, or t
  misc_feature (477)..(477): n is a, c, g, or t
  misc_feature (490)..(490): n is a, c, g, or t
  misc_feature (499)..(499): n is a, c, g, or t
  misc_feature (506)..(506): n is a, c, g, or t
  misc_feature (522)..(522): n is a, c, g, or t
  misc_feature (535)..(535): n is a, c, g, or t
  misc_feature (537)..(537): n is a, c, g, or t
  misc_feature (552)..(552): n is a, c, g, or t
  misc_feature (573)..(573): n is a, c, g, or t
  misc_feature (589)..(589): n is a, c, g, or t
  misc_feature (594)..(594): n is a, c, g, or t
  misc_feature (601)..(601): n is a, c, g, or t
  misc_feature (613)..(613): n is a, c, g, or t
  misc_feature (641)..(641): n is a, c, g, or t
  misc_feature (653)..(653): n is a, c, g, or t
  misc_feature (682)..(682): n is a, c, g, or t
  misc_feature (690)..(690): n is a, c, g, or t
  misc_feature (699)..(699): n is a, c, g, or t
  misc_feature (703)..(703): n is a, c, g, or t
  misc_feature (732)..(732): n is a, c, g, or t
  misc_feature (754)..(754): n is a, c, g, or t
  misc_feature (763)..(763): n is a, c, g, or t
  misc_feature (794)..(794): n is a, c, g, or t
  misc_feature (797)..(797): n is a, c, g, or t
  misc_feature (800)..(800): n is a, c, g, or t
  misc_feature (805)..(805): n is a, c, g, or t
  misc_feature (855)..(855): n is a, c, g, or t
  misc_feature (861)..(861): n is a, c, g, or t
  misc_feature (874)..(874): n is a, c, g, or t
  misc_feature (898)..(898): n is a, c, g, or t
  misc_feature (900)..(901): n is a, c, g, or t
  misc_feature (910)..(910): n is a, c, g, or t
  misc_feature (1022)..(1022): n is a, c, g, or t
ntaggagggctgccaggctcgcggtagagacacgtgtcaacttatatcctttttttgcaccgctaaactcttgtcatctgctgttttcttatttggtcacctcctcttttctctttgtcctatctatgcgcctcctcttatgttggttcctctctattaatatcactacgttgttttcttccctctcacccttggtgtagttatttcccccccccgtctcctttttaaccgccctgagtctgggtttttttgggtttctcaatgtattaatagatacctctccgaaccatgtacccgcttgggattcaaatctgtttctttggcaatcctcgtggaacacacccttcagtaacttcggccctgggacccacgggaatggatagcacccctgtctgaaaggttatgggaagaaatagttagatgaagccgaattttattttgatgtggatcctgataaaatatgtagagcncagcncnaatgctacttcanaatgcggtnaaattcnatctcgctgagtttcnagaagtgtggcancngagtgttcctgaagnaatggtaactagtcttgatcngcttaagggtttagcnctggnggataancactcgagaccngaaatcatatttttgctgaaagtagatnatttacctgagnataatcaggaaccttttaatacccttttntctctaangggagaagnggancagaagaagatattgctccatatattcanaatttgtgtggagagaaccaanccatagggnacattactcactaaatattctcgttcttcgnatngcnaaatnggtggttaaagtttataattcgagaagacccatttcttaaaagaacaacngtcttntcttcaggactcnagttgctttataaagttgctgganannagaaaaatnacttgtacttttatttctgacttttagaaacctagtcttctaaggcatttttctcctcatcttaagcattttgaaactactgttatttcttaaatgttataggatgtagctntaaaattatattttactatgtaccccagtgtaaacacaggaccaaagaattctttccta

SEQ ID NO: 680174 - DNA, 345 bp, Homo sapiens
  misc_feature (53)..(53): n is a, c, g, or t
  misc_feature (66)..(66): n is a, c, g, or t
  misc_feature (70)..(70): n is a, c, g, or t
  misc_feature (81)..(81): n is a, c, g, or t
  misc_feature (138)..(141): n is a, c, g, or t
  misc_feature (145)..(147): n is a, c, g, or t
  misc_feature (191)..(191): n is a, c, g, or t
  misc_feature (202)..(202): n is a, c, g, or t
  misc_feature (219)..(220): n is a, c, g, or t
  misc_feature (242)..(242): n is a, c, g, or t
  misc_feature (285)..(285): n is a, c, g, or t
  misc_feature (287)..(287): n is a, c, g, or t
  misc_feature (316)..(317): n is a, c, g, or t
  misc_feature (328)..(328): n is a, c, g, or t
ctttcattctctcttcctgcagtgttttgcatacatcagaagctaggtacatnagttaaatgattnaganttggctgtatntagatttatcactttttaatagggtgagcttgagagttttctttctttctgtttttnnnntttnnnttgactaatttcacatgctctaaaaaccttcaaaggtgattatntttctcctggnaactccaggtccattcnntttaaatccctaagaatgtcanaattaaaataacagggctatcccgtaattggaaatatttcttncntcaggatgctatagtcaatttagtaagtnnccaccaaattnttatttgactaacaaag

SEQ ID NO: 680175 - DNA, 1774 bp, Homo sapiens
gaatagtaggctggcatgatcaaccctcaggaccccatattccatgggtggaaccatgcgcaacaattctgcagggatggaagccagcccagagatgatgggcctaggggatgtaaagttaactccagccaccaacatgaccaacaaggcagatgggacacccaagacagaatcccaatccaagaaatccagttcttctactacaaccaatgagaagatcaccaagatagtactgagcatgggatggatgagccatgagcaggaagcatgatggcatggaccagctcaatcctggcactacatcatgaagagcagaagagccaatgggccatgaccaaaatctgcactgctgatcgggataagggccacaccccatactgggaaccctgcctacaacgcccctacgtactggcagcaaccagccagcacacgcgcaccaactacgcgcagcgacgatcgcgacgcaccacggaacacaccaaacgaaaaccacaacaaaactagcgccacgcccaaacccacggcaacaccccaagacatccaaatagaatgcggagcaccactaccaatgctatactaggaccatctacaagacactaccctaggacacatcatacgaccggcactataatatccacagcagaggagacaacaatatagacccaaaacgagagcagatgccaacagaaatgagacacccagcagagcaaggacacgcaccccccatccgaccgcaatgcacatcattccatcagacaacgacacagccacgaacaccgccacaaaaagagacagcacccccaaggaaccacaacaacaggaactgccgacacgacgtaccacaacaattacgacggcagcgcgaaaaacagggaaaaccatacagacagcagaggcgacacaagaaaccttgaccgacagaacacaaaccaaacgagaaaaacacagcaggacacaaagaggcacaggaagcagcatcacagcagacacaacaacacagcaaaggcgcacaccccacagacacaacaacacgaaaccaaaacaacgacaccaacagagcaagaaggcacaaagcgacaggacaaccacaccgcgcgatcgccaggaaggaccaccacaagcactgaaaagggaagcgccagcaacacaacaagaggaagaacatcgacactacaacccgggcgaaaaacccacaacgaacgaaacacccacagaaaaaaagacagtcaaccacagcaacaagcaaccaacaaagagacaccactaacagacgacagaaccacagaacgacgagaagaagagcagagcaagtataggagacaatgacacagaaagggacagcgagacagaaccgcgacaacacacgaggcaaaaagtagaagagaacgaagaccaccgagagagagcacaatagaacgcagcacgaggacgagctatacagacaaacaacacaggagaagagcagagcaagaagatgatcgctcaccagagcagaagaaggaaaagacagaagaaatctgcatagaccagaaaaagcacagagagaggagatgacacatcagcgacacaagcaacacagagacgcaagagaagggacgaacagaacgagaagtgaagaagggaagagagagaagaagaaaaagcaagaacgatgacatacgaagaagcgagcagcagagacgacaagagtagcacgaagcaaagaacaaggcaggaaacagagcgcaagaaaagaagggagcaagcaagaagagtcagaagccagatcagaacg

SEQ ID NO: 680176 - DNA, 235 bp, Homo sapiens
gttgcgtgccgtggtggagcagacaagagcggtcccggaagctggcggagaggagctgattgagactagtgagcgggtgcagctgctgcattcccagaacaccagcctcatcaaccagaagtgaagatggatgctgcctgtcccagctccgactgaagtggggaggcagttcaggggtgcggattctgcggggaggccagaggccttaggttgcgccttttgcggcagactaaac

SEQ ID NO: 680177 - DNA, 803 bp, Homo sapiens
ggcagcccagctgtaaggcaataagcatgggctcaccgctgcaagtcagagttcatgtgctagccgggcataggggcgagagaaggcccagaggcgacgtcagagagaagcaactgcgccccgtgtgaagagaagctcgacccatcaccggctggagagaccagctttcacgttgaagatggcatgggtccacgaactgttgctatgagtccacatcatcgtgccgtctgcggtggtccgtacccatcgattatcactcttatcggtaggacagttgatccggaccacgtgacgttgtccatcacgtgcatgtgagagcgacagagaagctcaactcgctaggaacaagtatctgacaggggactgaggcgacgcctagcaagtctcgcgtcgtcccaatagagcctgcacagggaagattgatgtggccctgtgtaacctttgaccctgtacaagctgaacccacaggactgtcatatgggctggctgaaacatgaaggcgacatttattatgatacggtactgcccctgttcctatgactctgcacgtgcatgtgggggccaaagcgcagtcatgagagacgctcgaggcgtaaatgcgagtctaacatgctagcttgtggtctagttgaaacaggaacaaggctagcctatgatgaggctgcgggggctggggatgggaatgattccaaactagtcaaaggatgcttgagcctcagttagggcctggcgatcctaatgggagaatggcctttcctggagaccccccctgtacagccaggagcagctgtcgtccaaggtgg

SEQ ID NO: 680178 - DNA, 157 bp, Homo sapiens
agcggagtcgctctgcctatctttcagaggcgtcccgcagcgtggtcccacaactcgtccgggacagcctgaaggaccaccccacaaggaggcaaccagtcccaggtcccccacctcgtcccggaaagccagtaaggatcaccttcacaaggaggct

SEQ ID NO: 680179 - DNA, 290 bp, Homo sapiens
tatgcatctttctagtcattggaaatactcttcaatgacatcctttgcctgagactcctatccatagtccttcaactactacacaactgcaaccaaccacttcacgggttttcccctctctggtctaagtttacacaggaatacccattctcctatttgcttgttgtcatctaaccttaaattagggttgatttgtgtgttcggcacaaagggcctccatccaacttgacatacattggctcatcacagttggatgcgatcacactaagatgggtttggcccttatcgag

SEQ ID NO: 680180 - DNA, 127 bp, Homo sapiens
cttgacaacctccaaggcagcatgaagcatggaaggacttccccagcccagtgccacagcgggagggcagtcgctggaatgtcgggctgctgttgaggtcctcaggctacactggttgtctgtgtca

SEQ ID NO: 680181 - DNA, 940 bp, Homo sapiens
tgtttttgaggagaccagaatagacataaaagacgagaggctggcgcatcggtctttattacatccagtatatacattgtcaatgtttaagaactgaagtgttcatattattcatttgcttaattttttaattacacaaatgatacaaaaatacattcttctcataaaataatcagaattttaccaataaagttgggctcccattggccaccatccccaatcccagccacttccccaagagaaattgggaaatctttggtctgttttactactcctggtcttctcacctatccagacaatcatgagggcagacaggctccagggcactcctctaagtattaaaaacaagtgtaacaaacgctttacctgatcaagaatatgcatctagaggagcggattaccctcagaagaaccgattttaatatgatgggcctatggagggccctggactgggatgatggagtaagcttcccttagatcgctgctacattacaacacgcatcgccaagacgggtttgtttttatttgacgaagtttatgggccgttaatcgtgaccataaggacaatgccgagagctggaagggtgtagagccttagaatgctagattgccaccggacctttatgaccggggaccattgggagtgtgtgattctttttgttggccaaccgacagggtgtgggcttattatgaaggtaaatagtggaagaagagggcgggggagtatagtccgtgtgcgtcgagataggagagcggagggcggtgagccgcgggtgagagtaggcagctgtgagacgcagtgtgatcgggacaggctggggaagagtgagggcagggtagaggagatgagaaggtggagctgttgtgacgaacggcgatgctcgtccaatgagacgcacggctagaatccgaatgtacgtcccgtatgcggataggtgcg

SEQ ID NO: 680182 - DNA, 1257 bp, Homo sapiens
gagtccgagtggcagcagcagcgcagctgcagtggcttgtgtggtcgcgtctcggcacaacccggtcagcgcttgcagccatggctgcacccaactgactgcaagcagccagcattgccagcaattccacacagcacagctattttccactcatttgcaccaacagcatggtgcatggcacactcataaccacccaacaggcaccttggggcaacttgtcacatgcagcatctccttggggcagcacatcccaaacagacaagcaagcagttacaacaggcacccatgcattccaatgcacagtcagcaatgctggatgggtcaattgggcacccaattgcaactctccgctgcacattctctgcacccattgcattgggccaagcaaaacaattggaccagcacaacagcacaaggtgcaaagcaaaggcaactttcagcagcacagccattcccggtaggtgatatgggatcacagggcatggggaacagtgggggttaatcatacaagttgggtggcaaagaaagtttcgaccaatgttggattggaaaaaaagcatttgggcggcacaggcaaggttagacaggatggaaagcaaagttggcaatgccaaatgacatcccggggggcacgccaacaccattggaactgggtcgactgggtccacaggtacacactaatgacccgaacggcgggtgcccaacattgacgtaaccaggcaacagtgtacacgaacgcctagtgtccccaccatggttggatacacaatgtgcatcgtgtccaagaaaaatgggctcaactcggcccataccccaagagcatggcaaactgcactgctggtaaaacaagggtataacagcactacagggtcagagaccacaaaactgtgccctgtcaaccgaaaaaacagggcacatcaagtgacaaccacaggtaatccataccgggtaatcataaagagcaacaatgaacccacaaacacgctcatacgaaacaaaaattcggaaacagacacaagcggaagccaatggaaaaaacacacgggaacacatgaacaaaaccaactataagcacgaaccatccaacctgcaagaggagcgctaggccaacgtgggcagaaacacgagcggacgccgaccatagaccagaagcaatgaaatagaaacatgcgaacaaagcccaggagcacacaagacgacacagcaaacactcagagaaacacaaaagaacaacaaaccacaaacaagagcaaaaca

SEQ ID NO: 680183 - DNA, 308 bp, Homo sapiens; identical to SEQ ID NO: 571301

SEQ ID NO: 680184 - DNA, 699 bp, Homo sapiens
gggggtaaaattgctgagtgaagcattgaaaaaaaaaaaaaaaaaaaaaaaaaaaaaaaaaaaaaaaaaaaaggaaaaaaaaaaaaaaaaaaaaaaaaaaaaaaaaaaaaaaaaggaaaaaaaaaaaaaaaaaaaaaaaaaaaaaaaaaggaaaaaaaaaaaaaaaaaaaaaaaaaaaaaaaactttgtggcccccttggcccaagtggtttttaaattggacaagctttttcattgggcccgaatttggggctaattggccaatttccccttatggggggccttttacaaataaatgggccgcgttttaaaaaggtttgattgggaaaaccctggggtttcccaatttaaaccccttggaaaaaaatccccttttcccaagttgggtaaattccaaaaggcccccaccggacggcttttccaaaaattggccaaccctaatgggaaatggaaaattgaaggcggaaaattttgttaaaaatccgggtaaaattttggtaaaacacccttttttttaacccaatggcccaaattgggaaaatccctttaaaattcaaaggattcccccgaaatgggttggagttttgtcccatttgggaacaagagtccctttttaaaaaccggggcttccaccttcaagggggaacccgttttaaggggaagggccacactttgggaaccttcccttgtttttggggg

SEQ ID NO: 680185 - DNA, 821 bp, Homo sapiens
tcctggtcagctggagagaaaggtgctcctggtagaaaaaggtccccaagggcctgcaggaagagatggagttcaatggtcctgttggtctcccagtggaccagctggtcctgccggctcccctgggtgaatgacgggcaggaccaacatgggtgagaattggtagagcctgggtacgaaagaaggcattgcgaaggtgtgactacagggagcaaaatggccctcccggtcccccaaggtcgttcagaggaccagttggttgcccctgtgaattgctggaggtgatggtgatacctaggtcctacggaggacatgcaggggtatgttagggcatagagaaggtgatgagggtgccagtaggcttccctggacctccttggtccaataggtcttcagggtctgccaggccctacctggtgaacaagggtgaccattggggatgttggtcccatggggccaccatggtcctccaggcccagagaggccctcgtggtcccctgtggagctgatggcaccacatggtacccccaggtctgttgcgttcagttgcggtggtgttggacgaatttgggtgaacctggcggaagctgtgaagcccagggtcctccttgggggaacgcggcgtgtagggcggggaccctgaggagccgatgagggagagaacgggggaggctcggtccgccttggtgcgtgtggaccttcgatgtgccgaggggcacccatgtgatggtggcctaggattcccggtccgcggggcttcctggcgaacctgggcccccgggggacttgcccgcggaaagtgtgtgggggaccaggggcgc

SEQ ID NO: 680186 - DNA, 82 bp, Homo sapiens
atcggaatagttgttatttttggatttctaatttttgaacttaaatggcatcatagaatatgtacccttctgtcgtcttctc

SEQ ID NO: 680187 - DNA, 247 bp, Homo sapiens
  misc_feature (146)..(147): n is a, c, g, or t
cagtggctggtctggctgcccagaactccccagaggttcctgacaccaagcatcctacgtgccctctccacaggctcccactgaacccagggccttctcccttgacttttcctccaaggactctccgtgccctggtgctgcacctnncctccccctggctgcattccccagtcaggaacactaggctagcaccagctcagccatccttctctactgccagttctggcgtttccccagaggacgctat

SEQ ID NO: 680188 - DNA, 238 bp, Homo sapiens
gatttcgggcagggagccaaccataggccttcctattgattattgcagtatcgaatggacaagtccgaggtgatagttaccagtgaaggtgtgttctgggttcaaccggagtctctcgcatttggtctttttcgtgtggttttcagtattggccctttggatctctgattgtctcactatgtggtatctcttggaggttagttgtcctctagagaaggccatgatataccctggattg

SEQ ID NO: 680189 - DNA, 174 bp, Homo sapiens
ttgagtatccctataaatctggaaatcggagtcgtcacgtattccaggacttgtcatctctggaattacattttcagactgtctcatgtgtggtagcagttcttacgaaactttggtaaagttcggggcttagattgtgaatattcgctgttccaacacctgcagtgtacttcc

SEQ ID NO: 680190 - DNA, 441 bp, Homo sapiens
  misc_feature (143)..(143): n is a, c, g, or t
agaggatcccaggacagcttaggcacattttcttatttctcactgagagcatatacctaagatatttaggtcttagattctcatgactgtttggatggctgttgatcttgacaatttcttctggtctgtgtgtttatactatnttcctacaagacagcttcctagggtagtgtagcagtcagacatcctcagtaccatcttagttcctcctcccataaaaataatgcctcccttgttttctgaaactcaggcagcaggccagtcagaaaccatacagaaatgatatctggagattcagaaagagcagtagatattagattgaagctacagacgttttaatagacataaatttatatagttactcattaattgataaatgtagtgctaatgtataatgcatgaaaaattcaattgagagtcttgagtacagaaaacaaatat

SEQ ID NO: 680191 - DNA, 352 bp, Homo sapiens
  misc_feature (21)..(21): n is a, c, g, or t
gggtcccccccgtgacctggntggcctcccctgtttcagggagcaggtcacaggtccccatggggaattttagccccccctggggggatgttacaaccccaagctggttattttggcggctgtaattttgggggaaagtgtgtggccacgtgtgtgtgggtgtgggggggggggggggtgtgttttgtgcccccctgtccccatgggaggtccccccctgtccccaaatcccctattccccccccaaaaacaaaaacactcccagggattttggggagagggtgaggacaaaaacccgctgtccctccaaaggacatttttttagcaaaaaaattgagggtcccctttttta

SEQ ID NO: 680192 - DNA, 132 bp, Homo sapiens
gcaacagcagcgacaatcaggacagcacagacagcctgagatgtccctgataatcatgtagagataaagtcacgagtgtccaggggcatcaaatgatagtcacatagtactagctggaaccaaataaaccac

SEQ ID NO: 680193 - DNA, 125 bp, Homo sapiens
cccccccccccccctttttttttttaaaaaagggccttggggttgtttgggggtttcccccccccagtaagggggttttaaaatttttttccttgggcttcccaaaaaaaagacccttgtgttta

SEQ ID NO: 680194 - DNA, 109 bp, Homo sapiens
accggagagagcaaggggaggtggatggcggcacttgcttgcagccagcacctggcatggggtaggtctgttggaggtaggagtatctgtcgcaattctcacaaaggca

SEQ ID NO: 680195 - DNA, 616 bp, Homo sapiens
gggcctgcccgcctgcggctggaggcactcgcgccctgcgaatccggccgcggcggctcagcagcgctggtgcggcgggcgctgggcgtgggtggctccctcctcgtgctgtcccgtcgtgtggaccctttgccccgctctgccctgctgggggacatgcgcgctgctcctggtcctgctgtgcacgggcgcggggacgcctcggcctagtggcccctggccccccattgataaacgctgagcgctcggccaggggactggtgcatataccccacgattcccctgagaactaaggttggatcccgcggtgccagtgaacccatgtgttgccttcccgcgggatcccatgcctttgaggccccaggaacgcccccgccgccacgcatgcccgtgtggaccgcgcgagggcctggggggttggcgtcgcgacggcgggcccgaaggcactcgggcgcgaggcgctccgggagcgcagatgcaggtgccgcaagtcgtcgttcggcttctaccaggcggtgccgcgacttgctacccgttgtggctgcttggaggatatgcccgccagcgaggcctttccacttggacgaggcgcggggccgccgcagcctactcggcc

SEQ ID NO: 680196 - DNA, 428 bp, Homo sapiens
agcgggtcagtgacgtcgtgggctgaagggcactagcacccaacgcaaggcagtgcggacctgtcttgcagtgtcccttcactgtggttggagagacagagcgtacgcgcagtaggaagctgggcgctcgggctctgtggcacgcctcgatctcctgggaatctgagtagttgaaaagctgggctgttgtatttcgtgacaccgtcgagcgagcacgactcccatggcgagatccaggtcagcatgctaaagatagatcctgggcctccatgtcgtccttgtaagcagagcatgacgagatccgtcgacgtgtcgactgaagttgctagttagaagatcttagcaagtgaccttgagaaaagcaaggctatgacctccagcatccacttttgaggctgcggtccattcacgagaggttgcgtggactc

SEQ ID NO: 680197 - DNA, 162 bp, Homo sapiens
ggggggggtaaccccccccccccctttccccccaacccttttccccccctggggggggggggggggggcccaaaggggggggggggccccccttttggggggggggttttttttttttttttggttccccccccaaaacttttaatttaaggggggggggga

SEQ ID NO: 680198 - DNA, 410 bp, Homo sapiens
  misc_feature (33)..(33): n is a, c, g, or t
  misc_feature (67)..(68): n is a, c, g, or t
  misc_feature (72)..(72): n is a, c, g, or t
  misc_feature (77)..(77): n is a, c, g, or t
  misc_feature (84)..(84): n is a, c, g, or t
  misc_feature (87)..(87): n is a, c, g, or t
  misc_feature (89)..(89): n is a, c, g, or t
  misc_feature (96)..(96): n is a, c, g, or t
  misc_feature (103)..(103): n is a, c, g, or t
  misc_feature (112)..(112): n is a, c, g, or t
  misc_feature (129)..(129): n is a, c, g, or t
  misc_feature (187)..(187): n is a, c, g, or t
  misc_feature (206)..(206): n is a, c, g, or t
  misc_feature (221)..(221): n is a, c, g, or t
  misc_feature (225)..(225): n is a, c, g, or t
  misc_feature (228)..(228): n is a, c, g, or t
  misc_feature (238)..(238): n is a, c, g, or t
  misc_feature (245)..(245): n is a, c, g, or t
  misc_feature (262)..(262): n is a, c, g, or t
  misc_feature (275)..(275): n is a, c, g, or t
  misc_feature (284)..(284): n is a, c, g, or t
  misc_feature (290)..(290): n is a, c, g, or t
  misc_feature (313)..(313): n is a, c, g, or t
  misc_feature (315)..(315): n is a, c, g, or t
  misc_feature (318)..(318): n is a, c, g, or t
  misc_feature (324)..(324): n is a, c, g, or t
  misc_feature (327)..(327): n is a, c, g, or t
  misc_feature (331)..(332): n is a, c, g, or t
  misc_feature (336)..(336): n is a, c, g, or t
  misc_feature (344)..(344): n is a, c, g, or t
  misc_feature (349)..(349): n is a, c, g, or t
  misc_feature (351)..(351): n is a, c, g, or t
  misc_feature (367)..(367): n is a, c, g, or t
  misc_feature (384)..(384): n is a, c, g, or t
  misc_feature (395)..(395): n is a, c, g, or t
  misc_feature (406)..(406): n is a, c, g, or t
  misc_feature (409)..(409): n is a, c, g, or t
tggtcttcgaaagttctcgggaagattggcttnatagagtagtcttgctttagtatttcccatatcnngcangcacngttatcngtncngctgtcnattggtntaggttgantgatttgaccctggatntatgaaccccaagatttctatgaattcctagtttttttgatgcaaataaacacaccantattcgcgggaagcccatngaggacctttggccncgcngtnggggcagtanttgttgncctcctccctcagaagnttggatagggtgngcggggggnggtcgntcagcttcggagccttctcccgncnggngggggnggncatnncggnaggggggnggggngncggggggagctagggngggggggggcgctggcnggagccgggcngagtgaaggcnccng

SEQ ID NO: 680199 - DNA, 880 bp, Homo sapiens
gggtttgtgaagtcgtggccgttagcaggaagcctacattcagtcgccccgacgctagtgagggacccaaatctgagttccccggccagccgaaatccaagccgtgtgttctgcgtgctcagcattgtcccgaacagatcctagctaatacttgcgaccaaatccgcgtgcctttggacgcaacgatgcccaaaatacgatcagtgtgctgtgtgacgcgatccgatgtggatgcgagagcgtaggtacgttgtgccatccgaggcccatagcatcaccgggaatgcagctattttgcaccacggtgtgtgaagaactatttggcattgatgggaagttgtgcggtgtcttaaggtctcgctaggtaccgaggtactaactaacaggtttctccagctggctgtagagatctcaaataatagaggtgactgccaggatgtgcggtaaggaatagcccactgcctctttaagttccgtgccaagtgctaccctgaggatgtgtccgaggaattgattcatggaacatcagtcaacgtctgttctttctgcaagtgagagagggcattctcaatgatgatatatactgcccgtctgagaacgctgtgctgctagggcatctgtatgctagtccaagtctaaagtattggtgaccttcacagtaatggagagtgcagttaattctggactaccttggccggagaacaaagttcgctcccaggaatagaagtcctggaaacagcgacaaaatcaattgaagggacccagtgggagggaacggatccacggtgttggatgaggaaccacgtgggcatgctcacggaggaatgccggtctgggcatatctgaggcatgcccagaaccggcgatgtttgtggtgacc

SEQ ID NO: 680200 - DNA, 184 bp, Homo sapiens
ctcatggcaggatctatattggtcattcatgttttcatatagccaacccaccacagtatattcttggtgcttaataaatgtttatcattgttaacaaataaacaacaacaaacaacaacaacaaaacaaaaaaacaaacacaaacaaacaaaaacaaaaaaaacaaaacaaccaaaaaacaaca

SEQ ID NO: 680201 - DNA, 206 bp, Homo sapiens
aaacccctaggaagggagaactggtgagtcttttcaaaaggaggaagtccctcaaaaggggctgtgttttgccaacggcgcccccaaagggctgaaatacttcgatttggaaaaaaaagactccggccctgagggaaggggagggtgcccatctggagtaatttcaaggctttttccgtgttatttgatgtggccccaagtagaga

SEQ ID NO: 680202 - DNA, 1061 bp, Homo sapiens
gtttctgctctccgcccgtgttgagtggtgggggcctgggtgggaatgggcgtgtgccagcgcactgcgcgctccctggagaggagaagtctcagctagaactgagctggcctaggtttactggaagggaggatcatggaatgtttgcagagcggctggaaccagactggtgccgatagtatgtgaatgctgtggctccatggctgccctcctgcttgctgccccgtgctgctgttgctaccgctgctgcttgctgaagctacacctctggcctgcaggttgcgctggcttcctggctggacttggccttttgctggtgcgagctcttgtgcttgcaaaatgtggctcttcgatgcatctgctgccccttggcactgacggatttgcctgactggaccacagagaatgggtcccctgatgggaggggcatagcaaggaccttggacccatgagcgccatcgctgggaaaccttggcaccatgcatgactgcgcacttggtgaagaaccgttttctcactatcacgggcttcgccggctggctataagctaacatccactaaagggccgtgtagtcgtgatgaaaaagataaaaaaggggcatgtattgtcgtctattatcctttaggtttgctggctaaaggcatgtggtggaacttgggtaggtaccccgtggaggggggcgggtgtgaaatagtgaatgtgatgtgggtgtaggagcattagaaggaaatgtgcagaaggcgtgggtaaaagagcgcgtgtgatagctggtaggaaattgcgaggagtgacgtggaaagtggagcgacagaggaataatgtgcgggaagcaaggcgcgttgaccgagcagaaggaatgaagaggacaggagggcccatagtgataggattgatagaatgtgttgcaggggtgatcacacaagtgtggccacgaagtatattagtggagcatgagcaggggaaatggaagaggaggcatgtgaatttcatttttttactaacgctgtgggtgcccagttgcgtagcagaatagtatcgcggaagtaggtatcgaagaatg

SEQ ID NO: 680203 - DNA, 1035 bp, Homo sapiens
  misc_feature (86)..(86): n is a, c, g, or t
  misc_feature (139)..(139): n is a, c, g, or t
  misc_feature (304)..(304): n is a, c, g, or t
  misc_feature (310)..(310): n is a, c, g, or t
  misc_feature (335)..(336): n is a, c, g, or t
  misc_feature (342)..(342): n is a, c, g, or t
  misc_feature (356)..(356): n is a, c, g, or t
ggtgaagcggttgggaaagtgtcggtttatcttcgcgccccttgcgttcttgccgcggcttgctgggcaggtaaagcgcgattgcnagactcggcaaccctgccgactcagccggaaccgctcccggcccgagggtgtnggtgtcctggtgctccgactccttccgcaggctccttgggacccgcggttccgggagtcccttgctcagggtccctttcctgcagtgaggcgccgtccgccttccctgtgtccccgcagacccccatcatgggcaataccagcagtgagcgcgccgtgtgaagcngaatgngttggccataagacgccccggagannaagctncggggggcaccaanggacggggacaggcccaagatcctgatggacagccccgaagacgccgacctcttccactccgaggaaatcaaggcaccagagaaggaggaattcctggcctggcagcatgatctggaagtgaactgataaacgctcccggccaggctcggccaacggtgtctcgatggacggggggcggacacagcgacagttacttatctgggtccttcaacaactggagtaaacttcccctcacatgaagccaccaataacctttgtagccatcctggattcctgccggaaggagagcatcatgtaccaagttcttcgtcggattggtcagtgtggacgccacgaacccacttccagagcccataagtaaaccagccaaggttgtgcacacgttaaacaacaattcagtcacggtgaacgaccacttgacctttgacgtattggaatgattctactgggtggatccccaatacttgctccgaatggttcgcttgagcctgttacaggttcctcacccaagtaacccttaccagtcaaggaagccctaggttcatgcaaacccgcgagacgcgctttcagggcacccactaatctcacccccaattttcctcacaggtcatcctgacacacctgcactggcgcttcctgctactcaagttgttcccagagcataccgtcatgtggact

SEQ ID NO: 680204 - DNA, 813 bp, Homo sapiens
  misc_feature (11)..(11): n is a, c, g, or t
  misc_feature (86)..(86): n is a, c, g, or t
  misc_feature (88)..(89): n is a, c, g, or t
  misc_feature (96)..(97): n is a, c, g, or t
  misc_feature (108)..(108): n is a, c, g, or t
  misc_feature (110)..(110): n is a, c, g, or t
  misc_feature (183)..(183): n is a, c, g, or t
  misc_feature (187)..(187): n is a, c, g, or t
  misc_feature (190)..(190): n is a, c, g, or t
  misc_feature (195)..(195): n is a, c, g, or t
  misc_feature (201)..(201): n is a, c, g, or t
  misc_feature (221)..(221): n is a, c, g, or t
  misc_feature (226)..(227): n is a, c, g, or t
  misc_feature (235)..(236): n is a, c, g, or t
  misc_feature (252)..(252): n is a, c, g, or t
  misc_feature (286)..(286): n is a, c, g, or t
  misc_feature (289)..(289): n is a, c, g, or t
  misc_feature (299)..(299): n is a, c, g, or t
  misc_feature (312)..(312): n is a, c, g, or t
  misc_feature (328)..(328): n is a, c, g, or t
  misc_feature (330)..(330): n is a, c, g, or t
  misc_feature (348)..(348): n is a, c, g, or t
  misc_feature (373)..(373): n is a, c, g, or t
  misc_feature (451)..(451): n is a, c, g, or t
  misc_feature (529)..(529): n is a, c, g, or t
  misc_feature (565)..(565): n is a, c, g, or t
tggagaagtgnaggcccagggcgtcgtccgagtaaacagcggtgctggccgtgtggaacccgggcccgcttagaaccatggaaggngnnaactcannatcctcgactncngggcccgggcggcggcgctagagatccagcggatgaagcggtcgaagaagccgggttgcgccaggttgttatntttnttnttttngaatangtcggcgcggtcacccaggntgttnntggtgatnncgttcatgttcacgtngctgctcaaggtcagctcggtgggtaccacgttntgnttgttcatgntgttcgccgattngttcagtttgttgttncncgttatgccgtccgtgantacacgaaggacagctctgcgtgcnttcgggccccgccacgcggcatgcgcacgatggcattgatggcgtgcaccacgctgcgcccacgtgcgagagggagtncaggtattgtgtggtctccagcgcctcgtggatggccgtgagggtgtggctcagcgggaaggccacctgctgctcgcnggggccaccaaactgcagcagcgccacgcgtgcgtngagagggtcgtcgtccctccgggccagcgtcaccggccgcgccacctgctccacgaagcgccgggccttgtggaagttctgctcacccagccgctcggagccgtccagcaggaagacgatgtccacgggccgctgcgtgcactgtgccacggacagctctgtttggcagggaaggtctgggcacacgatctgagggtccgggcagaggacgtcctccatgttatcgatgaacttctcagcgaccaggg

SEQ ID NO: 680205 - DNA, 508 bp, Homo sapiens
gtatcaacatggagggaagtggaggtcgctatgttaagtgaaataagtcaggcacagaagggcaaattccgcacattctcatttgtgggaactaaaaataaaaataattcaactcatggagatagagcagaaggatggctcccagaggctcggaagaggaatggggccgggggaagaggtggggatggttaatgagtacaaaaacagaatgagtaagatttagtatttgatagcacaacagggtgactatggtcaacaataatttatcacacatttaaacataacgaaaagtatcactgaattatttgtaacacaaagaaagtgtaagtgtttgaagtgacgggaccccatttccccaatgtgatttacacacactgcatgcctgtatcacagtatcacacatgccttatatacacctactgtgtacccacaaaaattaaaaatacaaattttattaaaaaaaaggacaacgtcctttttttcccccaccaccaaaccaaaccaaaaa

SEQ ID NO: 680206 - DNA, 273 bp, Homo sapiens
cccgactcacactccctcgctactcctcctccactctacactctcctgactccgctccgactttgctcttacttatatagcctgctaggactccggctctgaggttacccgacattgtcattgttgtggatcttctcttcagcttggccttagctcttgctgcggctctatgccagcgctatggctgcggctgcggctcttgtccttgctggggctcctgcttttctccttcttgctccggctccgactctggctccggaagaagaaaatgat

SEQ ID NO: 680207 - DNA, 791 bp, Homo sapiens
gggcagctggaggtagaatgactccttgggttataagagttgcaacgcatgaagtctctaacaatgtatgttcttcagctctgctattcaagtagcatgtactgtgtggtttggtatggtgctaggtccccgggtgtgaagcaaagaccccttccaggggttatacagtctatattgagagcatcgtcagatgtctggcacactttatatgtagatattcgtcgcacgcagatcgatttatggcagaccgtttttaaccgtcctcaagttcctagagcaggtgattctccgccttgtgcatgtctccctccttccgcttcctggtagccttttgcgatttcgcatcgggaaattgaggagggtaaatctgggttcaggagacttgggatggagcagaggataattagaatgtcagggtgaacgtggtgagtaatctgagaaacaatgactaattcttgcatatttttgtagacttccatgtgagggttgttgcagcattgatatttgtgtgcattgtctaaacagagatgaggtggtatcttcagtgtagaacatgtggtattccgctgtgagcaggcacagaagaatagttgaacctattgtctctttctttgacaagattgggtccaaggattcctctgttctctgccattggtgattaaatgacatagccttggggctcttacactgggtaagccaggcaagcaagggtctggtacgcgtctgggggcatatatggggttcccatttcacgtattcacggaaatttgcggttttttccccttgatgtt

SEQ ID NO: 680208 - DNA, 119 bp, Homo sapiens
taacaatactgaacgctgcagctccacaagcgctggcgtgcaggaagaatctaccactttccagagctggtcaagctcaagtgacacaacaccttcacctcccggctccggcgctgcgg

SEQ ID NO: 680209 - DNA, 670 bp, Homo sapiens
  misc_feature (147)..(147): n is a, c, g, or t
gatgccaaaatgaggtagaggctaagtaatcacataatatatgctttacaacataattgttagttaaaatcatggatatcgctaaagtttagggtattccagagtcacagtctctcattcagatgccttatcagataggctctgatnagggagacggagtctcgctctgtcgcacaggccagattgcggactgcagtggcgcaatctgggctctctgcaagctgcgcttcccgggttcacgccattctcgtgcctcagcctgcagagtagctgggtctacaggcgcccgtcaccgcggccggctaagttgtatttatagtagagacggggtttctccttgttagccaggatggtctcgatctcgtgacctcatgatccagccgcctgggcctcgcaaagtggtgggattacaggcgtgagccaccgcgcgcggcccagatggcttattcttacccatcgttaaacgctgaagaaagaggtaatatataggtaatataacagtggaatctatttctaagttatgttgtatcatcgtacctgtgtaattagaaacatatcctttcttttcactttgtgagatagcatgttgggcaggaagagggtttccagatccattatatcagaaaaaaaaacaacaaaaaaccattccactcatcctatggctcttctt

SEQ ID NO: 680210 - DNA, 834 bp, Homo sapiens
tcgctagttctagatcgcgagcggccgccctttatttttttttttaggaataacaaatgtttattcagaaatggcatagagtaatagcttaatcacccttcatctcttatatgccccttcctctctgttcgtgcagcaggagcaaacgatgcatgggtagacataaagggcatggcgaaggtggtacgtgaggacacaggactagcccaccaccttcgtcgctcccggtctcccaagatgacttagcttaatatgagtggaggaggcagatacaagtgtccctctcaatgtagcccgtgattggttgcgctctatagtcaacctagctcatagatggccgacgtggcagcagctggactcgatgatgctctgtgacaacctgaaaatacctgacgttaggggataagagggaggataaagccatgcagggaggatatttaccatccctaccctaagcacagtgcaagcagtgagcccccggctcccagtacctgaaaaaccaggtcctactgcttctggatgctctctgtgggccaggaagggaaaagtgtgggaggaatgtcttccagctgctaacgagaagtctgcacccacttgaaagggttaggagaataaaaaagccagcgattctttaaaagaactgcgaagtggagcaaccagcaggccccttcctgtggactttcccgtcctgggcaagctcagaagcctgacactgaaagctgggttcaaatcctgggtccttcctggcttgaaagactgaccctggaacaatgagtctcctgggtttcttccaggggtaccctacaagcaaacttggggagcctgggaaactcg

SEQ ID NO: 680211 - DNA, 248 bp, Homo sapiens
  misc_feature (62)..(62): n is a, c, g, or t
gtggcgcatctctgacatcgccgcttgcgattccctctaagcaagactaggcaaagggaggnaaacacaaacggggattagaaaactatagtagcatttgagggaggagaggcaaaaagcaatactgaaaaccaagatatcttacttctctacctacaaccttctttgcataaaatgatctaatgcaatccatgtaaaatgatatcaactatagaataagccagccaattttggaataaggagaggta

SEQ ID NO: 680212 - DNA, 100 bp, Homo sapiens
atacgtgcaggttgtacagcagcgcacgttcatcagccccatcaagtgcatagaagccctgaagctggaggagaacgcgttgtgaaacgcgtcaaatctg

SEQ ID NO: 680213 - DNA, 362 bp, Homo sapiens
tctgcggtatataccgtttatgctttgggctctgtatccctgcccagactctcatgtcggattgtggtctccagctgctggaggtggtgcctggtgcgaggtgattggatcgtgggggcggtttctcatgaatggtttggcaccatcccacagtgctggtcttgtgatagggttctcacgagatctggttgtttctaggtgtgtggcgcctccccatctctctctcttcctcctgctctggccacgtggccgtgtgaagtgctactccccctttgccttccgccatggttggaagcttcctgaggcttccccagaggcagagcagaggctgctatgcttcctgtatagcctgcagagccatg

SEQ ID NO: 680214 - DNA, 330 bp, Homo sapiens
agatggagagccgcgtctgtggctgatttatccagaggagataggtggctctagcttcagaggaagtctacaccccattcccatctgcttacaatgtacccagtgatatgtgttgagcatcagtaatactgtagcaggacatcacatggaaaaaatctaagcagctggctcactgtatttcactgaaaagaatgcctacagatgggatatttaatcgggaaaatgaaggcactttaataacaaagcttcattatgtgaatacttgtggactattaacatacaatataccttgtatattaatgccatagttgttagaaacactaatttaaa

SEQ ID NO: 680215 - DNA, 1111 bp, Homo sapiens
agctgagagtgatcacagaattgttagattgccagtgagctctgggaggccgaggcaggaagatgacgaggatcaggagatcgagagcattcctgtccatacttggggatagatcgccgttccttgctagctaaatagagtacaaaaaagactcagcctgggcatgctgggcaggttaggatggaagtcccgagacacgtctgataaggctgggagagcacggtagaatcgggggatgtagaccacaggtgctggtccaggaagcattagctcgtcccgaggacggcaggatttggataccaacttggggatgttccaagacgatgggacgggcacggaaaagcgaaagcaggtccttggtttcaaagaattgacaacactggccgatgcaactatgtcaaccgtgccagataccagaaaaccactcatggagaagacccccgtggggacgacctgtgcccttgtgattcgcgctgtcaaaggaagtgaaccagggggaccgcgagtttttcaccattgggggggagcccaatgacaatggttgcacacaacaattcgtggacgtgcacagggacacgtggggacgccccttgcaacctgggccccgcggggggcctagcaaaaggataactttggaagggcccgagaccaacactttaaacccttctaggggggcacaaatgcaggaggcacgaggggagcaggggaaattacgccaatggcttcgcgcataggagtgaccaagaacagggtaggttcacaatcacaatttcttcaccgacatggtatcccaagaaaccggaggaaattgcacatttggagcactgcttgtgggcaaccaaacgatgggcgatgagcagagggaccaatctttggcgccccataaatttggaggaccctctgtcgcgttcttggtccaacacaatggggtaacgagagcccaggaaacccacaggaggagtgcagaccgagcaacaggggacacccagagacagcatagtaggaccgtgaacacacggcggacaacctggggacggcctgtaaaaagagaccataggccgaccaaccctgggccacaccggggaaccaggtgacaggcgacacggagaac

SEQ ID NO: 680216 - DNA, 131 bp, Homo sapiens
gcgaggtcgcgtcgctggcttatccagcagccaggtcgtagaacgcgcggagcagatacgggcgacgcggcgtcatctgagacatgtccatcgcgcttagccccgggtctgcaggcgcatttcacgctcgg

SEQ ID NO: 680217 - DNA, 414 bp, Homo sapiens
tagcctggatgccctttttagaaactatgtgctatttgatattgatatggtttggctatgtccccacccaaaatctcatcttgaattggaattcccataatccccacgtcaagggcgagaccaagggtggagataattggatcatggggggcaggttcccccatgctgttctagtgagtctcacgagatctgatgcttttatcagcgtctggcatttcccctgctcacactcactccatcctgccaccctgtgaggaaggtgcctgcttcttcttttccttcgtcatgattgtaagtttcctggggcctctccatcattgcagaaataagtcaattcaacctctctcctttataaattactcagtcttgggtatttattcatagcagtgtgagaagggactaatacagatatat

SEQ ID NO: 680218 - DNA, 1664 bp, Homo sapiens
  misc_feature (439)..(439): n is a, c, g, or t
tggaaagggaaatcttatatggttttcttgtataaaaatgtccatcaaataaaggtcaagggggtggggggcaagattgctttattgcgggaaatatacgcgagaggggggcacgccccagcacgccttttcacgccctctcttcttcgggtgcaggcgccttgtgctctcgagagctcccagagaaactccacagggctccgggcattagaaccaggtagaagaggtcaagagggtgtgagaagggctctcaccacagagaggagaggagaagagagagaggagatctcaccacaagaggcgctcaagagaagacaggcgcacacaaatctcacagggggctctcaggcggcgcgtggtctcagacagggtgagagagtttctcttaaaggcggagaggagaggtatatctctctcactatactgcccccttctcaantatatctcacaccacacgcgctctcacgccgtgtgtgtgcgaccactctgcgcagacgctctgcgttcacacgacgcacacgctgtgcgtgtgtgtctcaccacatctcacgccctctctgctgtgtgtctctccatcttcttgtgcagcgggagaacccccccgacgggctctcatcatgagagcacacacctgtgaggaccctcacgtgctgctgagagagccagagaccgtggtcggcacccctgtgagagcagagagcgcgggatgacacaacagaaacacccacaagatttgtgccacaccccttctctgtgggggcccccctatattctgtggtgggatagacctctcacacggcggggcagcacagcgccggggagcatcgtcgccaaaaaaactctctctcatatatatcaccctgtgtgccgtgttactccacccaaagggggcgccctatatatatctccgtgggggcgccaccaacatgtgctcccgagtccccctgtgtgcatcgtagaaccacccaccgcgcgttgcactgtggctagatttcataaagaaaagctgctggggtccccccccaaaaaaatgttcggtgatataccacacgaggacagagcgccccccctccaaagacatctcattccataatattgtcccgcggattcttccgcggcaccaaaatttgccggcgccccccccgccagcgaacatcacaccgaacactcttcggcgcccacgcgggcgacattgtcacaggctggcaaactttcgaactaaagacatccccccagaagagactctcgtgcggaaacagggggggggccaccagcggcccgcacgcgaaagaaaacactactctccccatacaaaaaacccccaacagaggacgccttgggcggaaccacacataaaaccccacaaatatactatgccggagggaagcaatatgaaactactgaggcagctcccccagatgaggacaaacgtagctatcaacgcccccactaataattatgagacgcccgcagggtgggtggcccacgcaaggtagacaccctcttatctagctgactagagacgaccaactttactacaggcgtctctttgcaacacccgtcagcaacgaacattatggaacgaacgctctcttcgatgtgaacccccccccaacacatgaggcggaggcggacaggcacgaaccacccaaaatagtaggcca

SEQ ID NO: 680219 - DNA, 352 bp, Homo sapiens
  misc_feature (318)..(318): n is a, c, g, or t
tacctaatggctgtgtctcgttagtgcttctggcgagcagttttgttgattttaacttttcaggttcagggctccgcatgctgtggtatctaactcccagtttgggtcttatctattgtgtgttcatatatcttacagccactttcgtagtctattttgtgtcaactggagttttttacaactcaggttagttttagctttattggggagggggtgatcttaaacactctttacgccggcttctattgactcggttatcgtgtgaccgcagtggttggcccgaatttgaccaaccctgggtttagtatagcttaattnaactttcgtttattgctctaggtttctccctgct

SEQ ID NO: 680220 - DNA, 483 bp, Homo sapiens
aaagcagtgttatcaacgcagagtggccattacgccggggcttcgtttggaggaaggtagggtttgttctaacgctttgcacaaaggcgggaaacggtcatcaaagctgttgcgaagggaagagccaatgcattaattcgatccaagaggactcgcctcgttggatttgcagcaacctaatctctcgctcaggaagaaaacgccacgataaagagttttctgtcctccttgtttgcacggagcagcaaacgcagagacaaaagaaacgggccccgactgacgggggctcactctgtcccccaggccggagtgcagtggcgcgaccacagccttctgcagcctcagcttccgtgctcaagggacgcgcccgcctcagcctcccaacatgctgggattacgggcgtgagccaccgcccgggaacaacttaattaaaaaaaaaaaagccagaaaaaaaaccaaagaaaacaaaaatacaacacctc

SEQ ID NO: 680221 - DNA, 544 bp, Homo sapiens
aaagcagtgttatcaacgcagagtggccattacgccggggcttcgtttggaggaaggtagggtttgttctaacgctttgcacaaaggcgggaaacggtcatcaaagctgttgcgaagggaagagccaatgcattaattcgatccaagaggactcgcctcgttggatttgcagcaacctaatctctcgctcaggaagaaaacgccacgataaagagttttctgtcctccttgtttgcacggagcagcaaacgcagagacaaaagaaacgggccccgactgatattccaacttaataaaaaggtaatatactcattatgttcctgtttcccagaagacactgcttgggagttctgttctgtcatcaacagagctgtgatgaccgtggatgtcactggtagtggccaacatttctgcagctccttctcagttacatcctcaacacaaactcctcaccaggtggcagaagtggaagaagctgagatgtggctgtgagtcctgacttcactgctgtccagcggaaagagtctgagcagtctaaacccgt

SEQ ID NO: 680222 - DNA, 131 bp, Homo sapiens
ttctccatggatggctttacgtagtttacattcccaccaacagtgtataagagttcctttttctccacatccttaggcagtatttgttactaatatatgtcgtttaataatacacattctcactggggtga

SEQ ID NO: 680223 - DNA, 272 bp, Homo sapiens
  misc_feature (18)..(18): n is a, c, g, or t
  misc_feature (22)..(22): n is a, c, g, or t
  misc_feature (27)..(27): n is a, c, g, or t
  misc_feature (145)..(145): n is a, c, g, or t
  misc_feature (268)..(268): n is a, c, g, or t
tgtctctgggcaaccagnctgnaccancaactggagggaatcagtcttccacttcggtgggccaacctggagacacttcatcctggactccaacccgctggtcctgcgactttcggtctcctgtgggtgttccatcgccgctggncttcaaacttcaaccggcaggcagcccacgtgcgccacgcccgagtttgtccagggcaaggagttcaaggacttccctgatgtgctactgcccaactacttcacctgccgccgcgcccgcatncggg

SEQ ID NO: 680224 - DNA, 197 bp, Homo sapiens
gacggacgaacgacgcagaggctgggagctagtaggtcaatgaggaggcggaggtctgcagccatgcccagcagagctgtaaggcattcgaagatggcgtgaatttcccagcaaggcttggttgccctcaagcagtgcaagcggacaaggccccctctttctgcctgggactgccctggcccctgggagcttctggg

SEQ ID NO: 680225 - DNA, 172 bp, Homo sapiens
ccccgactagcccgacgtgaactttgtctgggagagagctgggaaaattccacagaggtagagcatttatgctgaaaagaagggtaccatcatgaagtcagaaaaaggcatggtgtgtttgaggacaggcacatttcacatagcagaaatgtgcctgtcgggctagtcgggg

SEQ ID NO: 680226 - DNA, 1085 bp, Homo sapiens
ccataataactatgcgtggaggataaaatagcgtgctgaggaatagaccgtggtgagccatgttagacattgacagctcactcgcagaaggtagagccactctacattcaccagacatcgtgaccacgtcacaaccctggaacggagaccatgactgcacgacccaggacagcaactggcccagtctaaggcggctagacctaaagttgtgtaaccaggtctaatcctcatgagctagtatgtttacaggatggtaatgcaggttatagcttaggtaatagtatactagcccacttaagagacaggatgtccagggagttccagagacagcagtgtgacttgacgagaatagacctggcaaatgctgtggcagccctgtaagtacttgatgatggtgtttccgtcttattgttaaagattcaagacttggtggtgaagatggtagttgacttatatagaagtgaggcacagagaatagggctcaggaggcagggaacttaaggccagagtacgtgcagaattcctaacagaacgaaacaccaaggtccgggagcagggaaccgtaaggccaagttaacgtgaactgcctacatctaaaccagaaaaaatacgcaacagcgcggacgaccacgaggacacttgaaaacacgtacaacacgccgccaccaagcagacagcagacgcagaagacacagcgccaacgaagcacagcacataccaggccagacctagcaaggccgacgactgagaaaaatctcacgacctatctggaaccaaaagacacgcaaagacagaatattacaaagaaccagggaccgcaaaaatacgcacataaaaacgaccagatataaggcgagacacaccactcggtggcatcacaacacacccgacacaccacgggccaaacaaaccagtgggcaacatcggcggcatccgtgcaacacacgcggaacacggctacacaaacaaaagatagccacaaagcgatagcaagaccgtccaccctccaaccaaaagacacagaagaacaaaaaacaagcacaaacagcctacaaaacacaacaaggaagagcaaaagcacccac

SEQ ID NO: 680227 - DNA, 824 bp, Homo sapiens
ccagtcaccgaggtcaaagggccatgggcatcttcggaggaaacaaagggccgcacaccgagttccagggtcaacaatggccgccccaaggagggttggccccaccccccgcaatcccgaggggggccacaccaccatccctgtggcagccccacaacctattcgcgcatcaggtccccgcgggccgcacaccaagagtccattcattggcgggcgccacacaaaccctggggcacagatcacccccacggaaccgtgctgcgccgtacgcacaaggggaccaccaaagcgcaccgttccgcgcactcctgtatttggtcggagaagcgcccctccattccctcggcacaccccggggggcaccctcgaggactttgtttctttcgcgccacaactctcgtaggttccacaaaagatacgccttccaccaattgagacgtctcgcgtgtcattcggattggcctcttggtaccacgcctccggaggttccgcgcggtggctgcacacctccccaccactgcgtgccacacttctttccacacggccgcacgctcgtttgtgagacccccatctgttttggtacaattcccccatcaagtctctctgtgttccccccaccctctgtgagaagaagacatttattcctcccacctgttctcctttactccggcattcttcctgtgccccctcgtccacaaacccaccaccaccgagtattcccctccccaggacactcgcgcgtcccctccgcgagcatccaaccaaccaggtgttctataacaccaaaaaaaataaaagcggaattctatcgcccaacaataaac

SEQ ID NO: 680228 - DNA, 444 bp, Homo sapiens
gctgggtggagaaggagacatactactgaccccattggaagaagaaccaggcatggaaagatggggagctctggaggtgttgtggggatggtgatggacagggatggagatagcggacggcatcgcactgcagcacatggggagtgataatgccgtcactcaccaggctaaacaggctgggatataactggatgacattgctgtagacaccgacaacgcaatgattcggcctgacgctgagtggtagggatatgttggactgactcctgattactacgctttacaaggtggcaactagattgggatgatttaaggtgagtccaactgtgtaaatttgaatatatatatatctatatctttcagcatagatcagcatccgcagcgtccggggtggtccagtacgcaattcgctctgagagccgtatcactatactggccgtccct

SEQ ID NO: 680229 - DNA, 976 bp, Homo sapiens
taaacccttaataaaagttaattgaagcacactcactcgtcgacctccccaccccgatccaagcatctcgcgcatgatgaaacttcggctcactccttggcgcctggctgatcgctccaaagtcaccgacaggactattcgctagcgcgatgcactacgtcaccagacgcctcaactcggcacttttcatcaatcgtccacatcactcgagacgtaaattatggctgagatcatccgtctaccttcacgccaatggtgcgcctcagatattctttatctggcctcttcctacacatcggggcgaggcctatattacggatcatgtgtctcgtactcagaatagcctgaatactagtcggcattcatcctcctgtcttgacaagctataggcagacagcgcttctataggctgatgtccgtcccgtgcaggccaagacatcatgtctgaggggccacagtaattaacaagagactgtgactatccggccatccgcatacactggggacagacctcagttcaatggaatctcgaggaggcttactcaatagactagtcccaccctccaaactgattctgtgtaccttgtcacttcatcttgcccttcgattcattgcaagccctagcaggactccacctcctattcttgcacgaaacgggatcaaacaagcccctaggaatcagctcccattccgataaaatcagcttccaccttactacacaatcaaagacgccctcggcttacttctcttccttctctccttaatgacattaacactattctcaccagagctcctaggcgaccagacaattataccctagcaaacctttaaaacccctcccaattcaagccgaatgaatttcctatcggcttaacaatctcgatccgtcctaaaactagagcgtctgcctattatatcatctatctagatatccatctcaatttcaaaaaaagtaattggcataccactttgccta

SEQ ID NO: 680230 - DNA, 672 bp, Homo sapiens
gcgcagacctggacacagagtcaacggtgcccaacgaggaaaacacctggttcagttacctgaaaaagggctacctgaccctgtcagacagtgtggtgacaaggtggcctgtggaatggtgacaaagaccatggggtcctgagagtaccaactggctgtgagaagtgggagagtgcatggagctatcctgacctgcttgttttcaattgcgtgaaactctactccgtggatgacctggactgggcggtacgtctaccagatcgaagtgcagcaaacgccgtgccctggtgtgattcttgtcctgacggcttgactgtgcacctgtggcagcaaacgtgcttcaatgtgcctgacatgtggctgagcagatgcaggaccgagctgtctgtcacgtgtgtgctggcactggtgccaaggagtgtgacgaccactacgggtgatgtggtgaaccgacgaacccggaagtggctcgacacgctgggtgtgagacataccaaagggatgcactcgtagtacaacaggacgaacctggggttgatgccaacttacaacggccattagcagccttgcttcccaagcatccagtcgcaaggcctatatacatacaagagactgactgacggcaatgaccggaaagaaggaatgtactaatgccagccaagcacgcaggac

SEQ ID NO: 680231 - DNA, 275 bp, Homo sapiens
ggcaatatggcaaactctagctttatagaaaatacaaaattaccaggcgtggtagcacatgcctgtagtcccagctacttgggaggctgagatgggaggatttcttaagcccaagaggtcgaggctgcagttagttgagatcgcgccacttcactacagcccaggcgacaaagaccctttcacctaaaagttgtcagatggatattgaggtaaaatcaaggtcccggcttggggcctttgctcatactttttataccagcacctttgggaggcca

SEQ ID NO: 680232 - DNA, 500 bp, Homo sapiens
  misc_feature (37)..(37): n is a, c, g, or t
gaaaccaaaacatagagaggtgtagaggtcaacaagngaaccggccgcatcttatttattacacatggattgacctagagatggaaggaatagtgaattaagatatggtgaacactgtttatcacaaagacccaaaatagcagtggcttaaatctgatagtttattcttctttcacatgaacgtttgagcagctacaggtcctctactatacggaatcatcgagagtcctgtggttcctgtttatactcttgtctatcactccaacataggtccgaaggtaagcgtcaactactcaaggtcgcacatatcccacgtacagtgggggagaggagagacccgcaacaagtgagtgggactcgatcacgagcttttaaagagacaacaaaaccagggggatacagacattgtggccctatctgataccactatacgctgattaaacgcaaggaagttaacactacaatgaactgctaaggagctgaagggacaccagaagagg

SEQ ID NO: 680233 - DNA, 508 bp, Homo sapiens
ggcttttcttctgaaagcaacctttaacaactgtgaaatgttctcatttcatagtgaataactgaaaatagaccctgtactgtttgaaagttcttccctatcatgtggtgaacctatttcacaggatgacatctaatctatctagttcagactacttcttttgaactcctaacttttcattggaaattttttggtgtttgcttatcctaaagcctgaaatgagaaggttattttttgcccttaaaaacctggaaaaatagggggactttttcaccaagggtttgggaaatttctatttcgaatattttcaagctccaaagattgggaatggggaaaattttggaattattcttttttttttcgccccattataacccgccgatggcctcttatttaaaggtccccaagaattttttttgttgcggaccaacccctttcccacaggggggagtgggttttttaccgcccacaccggggggggggaccgggctcttttctcttttcgccc

SEQ ID NO: 680234 - DNA, 425 bp, Homo sapiens
  misc_feature (294)..(294): n is a, c, g, or t
cacgagggggcgcgcctggtcgacgctgggccggccgctcgatccgctgacgcaggacgtctgcgccttctaccaggaccacgcggtctacgacgacttcggcggcgtggtggtcgagctcgacgaaggccagcggatcgccaatgcgctggggcccaacaaggccgtgatcctgcagaaccacgggctgctgacggtgggccgcactgtcgacgaggcggcctggtggttcatcacgatggagcgctcgtgccaggtgcagttgctggccgaggcggcggcggcgcgccgaanacgatctcggacgccgccgcgcgtcaggcctattcgatcgtcggcaccgcgcaggccggctggttccagttccagccgctgtacgcgcgcatcgtcaaggagcagccggacctgctcgactgacgccagat

SEQ ID NO: 680235 - DNA, 305 bp, Homo sapiens
  misc_feature (188)..(188): n is a, c, g, or t
gtgggggtgcctcttcctgggcgcccgccgcctgcatcctgctcgccctgtctgggaatggggccgcccccgctcctggcgcgtggcccgaggtcgccgttgacgctgtgcgccacagtatgggaggacgcgacgcgtgactgaggaagctgagtcggcagtcggagtcgtgccgtgtactgactctnggcagtcagatcgtgggggctcatgggcgcttactcagcggcagtcaagttcagcgagttgcttgtctcgggctcgcatgtggcatgtggagtgcgtggaagtgacagagtaccaca

SEQ ID NO: 680236 - DNA, 116 bp, Homo sapiens
gcaagatggagttagtgcagggtcctaaaacgcgggctgcagcagatcaccgggcacggcgggtcttccgaggctatctacgggtttttttcaggcaaataatgcaaggttggtac

SEQ ID NO: 680237 - DNA, 774 bp, Homo sapiens
gaattgggactatatacaaaattattaattggccaggtgcaatggctcatgcctgtaattccagcacttgagaggctgaggcaggaggatcagttaagcttagaagttcaaaaccagcctggacaacccagcaaggcccgcttatctaccaaaaaataaacaattagctgggcatggtgggacatgcctaaaattccagcaactggggaggctgaggtaggaggatcacttgagcataggagttggaggctgcagtgagcagtgatcataccactgcactcctgcctgggtgagagtgagactctgtctttaaaaaaaaacaaaagctcaagagttcaagaccagcctggggcaacgtagtggagacccggtctctatgaaaaaaaaaacaaaaaaacaaagcaaaaacagggggggggcagggagcccggagaaaagacgtttctgaagaacaacaggcgggggacgcgaggggagccccaagaagacagaaggagaacaagcaggggccacaacggggtgttacagcacggagaaagacccggggcgagagacacagagccggcgggaaatcctcacaccagcaaaataaaagaaacagcggcgcggaggagagcacacgagaagagagggctgcagaaaacaaacgacccaagaagtaggagagcacgcagcagagggagccacactgggcgggaactcaattagaaaagcggggacccacaggaagccaagcgcagagtagcagacaaaaaccagccccggggcgcaggg

SEQ ID NO: 680238 - DNA, 416 bp, Homo sapiens
ttacgtattcaatcggctcgtgcctcatatgtcatctgtgaaatgcaacaggtcggtggtaaattcaggatctagagcactatagagagcctactgcctgggctcaaaagctaccacttactgaacgtatggcctctaaacagttcagttactcaagctctctgggcatctttatttgtcaaatgatgatcatcatactacctatcccacagacctcggtagagttaaactgagattatacatttcaagcacttttgaacaggcttgacatacatatcatctatttccttttttaatttttctcccctaaatattattattagagaccagcaaatcttttccattaagagccagataataaatatattaggcttcaggggcacacatagttccatgttgtctagttttcctgtttt

SEQ ID NO: 680239 - DNA, 261 bp, Homo sapiens
gctccttaaagctctcaggaaacagatactgccatgtctcctgtacagcctgcagagcggtgagccaattaaatctctttacatatgaataacccagtctcaggcattccgtgtttttggccctgaacgtggactctatgcagcttgtttgtccaggctggagtgcaatgggctcaatctccgctctctgaaatctccacatccggggtacgaggcattccccgtgccccatgcctcccgcagtagctttgaacgagcatt

SEQ ID NO: 680240 - DNA, 969 bp, Homo sapiens
agcggagtcgcccagccgcctggccagtcctacagcaccagctcgcccatcaacatcgtcgtgtcctcggccggcctgtccccgatccgcgtgaccatcggcccgcccaccgtgcaggtccaccatctcctccgtcgcccatccacgcagctgagcgccagcagtcggcacgtacgccaaccgtggtcgccacaccaagcgcctggtccacgcgtccgagcagatacagcgaagcagctcgcgaggagctgtatgcgcacggacacacctaccagaggccgggcagcctggcagctggttcccgagcctcatacacgcagaccagcatgggcacactgggcccagagttgacgggccctgacaggtcgaccagaacaagcacatagatcccatctatgaaggaccgagtctatcagaagccccctatgagcgcagtcatgcggacacagagccagggggaccccactgccgaccagacacagaacggggcctgaacggcaaagagcaaaagaaccccaaacactaacacactgacgacggcagcacgtcacatcaccccatggacagaagcacaagagcaagaccgagcaaacgcgccgcgcaagacagcgaacaacacaggcaccaccactcacaaaaggcgcaccaagccgccactgtacaccacaaccgggcaccaccaggccccacccgaccagaccgccagcggacagcccctgagacacgcaggaagaagacacgagcaacacggacaacataccgaggcacagaaacacgacaacgcgaagccagaaaggaagcaacgaccccgacgagcacagccacaacgagcagggacacgaacacgaggacacacacatagacacaagacagcgacaggacaaacgcgcaccatgccgcaacaaggactaccaaacacaacaaagcacaccacaacacacacgcacggcacacgcgaccacccccacc

SEQ ID NO: 680241 - DNA, 973 bp, Homo sapiens
ggccatctacaaagggaaccccatgaggctaacagcagatctctcagctgaaatcctacaagccagaagggattgggggactatatttaacattattaaagaaaatcttcaaccaagaatttcatatccagctaaactaagcttcctaaatgaaggagaaatgagatcatttacagacaagcaaattctgaggtaattcattaccaccacatctgccttacaagagattttagaaaggaggactaaatatagaaaggaaagaccactacacactaatacaaaaacatacttaaacacacagaccagtgacactataaagcaaccacacaaacaagccaacataataaccagccaacagcacaatgacaagatcaaatctacacaaatcaatactaaccttgaaagtaaatggacaaatgccccaacttaaaaaagggcagaggtgggcaaggcttagattaaaaaaaaaaaaacaacaaaataaaaaaaaaaaaaaaaaaaaaaaaggagggaaccccccaaggggtttgtgtgtgtttttgaaagagacccttttcaccttagtgtggacccctttctttgtttcacataaaaaagggggggggggaaaactttttccagattttaaaaaaaaaaagggggggggggggaaaaaatttcacccccgggggggccccccaattgggtacccccttttttgttaaaaggggcccaaaggggggttaataaagcaagcaacggggcgggtttaaaggttggtgtcgggaaagacggtcatctggaacttggaggagacctttttcgggcggcgatcatgcgacacacccaacatttaagctcgggaaaaaacgtaggtaaggggacccagcatattgctgaaatgctcggttatgataccagtgttcgatgatcgggaggggagtaaagatagagtgaggagtgtgaactgatgacgaggaagagtgatgagatg

SEQ ID NO: 680242 - DNA, 469 bp, Homo sapiens
gtgtgattgtgagcaagatatttatctctttagcccttggggatcccagctgagagcaatctcttgcattttttgacccgtgtatgtacagatatcatttcttgtgtatgccatgacttgaaacaagtccgggaagctctttagcaatatcagctaaacaggatatgaaatcacaggtgatagcagtcgtcattcagtaatttcctacaagcagaccccaaaggaactatagtcctaatctttactatccacttctaaatttaattgtgaatttccatacatgtcatcagatgtctgctcgcataacttttataaacacattattcatcgcggagtttaacttccagattccatgctatcggaatggtgtcgggctaccatgcaagaaacttggaagcaaacacacggagggaatgcactgctgcataagtggacccaaatcatcatttgcatgcaatgagaaattatt

SEQ ID NO: 680243 - DNA, 113 bp, Homo sapiens
tatctctaacattaaaggtataattattacaaatagtagttcatgcaacagattgaatttcaagaacagatatgagactttgcgttccttgattagtggagtaccgagactcg

SEQ ID NO: 680244 - DNA, 352 bp, Homo sapiens
cgcagtggctcacacctttaatcccagcactttgttaggccgaggcaggcagatcacgaggtcaggagatcaagaccatcctggctaacacagtgaaacccgcctgtactaaaaatacaaaaacaaaattagctgtgcgtggtagcggccgcctgtagtcccagctactcgggaggctgaggcagaagaatggcgtgaacccaggaggcggagctttgcagcgagctgagatcacgccactgcactcctccagcctgggtgacagaacgagactcagtctcaaagcaatttcggactatctagtgctgaagacatgcatactctataactctataactcaatattccccctg

SEQ ID NO: 680245 - DNA, 311 bp, Homo sapiens
taaactgacgcgatagtcagacggagtctttcatgctgccactgacgtcaacttaaaatgaccacgttttcggagaagtgctgcctggatgtaccattttcggttcctgcagtcgaaggcaatgactccattctcatctggttcccatttaatcccttggtggtacgtgttcgttggtacttggacgtcacttagactggatgttcacaggcaaattattaaaatggtcatttggggctaagatgaattcctttcccagctccaaaaaattcccgtcttggtccctttcatttatcagcacagcattgaag

SEQ ID NO: 680246 - DNA, 177 bp, Homo sapiens
tacagtgtgatgtctaatgatctgtgctgtataaaaacattaacccttgtatcaaaacagagatggataaactgggtctttctaagtggtaagaatgacctgtcactatatatactgtatgtctacattttatttatatttaatctcttatgtatagggtgataaccttccccagaa

SEQ ID NO: 680247 - DNA, 425 bp, Homo sapiens
acttcctcaacagggcgctggatatttttaatacctccctggtgttccccatctactacgtgttcttcaccacggtggtcgtcacctcttccatcatcctcttcaaggaatggaacagcatgtcagctgtggacatcatgggaacccttgctggctttgtcaccatcatcttgggcgtgttcatgcttcatgctttcaaagacctggccatcagctgggccaacttgccccacatgcacaaaaacccaacaccacctactcccagcccagagcccactgtcattagactggaagacaagaatgttcttgtggacaacatagaactttccagcaccccatcaccagaagagaagcccaaagtatttataatccattcgtaaagctttgaatacaggagcgacaggatgagcctgacagtacagctt

SEQ ID NO: 680248 - DNA, 119 bp, Homo sapiens
gactatactcagcgggactctcgtccaaccggtgtcttctcagaaagcagaggacccagctctgaccaaaccacataaccttggatccgtccgctgtcatcctccatggtgctagagga

SEQ ID NO: 680249 - DNA, 119 bp, Homo sapiens
ctggcttaaggagaaggtgacattgtcagctctgacagcgtcacccagatgtctccagcatggtcctgttcctccttcactgtgggtggctaagggatcaggctggagggggccgcgcg

SEQ ID NO: 680250 - DNA, 1546 bp, Homo sapiens
tctttatctttttttgtgggtgctgattttgtgctctgctgttgtgtggcatcctcctctggtgtctagtcttcttcttctagtggggtcggtctgttgagagatagctggtggtgatcgttttaggggcgcctctctatccctcgccctgttgtgggcgcctttttaattccgcgtgtgtgggcattctttatgcggtaaccctcgtctgctcgctcgtgtgtcacggctggtgttgttgtgtgtccccctattggagcctccctttctccactgggaagatttttgttggtgacggtgggcccccggcgtttgtgccctcttggtgctcgtgctgtttgaggggtggttactcaccgctgctgtggaaaggttgttgggctgcaccagagctgctctgtataggcgccgccccataatttggtgtcccacagaaatgtcgcacaatttgtggtagattataggtgtgggcaccccgtgggatgttgttgtgatactttgggaaacagcgggaacaccctttatttaatctgtgagtagagaggttgtctggttgtcttctctatcgagggagttgggggggaagagaaaggcggcttgtgttgtaaatgtccacagaagagtgtgtcatgaagagcccctgtagttcctctctcgtttatttttttccggcgaaaatatttgtagagctgtttaagcttttagaggctcgttatatctcgcgcagatagacctgcccctacgtaatcgacatttgggggaaactctcccctctgtacacgccccccttaccgagggacccctcctctgggagatatataacgcccccatgaatggtgggaaatatgcacagaggggagcttctctcgagagggtggcccacaccccccacgaaagccctctttgtgtagaaagagtgaatgatagagacagtgttttgtgtaaataatatagcttattatttttaagaatattctacacttgcacagagaagcactggtagagagagagagaagagatataaataaagaaccccccactttggggtgtggggggtgtggggggaaggcccaagcggtgttaacacagagagtgataccacacactctaacggggtttttgtataaatgtatcctccacattctggaattaccctctgttatattgggaccacctatattttcgtcacgcacctatcacccggtggttgtgcacattgtgcttaagaatggccacgcgagaaatggagaatggcccacacacatgtagaaaggttaatgtttggcacacatgaacttctcgagaaagagattttgtataaatgatttttataaactcttgtgttgagaatggggccctccccctctcttcctctctgctgtttttttaaagttttagaagccacagaaaggccctctccccacccctgcgtttattgggtgtgtaattgtattgtaaatgggatgacattaaccctaactgtgctgggaagaaattgtgccctgaaggtcctttaaatttttttaattaaaacaattttaataaa

SEQ ID NO: 680251 - DNA, 222 bp, Homo sapiens
ccagacgcaccaaggagggactgaatgattcactttggcattcgactttcatttatgctttcatttcatgtaacatgtagctattccaggctccaggctgaagcaaccatgagcctctgcctacgagtagctcacagtggtctgggcggacacagacatagagatgcatcgagagcaagcccagaaggactggctgacaaggcttcctgtaggaggagactg

SEQ ID NO: 680252 - DNA, 126 bp, Homo sapiens
gagaagtaggaaaacatacgtatactgcatatagtgcattatcaccatgaagacttttcagcatgtaagattaagacaggacagtgctttaaaacaattgcatggatttgggtttgcctattcaaa

SEQ ID NO: 680253 - DNA, 278 bp, Homo sapiens
gctgccattcctaactgcaaaatggatgttataaacagaaccttcacttccttccatggggaactttcaaagagaagtcatctgagggtgtctgtaggtcacatgcctgcatccaagaaaacatggagggtgggggcggtggctcacgcctataatcctaactctttgggggtccaaggtgagtggatcacttgagcttaggagttcaagactaccacggcccacatggcaaaactccatcactaccaaaaaaaaaaccaccaccaaaaaaccaggat

SEQ ID NO: 680254 - DNA, 862 bp, Homo sapiens
  misc_feature (464)..(464): n is a, c, g, or t
taaaaacccccttcaaaaaagggaaacttccaaaaatatccaccacccccttttacaaaaggccagtttcgggggggggttccaaacccaaagggattttgggttttaaagggaaatattattgggggagatagaacgcaaattaatgggagaggactgttgagcccccaataattggccatagaatgcccgggggaacgccttttgtgcctacacacaacaattggtttagacgccggataaaatggccgtgcggagaaaatgttgtagaaggtgagaacatctcagaagatcacttcttagcagcgcctttgatcgagcgagggtgtaaacatatgaaacaccctcagataacccactgtgtacaatcacacgccgtccgctcgagacaataatactgaggcgtccacccgtgtggcgtgctacctctacataccaacaacctaatggaggtgaaaccccanagcgggatgcgaatgacagaccaaccacccaggaagatatcgcacaaaaaaaacaaccggagatttgctcttaactcaaagacgtgagggacacccctcaccaaaaggagagcaatcaccacaaccggcggggatagaccatcccccttcagtacgagggggcaccacacggcccccactccgctaaatatcgcgaggagcgatacaaagcgagaacaaacgcgtagcgaacatagcacgacaaacaagcgggcccccaaacaaaacaaatcttcggcgccgcacgaacacacaaccaccctcctcgcaacgaagcaagcaacaacacgaccattcaccccccccatcatccaaccgcgcacttctggaggaccaccgcagatcggctatcaaagcgc

SEQ ID NO: 680255 - DNA, 184 bp, Homo sapiens
ccacttctcagaccgggtgctgtgtgtgctgtgcgtttgtgtgtgtgctgtgctcgtgtgtgtgctgtgttcatgcgtgtgctgtgtgttgtgtgtgtgtagctgcggtggatgcatacaagtatgacgtgctttttatggatgggacattgagatgtaacgatttgccgcaggtggacgcggg

SEQ ID NO: 680256 - DNA, 342 bp, Homo sapiens
caggcatggtgggtcacacctgtaatcccaacactttgggaggccagggtgggagaactgcttgagcccaggagttcataccagtctaggggcaacatggtgagaagttgtctctactaaaagtaaaaagaattagctgggcatggtggcatgcacctgaggtcaggtcccagcgacttgggaggttgagaggttggaggattgcttgagcccaggagatgaggctgcaatagcatgatcacgccgctgcacttcagcctgggtgacagagcgagagcctgcctcaaaaaacaaatatgtttcaacttttttataataaatatgttcattttgcaactagca

SEQ ID NO: 680257 - DNA, 229 bp, Homo sapiens
ctcggtttaacccattcatgattgtgaaaatcctcgtggtctccactgtaggactccacaaccatttacccatgttctaatacaatcctagtgactcaaggcttcaacaaacctaaatgagccagcagaaaaataaacttgaacatgaatgtcaacgtttacccacatgtactacagggttatcataattatgaaatgtatatatcaaagagcgttggtaatttaaacc

SEQ ID NO: 680258 - DNA, 110 bp, Homo sapiens
ggcaggtccccatcgcaggtctgcccttgctaactgtgagacctctccgatcatgtcatgcacacatcatgaagccgcacattttcatgcctgctgcgaaggtgcctact

SEQ ID NO: 680259 - DNA, 208 bp, Homo sapiens
ttgatattgtcaaggaattctaccagccatgcatatttgtgcaaatcaaaagatggattgagcaataatggtgcatctttcttcgccatccatttaataccttttaacacagtggatttttgattccacacttcagcattacacgcagacagctgtccaccattggcaaatgatgtttccattgcgggaaataaatgtttatcaataa

SEQ ID NO: 680260 - DNA, 646 bp, Homo sapiens
gcctgctgccacctctcagcagctcatgtttttccggcgatccgatcgtctgcgtttatctgccgcgatcgctaagggacaggacagacgatcgtcgccgctggctcattgacaatgacacctgggcatgatgcaaaggtcgttggtttctgcttgagtgaccgagcggctcgccctgaaccagtcgtattcccttaccgagtcgctcgcggtctgcaccctagaactagcgcagaggtcgctctatcgcggtgcgtgcgaatggcgcctaggaaagggagctcgcatagcagatgcttcgtagggaaggacgccagaagccaaggctgtgggcaatccttgcacgcgctgaaaggttggcaccacttggaagcataggtcctcagtcaaccatgcttggagaacgagtatgagagtaagatctgggggctactagctttctagcaactgaagctgtcgcgatggtcccggggaggagcaacaagtggtttggttgaactgtatgtcccgcacgtgtaatcgctcagaggacgtaacagatgacgaccgatagattgcgagattatagtgacgatgatcgttacatacattcccttggacattgttatcgtcgggacattcgaaggcgcaggaggcaagtcgccgg

SEQ ID NO: 680261 - DNA, 179 bp, Homo sapiens
  misc_feature (16)..(16): n is a, c, g, or t
  misc_feature (37)..(37): n is a, c, g, or t
  misc_feature (46)..(46): n is a, c, g, or t
  misc_feature (52)..(52): n is a, c, g, or t
  misc_feature (62)..(62): n is a, c, g, or t
  misc_feature (79)..(79): n is a, c, g, or t
  misc_feature (102)..(102): n is a, c, g, or t
  misc_feature (107)..(107): n is a, c, g, or t
  misc_feature (109)..(109): n is a, c, g, or t
  misc_feature (123)..(123): n is a, c, g, or t
  misc_feature (133)..(134): n is a, c, g, or t
  misc_feature (136)..(136): n is a, c, g, or t
  misc_feature (179)..(179): n is a, c, g, or t
ctaatcagttacgagntgaactagagaaacatggttntaagatggngacttnatagcatccngaagaagtgttgaagtnacctaaacttgacctgcttaatncattntngggcagagaacccnggatgggacnntnaaaaaatgtgtttatttcattatctgcttggatttatttgtgn

SEQ ID NO: 680262 - DNA, 246 bp, Homo sapiens
cgagctcggcacggctctcgtgaactcatttccattggtcagtacaaaaaaaagagattcttaattttagattagtctttttattttctgatagttttataaactctaagtattggcagggaaatgtatagatgcggaagcaacccctaaaattgagcatctatggagagcaattataattcactacaaaatgtacctgaatttctttgtcagagtcaataagtctcacgagcagtctcacgggga

SEQ ID NO: 680263 - DNA, 233 bp, Homo sapiens
  misc_feature (94)..(94): n is a, c, g, or t
  misc_feature (225)..(225): n is a, c, g, or t
cgatctcgtatgaacgagcttggcgtgtggacatgccgctcatgacgagactatgcggaagtcgcaggaagaagttgtcgccgagctgcagganctggtctatcaacatccggccactggcgcgtggcagacccgcgatcaatatctgtccggcaacgtgaaagagaagttgtcccaggcaaagatcgccgctcagcaagatccccggtacctggcaaacgtgtntgccctca

SEQ ID NO: 680264 - DNA, 644 bp, Homo sapiens
atactttaagttctgggatacatgtgcagaacgtgtaggtttgttacataggtatacacatgccaggtggtttgctgcacccatcaacctgtcatctacattaggtatttgtcctgatgctctccctcccctagacctccaccccctgacaggccccggtgtgtgatctcccctccctgtgtccatgtgttctctttgttcaactcccatttatgagtgagaacatgcggggtttcgttttctgtttttgccttaatttgctgagaatgatgttttccagcttcatccatgttcctgcaaaggacatgaattcatccttatttatggctgcatagtattccatgctgtgtatgtgccacattttttttatccaggtgttcattgatgggcattttggtttggctccaagcttttgctatttggaacagtggctggaaggaacattacgttgcatggttcttttatagtaggatgatttattatcctttttattttatagattaaagaactggggcttttataaaggtaagtcaagaagataccagctcttaaattattggttttagaaactttcaacttggccttttatttgacttaagaacactttatatttaaaccctttttattttcaggtcttatttccc

SEQ ID NO: 680265 - DNA, 210 bp, Homo sapiens
ggaaacccccttataaaaacccttatagtaaatgggggcattccctataatgatttaagaagctccagattgtcatagttgttttcctgctttacaaaattgctccagatttggaatgccagtttgacctttgttttttaaaaaatttcctttttttcccctctttgaatctctgtatatttgatttttaactaaaattgtttttttaaa

SEQ ID NO: 680266 - DNA, 233 bp, Homo sapiens
  misc_feature (43)..(43): n is a, c, g, or t
  misc_feature (46)..(46): n is a, c, g, or t
  misc_feature (77)..(77): n is a, c, g, or t
  misc_feature (134)..(134): n is a, c, g, or t
  misc_feature (187)..(187): n is a, c, g, or t
gatgttaccaagtttgccctctatacctgggattcatcccagngcncacccttcacctccaagggcaacttctaccnccgggaaatattccttggagtttaggagcatgcataacccaccttcatctagttttnctggaccctctcaaccctgctgtttactttccatccacgggaaataccttttnttgaagaagaaggtcatagactagacacagttagagaaaggagaga

SEQ ID NO: 680267 - DNA, 318 bp, Homo sapiens
  misc_feature (26)..(26): n is a, c, g, or t
  misc_feature (70)..(70): n is a, c, g, or t
ccgccccttccgttttccctactttngggggcccctccctgttgttaggaccggactccttattggttantgatgttttgcggtatcacccccaactttcataaacatcgctcccaacccaggttttggcgggttaaaaaaaaaatgaaccccccccccaggaatacccatcattgtttggtatttttgagttcaaaataattatggcctagtagtggaaagggagtagcatctaattagtattttttagtccaccttgttgaccaaaaaccaaatgatttagtcagcagaattttgggggttagagttccttgttta

SEQ ID NO: 680268 - DNA, 206 bp, Homo sapiens
cacccgccaccacacccagctaatttttgtacttttagtagagacgaggtttcgccatgttggccaggctggtctcgaactcctgacctcaggtgatccacccgcctcggccttccaaagtgctgggattacaggcgtgagccaccgtgcctggccagtataggttttttctttcaacttgatctgtagaaaatggacatcaagtt

SEQ ID NO: 680269 - DNA, 91 bp, Homo sapiens
ggctcgcgagtagatacccatttggaaaagttcctcaagcatagacatgcaacacctaaggcaagagaggaaaaagaaacaaaggatttac

SEQ ID NO: 680270 - DNA, 143 bp, Homo sapiens
  misc_feature (105)..(105): n is a, c, g, or t
gccgggtgatggccaggaaggtgccctctgttttttgtaaaacagccattggcctttgtcattgagtcaccacctgcagggcttgggagtgagcgttgggtaggntcaggcccccagaaccgcctgggtactcaccgctagca

SEQ ID NO: 680271 - DNA, 1009 bp, Homo sapiens
  misc_feature (1009)..(1009): n is a, c, g, or t
ggaagtggacatgcagttgttaaatcctgccgtggcaaatccgctgacgcaccggcgtgatgtccaggaagataggacgacctggaaatccaactagttccttaagatcatccaactatggatgattatccgaaattgtttcatggtgggagctcgacaatgtgggctccaagcagatgcagcagatccgcatgtcccttcgcgggaaggctgtggtgctgatgggcaagaacagcatgatgcgcaaggcatccgagggcacctgtgaaagacaacccagctctggagatactgctgcctcatatccgggggaatgtgggctgtgggttcaccaaggaggacctcactgagatcagggacatgttgctggcagtaaggtgccagctgctgccgatgcctggtgccattgtgccccatgtgaagtctactgtgccatgccaggaacaggtggtctcgggcccgagataggacctccttgttccaggcttgaggtatcaccactagaaatctccaggggcgcattgaaatcctgagtgatagtgcgaagctgatcaacgagtggagagaaagtgggagccagcgaagccatgctgctgaacatgctctacatctccccgcttctcctttgggctggttgtccagcaggtgttcgacgaatggagcatctacaaacctgaagtgttgtagcacgaggaaactctgattcttcgcttcctggagggtggtcgcatggtgccgtgtctgtctgcagaatggacccactgtgctagtacccatctatatcaacgggtcaacgagtcgggctggttggggaggttaacctcccctgtgacaggaagcttggggacacttgcttgtgggggccctgtgttgtcacacgctcttggtgacgccacagagagacgaatctgggggaattagctctatacacaacacacattagaaagttctaaaaaaagggatgctcgcctctctactgcttgctgcatactatatattcagcatcagn

SEQ ID NO: 680272 - DNA, 146 bp, Homo sapiens
cactcttgttcttacagctgctccttgttatctccgtgaggctccagacgtgcgcagtggcacgctccttgttcctccgtgccacccggatcaggtgaccatggaggctcccaggaagaggatcaacaccataactaactgccccg

SEQ ID NO: 680273 - DNA, 193 bp, Homo sapiens
  misc_feature (11)..(11): n is a, c, g, or t
gcggatcgcanctggaaacgctggagaccttggcccgatgagcaggattcgtcgtgggcctggcaggtacgccggcacagcaggccagcgacatcatcatcgcgcttgaaagcgccggtcgcgcctgacgctccggctcagtggatcttctcgccacgcgcgagcatcgccaccagcttctcgccataagcgc

SEQ ID NO: 680274 - DNA, 449 bp, Homo sapiens
tgaaattaaatatagagaacaacaattaggtatccacatgggtggggataatatttacaaagtattggtatggggcttaaatggcttatgtatgtaaatatcaagcattgtatacagcatataacagacataatagtaaataacagtagctattataattaataataaatgtacaagtcgtattagtatacccactagtagtatataatctcttggagctagaatagctctaaaatgtcattttgcccaaaacgcacatcaacaaattccttctatagattttaagcaggaatcatctagcaataggaatggttactacctgaatcctgccagtgataggacaggtcaccacttaatgctaacatgttttcctcataacaagttgaagtctgtctccctgtaatatctacccaccaaatctatacaataaaatcaatactcctgcaaaa

SEQ ID NO: 680275 - DNA, 641 bp, Homo sapiens
ggacgcgtgggtccggacgcgtgggtcgacccacgcgtcgctcttgaaaaatgagatgatgtggccaggcgcagtggctcacgcctgtaaccccagcactttgggaggccgaggcgggcgggtcacgaggtcaagagatggagaccatcctggccaacatggtgaaaccccatgtctactaaaaatacaaaaaaattagctgggcgtactggcatgcacctgtagtcccagctgcttgggaggctgaggcaggagaatcacttgaacccgagaggtggaggttgaagtgagccaagatcgtgccattgcactccagcctggcgacagagtgagactctgtcccacaaaaaaaaaaaaaaaaagatgccgcaacccacaagtcaatgaccaggtccctcttgtgtgggtggctgcatctgggctctccgttagccccccttccaacttgctccaatcgcttcctgcctgtggggtggcaggaattagagtgcgctattcccggtttattaacccggttctgcagaaacctatttatataaagattttattaagacagggacaacaatatagaagaacacgtacataaaagacacaaataaaaacaaacacaaatcaaggcgcgcccacaaaaaaacatcccg

SEQ ID NO: 680276 - DNA, 414 bp, Homo sapiens
cttttacgtcggccttttgagcgtctgggcggttgttaggtgagtgggtattgcgggctagtatccgagcgatggtggcgcaggccgagttaagagctttaatcctgtgaagacatcttagtgaagagtttagagtgctgagagctgaaagcttgcacgtgcgcgtgcgctcgtactgccacatgtactgaggttgagtcttgacgctcacaggctcctagttttcgcgtgaggcaccgctcttcggccacgctcgcccgacttcgctgcttccggtatgtgccctcatcgccgtcgcaattcacctttactcgcgctgcacctctagcccctacccttctatcctcctttcttcctctccccgactcgtcttccccatccagtcttccctaccctgcgcactcccctcccttc

SEQ ID NO: 680277 - DNA, 82 bp, Homo sapiens
caaaaattcaaatgtcttcttaaaacctccacaattgattctccccctgtgatgtaaacttagatatccctaaaaaaaaaaa

SEQ ID NO: 680278 - DNA, 693 bp, Homo sapiens
  misc_feature (92)..(92): n is a, c, g, or t
  misc_feature (157)..(157): n is a, c, g, or t
  misc_feature (159)..(159): n is a, c, g, or t
  misc_feature (205)..(205): n is a, c, g, or t
  misc_feature (214)..(215): n is a, c, g, or t
  misc_feature (236)..(237): n is a, c, g, or t
  misc_feature (246)..(246): n is a, c, g, or t
  misc_feature (248)..(248): n is a, c, g, or t
  misc_feature (282)..(282): n is a, c, g, or t
  misc_feature (286)..(286): n is a, c, g, or t
  misc_feature (341)..(341): n is a, c, g, or t
  misc_feature (352)..(353): n is a, c, g, or t
  misc_feature (405)..(405): n is a, c, g, or t
ccacgcgtccgggctaattataattcagcgttatttaagcacataaagaccaaaaaaaaaaaaaagaaatccaaaagatccaaacttttttnaaaccttaaaaaatctcttggtagtatgtcagtggcactttttttctgccataatgtaacgtagntngccccgtcaaaaattcaattaaaattcatgggccagcaatcctgtnccccctcannatcctgatttaatttccctgnnggctttggntngcttctccatttaatagttactgaactttatgcntgtngatctatatggatttcactgcagttgaatgaacaaattatttcagtggtgacagncatgactcaanntcccaattagcttgaaaagggtacttgggaattggtcccatattaatcaganatgggcaaaaggaaaaagttctcatattaccagggtggaattggtggtctcatttcaaatttttaatttaaaattatgggtttccattttggtttaccttaaagtggatgcttaaaagtgggcatgtaattaggacacttaggttggtggaaagcatttcgacattggtatacaaagaattggtgataaatatatccaggtggctcaaccaaagaaccttgttttaccaaccttaaatcagattttctacctgatagtttcactcattatactcagaggagagactgt

SEQ ID NO: 680279 - DNA, 842 bp, Homo sapiens
ggagagagagaactagtctcgagttttatttttttttggtattagttaattcataatcataaacttactctgcaatccattaggcttgggagggaccccggaaaacttggaacccaaagggactctgcgcgaaaccccaaagattctaggatactgcgagcacaaattgggttggaggggtgctctcctgaggctacagaaggaatgatctgggtggctaagataacaccacaagtcacacttattcgagttgtccacagcagcactggctgccatctccttgctgatcttgccattccgtggacccaaagcgctccagtggcctcccacaactatctcactgcctctcttccattttgccaacccaccaccttggcttgccacctccacccactcagctctggcgcagtgccctctcaacaacctgggacccatttggcgctcggcctccccgcactttgcccctgggccaacgctcccaggccccgtaatcgcttcagcgcatgcacgtccctcctcctccacattctcccccatccatgccctcccccccggtcgcattatggcgtgtgaagtcccacccctgaccctaccccctggcaatactccctgtgcaccgctgtgaccccatacttgtgccccccgccccgcaccctgggcttctccccacccctgcggcctcctgccccacaacaccgcggcccctgcatgctcacgccggacgccgcgcacccctgcgcccgcgcacccaccctcacaccgacttccgcggccaccctactcctgactcccgtctgccccgctgggtcatacacgctcgccttccgcgctcaccccctccc

SEQ ID NO: 680280 - DNA, 100 bp, Homo sapiens
ccctggcagggtaatataaggaggtgagatatgcatggcttggaggggggagccatcttatgtaagggcaggaggaagagagccgggaggggtaccgagc

SEQ ID NO: 680281 - DNA, 404 bp, Homo sapiens
cacaaatgagaaaaatgaagcccagggaggttaactaatttgcctaaatcaccagcctagtaagtggtggtgccaatttttggaccctgacagtctaactccagagcctgaaactttaccagctgtctccgctgtggtgcaagagaaatgctgaccatggcgatgtgaattgtctgctgcattagtagatttaacaaaggcatttgatttgttaaatgggttccaatgtagaaatgataccaaagatccgctttctagggaagctggtgcccccatttctttccccaggggattatcctttgggttttccagcccgaggaatgttaaccgcctagggtgtgaccggttatcccaacaagttcggtgtcctctacccataaatttagtttacagatttcagcaaa

SEQ ID NO: 680282 - DNA, 192 bp, Homo sapiens
gtgaatgcccatatttttcttttattgtctttcatattactgtgcacttttctcttcattttctatacttacataagctatccattgattaatgaaatcgcttgtcttcacttttgtctactcgagtagaccacgagtatcatagagagcattatatctttgcgctcattgctgcatccagggtctcaagtg

SEQ ID NO: 680283 - DNA, 444 bp, Homo sapiens
  misc_feature (23)..(23): n is a, c, g, or t
  misc_feature (28)..(28): n is a, c, g, or t
  misc_feature (68)..(68): n is a, c, g, or t
  misc_feature (106)..(106): n is a, c, g, or t
  misc_feature (114)..(115): n is a, c, g, or t
  misc_feature (117)..(117): n is a, c, g, or t
  misc_feature (126)..(126): n is a, c, g, or t
  misc_feature (133)..(133): n is a, c, g, or t
  misc_feature (145)..(145): n is a, c, g, or t
  misc_feature (377)..(377): n is a, c, g, or t
  misc_feature (397)..(397): n is a, c, g, or t
  misc_feature (413)..(413): n is a, c, g, or t
  misc_feature (431)..(431): n is a, c, g, or t
agccccagccaccatataccccngcagnttgcactttaattgatggtagttcagttggggtccctgcnctatggaagttttgattgatttacttgcccgtcccacncctcttcnnanctcaatganatctgangtggatcgccangttcgaggagaggttatagataaaactaccagtggcagctactcaagtcctatctccactgttagcttcctccaactctaattattaacctatattcttgccaagctaactattgactataggtttgcctttcctggagaattaattgagcaattgaggagtgtctcaggatagcacaggccaaggtaggggagtaaaaaggaggtcagggcaaaaagggaggagttttctngtcccttttcccagggtttnaccactccaaattttnggtaatcccttttccaangtgctcttttcta

SEQ ID NO: 680284 - DNA, 513 bp, Homo sapiens
ctatgtcgtgtatgtgtgtaggttagctgtatgttgtcaagatgtgacagcaagccggccatgttatgtaattgtcacaagtcgtaattatgaaggactttgatgtacatgatctgtcttcttaattgtttatgtttgagtcaggaatgaccttgatgaaattagatcactaaaatcagtcacaaaagcaaagttggagtctcgtcagtctgaactctctcgtctgtgtcctgtgagaatggtttcatgtcataaaaagcatcactttcgtttaggactgagttgaatgaataatcgaatcgcaagtcttgtctgtgcattaaattgtacccaaagtattatgtttagaacctaaatatcaacacagtaattttgtgaaattaatcttgtgttatcctttatgtgcatccaagtctgtcagaacagtgtttcgagtcacacgaaaaagtcctacggttttgttaaaagttttattcctgtacatgaaataaagttgaccccatagtaatgcta

SEQ ID NO: 680285 - DNA, 438 bp, Homo sapiens
  misc_feature (235)..(235): n is a, c, g, or t
  misc_feature (248)..(248): n is a, c, g, or t
  misc_feature (288)..(289): n is a, c, g, or t
  misc_feature (340)..(340): n is a, c, g, or t
  misc_feature (388)..(388): n is a, c, g, or t
aggggtcgggctcggccgtcgtcgttgttgtcgccgcatccccgcttccgggttaggccgttcctgcccgccctcctctcctcccttcggacccatagatctcaggctcggtccccgcccgccgcagcccactgttgacccggcccgtactgcggccccgtggccaccatgtccctgcgcggaaacggaagggagatctacaacgtatgaagctgccctaggacagtctacgcgnatagaactggagntagtgcggccccgataagcgcctattcgcttgggcgctgnnggcagcttcccgtggcaggagttacagacaacagaggtatcgagcttgttnaggtttacgctgcaggacgacgttcaagagctttattttggcgagaanaacagccttttgaccaggcccatacccgcgagcacgaaaggctccagtgt

SEQ ID NO: 680286 - DNA, 244 bp, Homo sapiens
agcacgtgtcaggaggcaggtggtctctgtgggaggcatgcgctggccgcacactggcgttctgggcagcaatgcactcgatggctctttcttctcctcacgctgcccaccatggtatggcaaacccagcccctgacaaggttttggtgagacgccgagactgcgtggagggcacaggacccagagggtctccaaacttcacagtggctccaagtcctggggaggtaccaacgcctgagcgaac

SEQ ID NO: 680287 - DNA, 725 bp, Homo sapiens
  misc_feature (70)..(70): n is a, c, g, or t
  misc_feature (100)..(100): n is a, c, g, or t
  misc_feature (117)..(117): n is a, c, g, or t
  misc_feature (134)..(134): n is a, c, g, or t
  misc_feature (157)..(157): n is a, c, g, or t
  misc_feature (165)..(165): n is a, c, g, or t
  misc_feature (168)..(168): n is a, c, g, or t
  misc_feature (172)..(172): n is a, c, g, or t
  misc_feature (259)..(259): n is a, c, g, or t
  misc_feature (319)..(319): n is a, c, g, or t
  misc_feature (355)..(355): n is a, c, g, or t
  misc_feature (388)..(388): n is a, c, g, or t
  misc_feature (562)..(562): n is a, c, g, or t
  misc_feature (573)..(573): n is a, c, g, or t
  misc_feature (575)..(576): n is a, c, g, or t
  misc_feature (623)..(623): n is a, c, g, or t
  misc_feature (625)..(625): n is a, c, g, or t
aaacttacggctaggtacgaggccgggtgttaatcggccgaggcttgagccggttccctgtgtgtgtgtncgctcgccctctgctccgtcctgcggctgnccactgccctcctacgngtccaccatggccctgntgcgctccggccgcgtcctcccngggatcgngcngcgncttccacccgggcctcgccgccgcggtgctctgccagagccagctcctggtggacccatgtggagaatgggacctccagatcccatnctgggagtcactgaagcctttaagagggacaccaagagcataaagatgaatctgggagtnggtgcctaccgggatgataatggaaagccttacgtnctagcctatgcgtccgcaaggcagaggcccagnattgccgcaaaaacatttggacaaggaatacctgcccattgggggactggctgaattttgcaaggcatctgcagaactagccctgggtgagaacagcgaagtcttgaagagtggcggtttgtcactgtgcagaccatttctggaactggagccttaaggatcggagccagtttnctgcaaagatntnntaagttcagccgagatgtctttctgcccaaacaacctggggaaacananaccatcttcagggatgctggcatgcagtacaaggtatcggtattatgacccaagacttgcggttttgacttcaccaggcgcttgtggaggatatatcaaa

SEQ ID NO: 680288 - DNA, 466 bp, Homo sapiens
gagaggataaggcgtggtgctatggtgaggctatgtaggcatgctgattacgatgcctataatgatggctatggatttgggtcagatagatatgtaagagacctcaataactgtctcgcaggaatgtctgatcacagatacggggactgtgtctctactttccagagcacaacaggacactgtgtacaccatgcggggattaccttacagagctgctgagagtgacatttataattttttttcaccgctcaaccctgtgagagtacacattgaaattggtcctgatggcagagtaactggtgaagcagatgtcgagttcgcaactcatgaagatgctgtggcagctatgtcaaaagacaaagcacatattcgacacagatatgtagaactcttcttgaattctacagcaggagcaagcggtgggtgcttacgaacacagatatgtatgaactcttcttgaattcta

SEQ ID NO: 680289 - DNA, 236 bp, Homo sapiens
ccgcttgcagtgggcactcacaggggcagattagtctgaagaaagattttagcggtagggtgtgatgttgtggggtggtcagaaggagcattttttgtatagaatgattggtgatggcctggatgtggttttgtaagaattgagaaactaaacggaagactcaaggtccgaataagagaaggagaaaaataggtattaactaagacttgggaggacccaggacatccaattagaga

SEQ ID NO: 680290 - DNA, 986 bp, Homo sapiens
gcaaaattgtagtgaaaatgtgacagttgattgtcgatcaatttcgttgataggaatgctgcgctgccattgatagtaggatccattcctaggaactcgaaacacgtgtaagtgcagcatatgggagtatagtctttgatctatttcgttcattttccttatttgttgttcatgaatatcattgccgttgtgtgcagcgcagaatcagcagaagagccttgcatacgtactttatcgtaagaatgcacgtgtcattctctcggggattcctgtcaggtctactggttcaaggtcatctaagagatccattttgggttggagtccttaatgagataacatgcagatatgtagaatctgtgcacggtttcgtgcccgtccctacatggcagatgcgtctcgtgactatggagtgtcatgctagccacggcatgggtacgttgtcatacttgtgtaaagctgcgttaggctttgaaaactacgactcaggcatatcatttagcacacataggatttttacgttgtaccttaggactcgaggtcatctccagttaatattgatgatcactatagctagctaataaccatttctgggttgctgcctaacccctaaattgtctgtcaaagccaattctctgggtgtccagtagagtggtggctgttgggcttttccactagttggctcgattcacttctaccattcttgcgctgttaagagataagcatttacataattgggaaaaatctgggatttctgatgccaaacgggttaaaggttcttcgattccttggcattgatatacaggcactattctctttgtcggtcaggtgccattgcgccagttgtccgggtactgaccattccttgtccgcatcacgcgcagggttgggcgcaacttgggtcctgctttttgggccatgtgacctcggttagggcccatgacagtacttccctggctctgaggaagcgcccaactaagacatcgggt

SEQ ID NO: 680291 - DNA, 754 bp, Homo sapiens
  misc_feature (5)..(5): n is a, c, g, or t
  misc_feature (38)..(38): n is a, c, g, or t
  misc_feature (88)..(88): n is a, c, g, or t
  misc_feature (171)..(171): n is a, c, g, or t
  misc_feature (200)..(200): n is a, c, g, or t
  misc_feature (384)..(384): n is a, c, g, or t
  misc_feature (508)..(508): n is a, c, g, or t
gttcnaaggaagactgaagccgaggtgaggggtcctgnggaccattacggaagccgttaacctagaaaaccgggagcacgcccacaanaaaccacacccctcaaaaacaaagggcaacagaggaactgagacacgagagaccgggaaaggttaaacaaactttttatagangaggggtgggaaagcaaaaaagaagaagnaggaggagaaccggccgcacgaagacaagaggggtcaaccccacaagacggagggggaaaggaaagccctagaagagagcaaaaagagggggaaggagaaaagagggagcgcaacacacgcgcaaaaacccaaaaaagcgaggagaggagccacgacagaaacagacgagtgcaaaggccgganacaggggggccaagaaagggacaacgggcgcaaaaggacaaaacccgaagggggccatgcgagaaaaaagaaaaagggaagagaaagaccaggcccagcgaagccaaaaagcaaggggaaaagnggcccctaaggggaagaaagcagcctaaccgacgcagaccaccaataagaaagaaattgagaagaagaaggggaaaagagaaaagagaactacagacctccatacaagaaaagagcgcggggagagggcgagaaactagagggcacctaggaggagagagggaaaaagacaataaaacaactgggagaaaaagaagaaacggaaaggaggacccgcgcgcgaatgcaggagagaaaagagcgcgaa

SEQ ID NO: 680292 - DNA, 1278 bp, Homo sapiens
gcttctccatgggagtttcagataggtggctacacacatctaggatgaggaaccaaggccacctatagtgccgggaaagacatcacatacctatcagacacttctcacaatgtcactgctttagtcatattaacctgaagtagcagttatagacacagtgtagcttggggctgtctttctggctgcccaagacttatcagcgcacatttatcaaccattcaatcaaggaaccatagctaaagcgtcagccagataccatcccatacaagcactcaagcaggtagagggcaggcaatccatacaatcaccacatgcacatgagcggtgcaagcacgccccaaaggcataacacccacacacataaacatactgcgacgataccaacccagatacccactacactgcacactacaagaccacacaacgccacacataacacaccactacaacactacacccgacaccgcgaacggcgaacacccacacgcccacccaacctcacacacaccaaacacgccgcaccacacaaacagccgagacaccgagccccataccaacaccatcacacccacagaacacacggaacaccaatactccacaacgcccactcccccctgcgacaacgcaagtaacaccagcccagcaccaccaccaacacaacaaccacaaactggccacaccataacatcacaaacaggcaccacaccccacagaaccgccgccataccccccagccgagcgccacgctgcccccccgcaacccacccgccgacaaggaaaacaaacaagcacaccacaccacccacacgcaccacccccccgaccacgcacccacaccacccccacacgcacccaccacacccacatacacgaaccccacacagcccaccccacaccccacccccccaaccaccacaccccccaccgcgccgcccaccccccccacgcccaccccgcgcaccaccaccaccaagccacacacccggccagcgcaccccacaagccgccaccacaacacagaacccgcaccacccacacccagcaaacccaacacaccaaaccaaacactagcgccaacacacaaccaccaagtcccccccccggcccccccaagccccacccaggcaccaacacagaaccaggcaaccacccccccagcaccagcccacgacaccagccccgagcccaccgcccaccaccaccgacacacaataacccagacaccaagacacacacgagagcccaaccccacacagcgacacacacaaccaccaacat

SEQ ID NO: 680293 - DNA, 160 bp, Homo sapiens
gtagcagcgagcccatcattccaagcatatccaatgcgttgaacgtcatctcgatatacagtaggacggatgagagcagctcctgtacagcggaacaagctgctcggaaatttgaaagttgaagcctggatcgcaaataatttcccggaaactcaatcaa

SEQ ID NO: 680294 - DNA, 1288 bp, Homo sapiens
acgtgggtgagggctgcggccgtaagagagcgggacgcggtggtgcccggctgcgtgtgtgggggtccccggcgcctgcccccacggcacccaagaagtgcctgtgccagtggtaccctcctgcgtgagccctggggtgttgtgtgtgtggctgctgtgtgtccctggctgccgcgaatggtgccctggtgaccccgcagctgtgcctgtgagctgtgctgcctgtcgcccgctgtgccgcattgtccactggttgtgcgctgtgctgcagctagcggcgcgtgtggaccagcgttccgtcaagcgagccctgttgcgcggtccaggtgtggattcagccgtagcgctgcttgcgtctagccttgcagctacggttgcggcgccgtacaggcgtcccgctggctgcgggtgctgctgactgcatgcgtgtggccagtgtggcctgacgtggcatgttgcagcacgcgatcagtgggactagcgacggcgcgacctgcgcgcgcgcagcgtggctgctgccctgctacgtgccctgcagcaaggccatggccaccgtgagtcggacacctgtcatgctgtccgtgcttgtccgttcccgcttcatcattcaggacccatgcctggcgctgtggggcggccacgcgcggagtgcggctgccgctcctcgtactagcggcccggttcatcggtgatcgttccaggtttggctgggtcctccacacagatctccgcaccgtcaggcctcatcccggagctcgtcaccaaggacccatgaagacgggtggagctcacggcactcagggtatagcgatcaccggtggtggccaagatcaccagtctacgagggccggcctggcctcctgatgagacttgcacgcgctcgccgcgggttgagccgcacgaaagacatcagcatcagcgaccagcttggtggtgcaggactgttccccggggtcacgggaacacgggccatgcatggtagagtagagaagacaggaacgacgaggagcagcagcagcataacaacccgtagggagcccggggaacagaggacaggcagcattgccgagagggaccagggagagaggagacaccccagaaaggcaccgacagagaggcgaccccgctgacccacgacggacgggcaccccggggggcacgcacccggagaggcctcgcacgaacagacaggccaccacgacagagcagaggacggcaggagagcgagacgacgacacggagcagaacgacacaggacagaggaacgagggaggcccgagacgaagcc

SEQ ID NO: 680295 - DNA, 393 bp, Homo sapiens
taggtactcagagctcattgcaggtttaaaagaaataacgtgtaaagtttttagaagaatatctgaccagagttctcactaaatgttagctgaggaatctcattaagaccctttggtcatctgtattccaacaagctcactgtgatgatggtttgccaacattcgccgttttcaccaaacaggttatccttactgttgggtaaacctcccttggatgtatgagtgagctttatgtgcattctcacgaaggtttctgtgatgtataaaagtatacccccatcttacagataggaaactatgccctgatttctgcgcctagacattatcacgttctccagtcagtgtatcgtgtggaaggtaaaaacgtgattcccttttcaggtgtcatcctga

SEQ ID NO: 680296 - DNA, 223 bp, Homo sapiens
  misc_feature (101)..(101): n is a, c, g, or t
atcgaggaccagtgccatctcatattcaacacaagatatattcgccactagcatcattatgatcctagcgcagactctcatttaactggatcggaggacancgagtagctacccttttaccatcattggacagtagcatccgtactatacttcacaacaatcctaatcctaataccaactatctccctaattgaaaacaaaatactcgaatgggccccagctt

SEQ ID NO: 680297 - DNA, 286 bp, Homo sapiens
aaacaggatatttattttagcttcttagttaacatcattaattttgtgtagttgagcgactcgttgactgcctcctccctgcagttttttacggtgcctccgctgttcgacaggcccactgtgagccgcaggtctgtggtgcaagtgacaacagccgggcgggaggcgtacactcaggcggcaggaagttcccagacggcgacgagatttgtcatttcagacatcgtcaggaggtcgtgtcggtattacagtcagacactcttatctttcaggtatctgcttggga

SEQ ID NO: 680298 - DNA, 225 bp, Homo sapiens
gcgctgctcgcggcagcgggaggggggcgcgggcggcggctgagccggggccgaggcgggcccctcccgcgcggctcaccctcctcacctgccccgctcagccgcgcaaactttctctcctctttgtctcgggggcgcgaggggaggggcgcggggcgcaattcgccgggcggggcggcggggtggggggcggcgggcgagcggcgctgcggctctcggcggccg

SEQ ID NO: 680299 - DNA, 150 bp, Homo sapiens
tctcttgagacctggctcaggtctgaggacttaccaggttacttccttcccttgaaggcattgtggctgtttataaccggaaataacgatataggaaaaaacaaaaacggaattatgggggggaaaggagaaggcacggaagggttgccc

SEQ ID NO: 680300 - DNA, 374 bp, Homo sapiens
aaggggggcaatattgcaggtcagctcccataggacatagttcttcatcccgagcctccaggcgacagctttttagaaatatcactgtcgcctcacctgcctaggtctggatcttctctaattttccttcttgtctcagcactttctcctcttcaaacagcttcttgttctcaggggatgcatatacagccagtccctgaggaaggagtcgattccggcctaaagatttcttcactgagaccaggtcaccccggactccaacattctccaccgactgcgtcaggatgagctccaggttttctttgggccgatgcttcgtgtcctccaccagcttatagacgcgatgtcgccggtgcaggcgcggcttccggccc

SEQ ID NO: 680301 - DNA, 603 bp, Homo sapiens
aatccagcctgtcgttattaaagtacagatcttgcacacattgtgcacatgactcactgtagtttatggaggtcgctcaaacgatttcgatttcgactgttcatgatacgatcacaaatcatcagctgctgggacttgcaaacgacaacaatccgtggcatgtatggctcgtatcgatatcagcagggcagtgttattgagacagcagagttcctaactttctcactgacatcattaaactactagtgccacgtaatgcaggggttgtgattccgatactagtgtaattctgaatgacaggcttctaaagcttcatgcggacacgctatgggttctctgataatcagagctgtagtacacaatagcatgacataaggacagctccatatgccttaatggagagtcagtgtctgcagagagttcactagacagtgagtgagtacattgtgacgatcatatcaatgtatccataaggtgaagcaagaaaggcaagtggcatgtcccgccaaaattgggcaaatcttagaaataaaagtaagggtacaagaccccactgctaatggcccctgtgggttcaggggtatgcatgagactgtatcctgg

SEQ ID NO: 680302 - DNA, 355 bp, Homo sapiens
ctttgccctgtccaaatttcacaccctatatttgtgcacagttcctcaaccgacccttcaaatcctctcttttgggcccaggaccataatgtctcacacatctggtcccacaattccattgagaaatgcctacagcgctttctccgtgccaacacacttaaccaacaggctcacttggcatgtagatatttccatctctttctcagggcctatgtattctccttgtcacagcttaaatatgcgctttttccggtcatataattctcaagtgtcccatttggtacccatttcacatatgtcctctgtgtgtacacagctgtctgtgtccagagcttcctctgttctcgcctcgtgc

SEQ ID NO: 680303 - DNA, 1113 bp, Homo sapiens
  misc_feature (392)..(392): n is a, c, g, or t
  misc_feature (687)..(687): n is a, c, g, or t
  misc_feature (700)..(700): n is a, c, g, or t
ggtcccgaggccgggccggggcggccgggaagacgggtgtgtggtgaggtgtgttacccagtaggctcctgggaacatcgttcgggttaccctccacgccgacgcatcgcactggcatggtggatcggccggctcgggtacgatgggctcagtcgataacatggtttggcccgcaggggtgttaatgcaggaagtacgcaaccgtgtatcgctgtcgtctcgtatggagggggcctgtggttcctgtgttcgagtgaccggattcactggcggaagatgattcgcgctacccataacgttgatggctgtgagccttgctatggtccagtattgtaaaaagcttactctatgggtcccagattggactatggcataaaatgcttcgtgttgtnactgcatacttcgcgatgcatgctaccgcactaatttacggcgaatgagatgatgaatgcgtcctggatagatccacgtgggaggttgcgagaacacatacctggaccttcgtaaagatatgctgtggctagaatactagttcgtagtattcctgaacaagaccatatgggaacagattgaggcagtatgggaaaacggccttgtccgaatgtgctatttattcgtacgtccacgagaactgccccttatcagatatatgccacgacgtgtaaatatagtgtcgtggaacgaaangaccactattcgntctcgcaaacatttgcggggatacaagtcatcgatgggggattgactgctgtccacttgggttgataggccgaccggggaaaggtcacgtgggcagatataagtacttccataggggagaaacaggcccgttaaacaatggtgggttgtcataaccaacggattgtagtagaacaggattgggtgacatgggaggcattttttgtgccctgccaatttcaaagtgggcctagaggtaaaatccaaggattttcccaatggttttttatgccacatatcacttccattagggggaacttaaaaattggttggagtgtgtcctatttggcggttgacaaatggggttaggttaaggaattgacgtggttacgtggggctaatttacaaagttacgagatgttaggttaaaggaac

SEQ ID NO: 680304 - DNA, 761 bp, Homo sapiens
  misc_feature (486)..(486): n is a, c, g, or t
gcccctctgttgttgctgcaactccctcacccacagcagtacctgaggtggttctggagagactgcagatgtagtccaaactgtgcagagcagagctcgtgaatggggctggggtcatacatgcccagtggaactgatccagaatttactgaatttatgcatgtgatctggcctaccttgggtggggggcatggctgcaatgtacagtcttgggcccgctgcctgatttttcctctacatcgtgacgggcagcgagaggcagccaggatcacaatcaatttgccagagatccagaaggttccagtcgaatcagaaaggcaagttaggcaggagaccatatggaggtattacaagggttcctcggagatgggaacttttaccagaaaaaacattggtataaaatctataaaactctaattctccgtgtgactcaaggccaaatcttaatctccttcctcatgtgttggagagaagatggcaaccttncttgtggccagctggagaaaggtggcttcgtgttggtccaggggatctcagggtatcgggatccaatttatattattaccagtggagtcagtgctacaagggtggggtggtccttgaagtaggtcgggagaaaggtgtgaaaaggtttggacttcagttggtggaaatgttctcagaatgatggcctgataaccttgccataacaatgtttcccagggaggtaaagggtgggctccaaatgtgttccggggcggaaaatgtgccgggaaacagag

SEQ ID NO: 680305 - DNA, 278 bp, Homo sapiens
agctgcgagtgatggtgtcttgatcttctggcatcagctcagtagctctgttgcaacaatattctcagtgcctttggctgcgctatgtgtactgtgcgccgctgctaacagagcaggagagagcttatgccagatccacagacattggggagctgtgcattgctttctgggagatctgcttcttggaccaatggagcctgattacagtgtggggcttgatgctgccccgaaacacgcacgcacgcgcacacacgtgtgcacattagccatgcctctgg

SEQ ID NO: 680306 - DNA, 216 bp, Homo sapiens
  misc_feature (66)..(66): n is a, c, g, or t
  misc_feature (87)..(87): n is a, c, g, or t
gagagagaagaatgagtgcccagcgaagggggaagccccttataaaaccatcagatcatttaaganctcactaacaccagaacaggnctgggggaaccagccccataattcagttatcaccactgatccctctcatgacatgtggggattatgggaactgcaattcaagataagatttgggtggagatacagccaaaccatatcagggtactaatt

SEQ ID NO: 680307 - DNA, 449 bp, Homo sapiens
  misc_feature (1)..(1): n is a, c, g, or t
  misc_feature (8)..(8): n is a, c, g, or t
  misc_feature (42)..(42): n is a, c, g, or t
  misc_feature (368)..(368): n is a, c, g, or t
  misc_feature (409)..(409): n is a, c, g, or t
  misc_feature (436)..(436): n is a, c, g, or t
nttcggcncgagggggatgaagaaactttagtttggtgatcngagtggtagtcgatagaggcctagactagaatggtaattgtagaaatggcaaggaagaagcaaatcaggagatggtgaagaaaattgacatgataatcaatagaagacaaacatgagttttacattcagccccaaacacaaatataaaaacaaataatacctaagaccagggtctccagacttctgctttactatacagtttttaaaatacagtttgagcacatatcctctttatgcgtatattacttacgcacatgtactcatactatatacattataaaacaaaagtacatttaaaaagggatgaaactaaaattaatgttttnaaattgcaacagttataaagtccgtggacagtggtggattnataggcgtatttttggaaaaatttttncaaaatttaccgt

SEQ ID NO: 680308 - DNA, 1131 bp, Homo sapiens
  misc_feature (501)..(501): n is a, c, g, or t
  misc_feature (516)..(516): n is a, c, g, or t
aacaaatgtagaggggaagaagcactaaccaggcataataccgaaaccggttccaggggaaagaagggctgttgggtattccgctggtcgtcctaggcgcttatattgctgaacactccgagagctggaccagagggtgtttgtcaccggtgcggtctattgattgtcattggggcatcttacaatggcccacatggctttgcctatactctgtttctacagaagcagacgagcatgggatctacagacaaagatatattgctattaccctaccaataggcacttttgtcctcctctgatggcctcttttgatgccttttaggatagacagattccctagggtgctgtgtggaaagagacatctatggaaatgccaacaaaggcgagggcctaggtcctttgtatgcatagtcggcgctgattcacagttcttgaaactttttcagtttaatggatttaatagtcatgccagtcatcttcttacaaatcacatagcattcntcgtacccttctccnaagttcgccagtctatacagtgtgtcttggatggtccaattacccgagtccgagaacccatggttgtacgttgaatttataatgtgcgtgaaagtgtgttggagggaggctagcgacatggggtgacccactctaatgtggttgtaccctagttgagacactcgtgggtgtccctagtacctatttttatgcggaacgggaaataaactattcccgataattagaagttgcaaaaagcttcgatcatgggcgtgttgtctcgtcccaccctgtggcaaggtcgatcgataggatggatggtcacgtgtcccattttgaagtggaaggtgtaaaccatttatttgtaccaaccaaaatggaatagggtcttgagaaaagtccccctaaatggatacacacgccttcaggtctccaaggggtttttccaggatctcattgtattttctactgataccatcaaagatgtattttgtgttgaattgagtggttcgtcaagtggtctgccctgggttggttgtaattgtggtggcaatttgcactgtcaaggtaacatttatagtctttttaaaattgggaaatggtacttgtaaaaggcaggtaggattaggaattaac

SEQ ID NO: 680309 - DNA, 764 bp, Homo sapiens
  misc_feature (297)..(297): n is a, c, g, or t
gagcgggtgtttcccgggccgaacctgggttgtgtgggggctgctggggcctggtgccaggcggcatctaaggacccgcggtgacagcatgggtgaatggggagcggggcagatgaggccttgggctgttttcggctggctgtggtggtggtgctgagggtgctggcgggtcagatgtccctgggtccatggtcggggctctgactcgctggttggtgttcccccgaccccgcgagctgctggtggtgtcgcttgtccctcgcccactgatggccagacatgcgagtgctgccggantggtccgtgaaagtgtgttcattcagcgatgactacatgcatgatggcacatctgctgccatgttccacgaccagcgttcccttgcggtaggctggagaaccggattgataggcagcagtttgaaggaaacagttcgaactctaaataagcctttagtgcaggaaagcaggagaagctcggcggccagtcatatctcgaaggttgttggcttgtttaccaggcatatacccatcttcctattgcattggaaactcattatgacgaaggttctgaagaaagtctccaaaatacattcaagagcagaatgagaaggatctatgctccacaagggctcctcctgacagaccctattgagcgaggactgcgagttattgaaattaccatttattgaagacagaggcatgagcagtggaacgataaaccgaagaattaagatcccacttccagcggggccctcatgtatcca

SEQ ID NO: 680310 - DNA, 126 bp, Homo sapiens
acttgacacggacctcgcgggactactctacccacgcaactaccctgactcacctaccttcgcacctacgtttctcgcgtacctactgcatactgactccacactactcacacacggacaatgact

SEQ ID NO: 680311 - DNA, 174 bp, Homo sapiens
agtcattgtgcacatgactgagatcaacagatgtgactctctctgtactgactctgcacccgcggcagacgcttgatctctacatgacatgtcctgagtgggcctgagggtgccgtggcttggtggtactccatcacgcagcagttgttcaggatctcaccactgcactcgttg

SEQ ID NO: 680312 - DNA, 822 bp, Homo sapiens
  misc_feature (822)..(822): n is a, c, g, or t
ccgagcggatccgcggcggaggttgagggacccccctcctcccggtcaccgtctccgctgagtctgcccccttccccatccgcagggctcttccgtgtggcggcggcttcgctgggcttggagttctgcgcggccagcaggagtctggagcctgctgggcctctggacctggtgtggccccccgtgactgtggacgggggcgtgtgtgcggggccccaggagctccgatacggcagcacatccccgtcccaagcgcagagatgccaccccagggaaaaggccacggctggacgacggtcatggcatgccgaatgcccttacaaggcctgatccaaccgagcccgtctcctatactaggcgggccccaggttagcaagcctatcagaccacaggagcctggggcttgtgagcccttggaaccgaggcccatgagtgcgtgccccacagggcaggcgtacaggcagaaagcaggcagacagaagcgaagacatgggggactggcgaacctggcacaggtgacgcagatccatcatccgatacaagcacggaaaagacacaacgatgccacacaccgaagagacagaccccacctaaacctgatacaggaggaggcaccgagacccatgcagcaaagacaacggcaacacagagggcccccagcggccccaagcgcgctccacgcgggatacccaacagatgagacctaggcaggcagaaaagacggcataggcgggggaaaaacgggaccgcaagaaggaaccagagggacgaaaacaggacaaatcgcaaagaacgaccaaccactcccacggacccaagggn

SEQ ID NO: 680313 - DNA, 201 bp, Homo sapiens
agctggtctagaggatcacaggtgctctaggggaggagctggatgaacgtatggcccgttctgccaggcccaggtgctaggggaggaccccttgcttgagatgtacaggatggactccgtcacttcttctgggcttgtgccctggcccgctgaatcttgtcagcggtggccccatctgtggctcccgtgcagtgggacaac

SEQ ID NO: 680314 - DNA, 205 bp, Homo sapiens
  misc_feature (1)..(1): n is a, c, g, or t
nacaggatcccggaattgtgtggtgttatgtaggaacatatttccttaatatagacacatgaaagacattatgtacttctgctaatgatggaggtagcgcaatctcgtaaggccacgttgccaactttctttaacacctcaaatggtcccacaaacctaggacttaattttcctcgtttcccaaatcacataacaccacacaatt

SEQ ID NO: 680315 - DNA, 1112 bp, Homo sapiens
gtctcaatggatgtccatcctccgatcatagttctccagaggtgttgtttccctcagtggggtgagatactattggatcccaatactgtgtgtttgttggtgggggagcccaggagcagttttccaatatgggtatgctgcaagctactctattgcgctctgagggtcgcttgttgtttttgggagcagttcgcatattcaaatcatcttctttgttgggatagctctttccaacgctgtagatacaccttgttttcttctcgcttggacctcctgttaagctggtgtccatggtgcaaatatacgtctcatgtgctgtgctcacattttttctcctctcgccatatcgtgatttgtgacccacttaggtggggtttcccttggggagacctgggttgtgatatcactgcgtgatgtccatcttggtggaatttgtttaatccccaatcaaattcccgtgttcactactcacggggacattttgggcacacggttttggtacgcgccacaagggtttcttgtccacattttgggccctttttgtagacaagaggcttttgggaaaagaggtacacaggggtcaccttttgggaaccctaatttccatacacgtggttgtggcactgtcccactgctctgagtttgggcacagagggttagcacgtcacgccggtcgcgcgaaagattggtgtaacgtgtccgtgatgtccacttaacttttcgagacctcaccagtgaacttttcgagattctgaggtgttgaaggcccttaaggaacgctggtattctcctcgaccgggcgtttgtggcttcaatgcctggtaatctccacccacctttttgttttaaaggcacaggcggatgcacacctcgaggtgcacaggagagtgttaaagagccacgcctgacccaactatggagaaacctttgttttttactaaaaatataccaaaaatttagccaggcatggtggcactacgcctatagtccccagctacttcaggaggctgaggcaggagaatcacttgaacccacggaggcagaggttgcagtgagctgagatcacgtcattgcactccatcctgagccaacaagagcaaaactccgtttca

SEQ ID NO: 680316 - DNA, 226 bp, Homo sapiens
tcagaggtacaggtggtcgctttgtctgtcccagtgaaatgaacggaacttgatgattatgagacgggagagattgacagagtggaacggacgaaagtgcttgagggacagtgagagaggttggagaagagagtaagaacgaggctgcttacctgcatttaaaacttggtgagacagttcctatgggcatggtcagctctgacggcacctgacagtcatagcgtgg

SEQ ID NO: 680317 - DNA, 116 bp, Homo sapiens
gacaaaccaactgtgatcagtgagctcagatcccgacctgcagcagaatgaacaaggacaagcgataccctgagggagaggaaccagtatggtaggcctagagaaaacatagcata

SEQ ID NO: 680318 - DNA, 106 bp, Homo sapiens
tcaatcgacggtattccatatggtcacgcgtagttatgaattccgagctcaggtgatctgttcgcctcggcctcccaaagtgctgggattacaggcgtgaaccact

SEQ ID NO: 680319 - DNA, 135 bp, Homo sapiens
  misc_feature (69)..(69): n is a, c, g, or t
gaaactcgcgcggcttgctagaagtcatcaaaaagctattagtgggagtagagtattgaagtccttganggaggattatgatgcgacctgtagagtgcgttccgtacgtttagagtttgctagagcagaaataat

SEQ ID NO: 680320 - DNA, 499 bp, Homo sapiens
tgttaaaacacctacaaaggaagcccgttggaataatagcgtaactctcagcagaaaccctacaagccagaagagattgggggccaatattcaacattcttaaagaaaataattttaaacgcagaatttcatatctagccaaactaaacttcataagcaaaggagatcctttccagagaagcaaatgctgagggattttgttaccaccaggactgccttgcaagagctcctgaaagaagcactaaatacggaaaggaaaaaccggtatcagccactgcacaaacactccaaaatgtaaggaccaatgacactatcaagaaactgcatcaactagtgtgcaaaataaccaggtagcatcatgatgacaggatcaaattcacacataataatactgaccttaaatgtaaatgggctaaatgccccaatttaaaacacagattggccaattaataaattttcaagacctattggtgtgctgtattcagtggccatctttggg

SEQ ID NO: 680321 - DNA, 229 bp, Homo sapiens
ccagaccgaccacataccatgagcttcgatacggcgtgagctgactgggaaacgagctgccataccggacaggagacggcggctgtgggcatatggagccaatattatccggacttggcactagccaaaggcagtctggtgatgtaagtcgaaacagatacgcagataatgacagcgtaaatctcggaccttgacaacggaataaggggagcctgctagagtctgagac

SEQ ID NO: 680322 - DNA, 401 bp, Homo sapiens
  misc_feature (16)..(16): n is a, c, g, or t
  misc_feature (58)..(59): n is a, c, g, or t
  misc_feature (108)..(108): n is a, c, g, or t
  misc_feature (128)..(128): n is a, c, g, or t
  misc_feature (139)..(139): n is a, c, g, or t
  misc_feature (296)..(296): n is a, c, g, or t
ggcagtgctccagccntcccacccgcttgtggccaactggcttccagtcactccccgnnaatgccagttcgactttcactgggtactggaagatgttggtcaacgagnaatttcgaggtagtacctgngccgccctcgnacgttcaatgtgggccttgcggcaaaatcggccaacttgctgaagccagacaaagagatcgtgtcagggacggtgaccatatgatcatccgcacggctgaggcacttttaggaactacatcatgggacttccaggttgggaaggagtttgaggaggntctgacagggcatagatgaccgcaagtgcatgacaacagtgagctgggacggagacaagcttcagtgtgtgcagaagggtgagaaggaggggcgttgcttgaccc

SEQ ID NO: 680323 - DNA, 333 bp, Homo sapiens
tacacaacacttgtagctcttgtccttttgataatagctatcccaacatgtatgaggtggtatctcaaagtagttctgattcgcattttcctgatgactggtgatattgagcaccatttcatatacctgttggccattttctgtcatctttgaagaaatgtctattcaagtcctttccccactttttttaatcaggttatatgttgtcttgctattgagttgtatgagttcttcctaaatcctgaatattaaaaccttgcctgatatatggtatgcaaatattttctccttatctgtacattgcctttgcatttcgttgatggtattcgttct

SEQ ID NO: 680324 - DNA, 574 bp, Homo sapiens
ttgacatgatacgcctcgatctcggtaccactactgtcgcactatggaccaactacctccaaaatgaattttctcatattctgcaaggagtgaactcagactgaagacctggcacattgatgacatttgtaagatttctgtccagtatgcattctctgatgcctcatgaggtgtgaagtgaaggctttgccactatcatcacacatgtgaggtttctctcctgtatggattctcctatgttttgcataggatgaagcttgactgaagaccttgccacagtcatgacatttgtaaggtttctctccagcgttgagttcaccgatgaactgcaaggtatgaacaatgtctgaaaaatctgccacatttattaccctagtatgatctctcttccttatggattctccagtgattcacaatggttgtagcattactgaagactttgtgacaatcattaccttagtaaagtttccctacaccatggattgcctgacggtaaacaagtgttgactgcctactaaaggctttgccacacccattacactggtaaggtttctctccagtgtgaattctagca

SEQ ID NO: 680325 - DNA, 85 bp, Homo sapiens
accgagctcgaattcggacacgcacgccacgctagaaggctggcgagaccgaagcagcatgtgaggcctctcctgggagtggggg

SEQ ID NO: 680326 - DNA, 894 bp, Homo sapiens
  misc_feature (24)..(24): n is a, c, g, or t
  misc_feature (94)..(94): n is a, c, g, or t
  misc_feature (104)..(104): n is a, c, g, or t
  misc_feature (146)..(146): n is a, c, g, or t
  misc_feature (161)..(161): n is a, c, g, or t
  misc_feature (172)..(172): n is a, c, g, or t
  misc_feature (212)..(212): n is a, c, g, or t
  misc_feature (238)..(238): n is a, c, g, or t
  misc_feature (252)..(253): n is a, c, g, or t
  misc_feature (265)..(265): n is a, c, g, or t
  misc_feature (272)..(272): n is a, c, g, or t
  misc_feature (298)..(298): n is a, c, g, or t
  misc_feature (318)..(319): n is a, c, g, or t
  misc_feature (342)..(342): n is a, c, g, or t
  misc_feature (345)..(345): n is a, c, g, or t
  misc_feature (354)..(354): n is a, c, g, or t
  misc_feature (465)..(465): n is a, c, g, or t
  misc_feature (469)..(469): n is a, c, g, or t
  misc_feature (480)..(481): n is a, c, g, or t
  misc_feature (486)..(487): n is a, c, g, or t
  misc_feature (491)..(491): n is a, c, g, or t
  misc_feature (493)..(494): n is a, c, g, or t
  misc_feature (496)..(497): n is a, c, g, or t
  misc_feature (500)..(501): n is a, c, g, or t
  misc_feature (505)..(505): n is a, c, g, or t
  misc_feature (584)..(584): n is a, c, g, or t
  misc_feature (762)..(762): n is a, c, g, or t
  misc_feature (765)..(765): n is a, c, g, or t
  misc_feature (771)..(771): n is a, c, g, or t
  misc_feature (797)..(797): n is a, c, g, or t
  misc_feature (804)..(805): n is a, c, g, or t
  misc_feature (807)..(807): n is a, c, g, or t
  misc_feature (816)..(816): n is a, c, g, or t
  misc_feature (862)..(862): n is a, c, g, or t
attaagcactactatatgccaggntcaagtgggtcttactctagggatagagaagagaacaagagaagtctgtgccttcatggggtttacattntagtgggggnggggaatatcaagaatatgaatacatgttgacagtcagtganatcaaacaagtgggnggtggggacancacatgagcgtgggtgggaggggggcctctctgtgaggtnactgtgggtagacggagaagccagcnagcgaactggaggnnaagcacccaganggtcgtnctttcctaagctccctcaacccaggncctgagccaagattatttgnnaggtaaccaagttaaatagtgangtnccgccaggnccagggtaggcaggacagaggagccggtgacagggaaggctgtggatggcttcttccctcctgggcatggtgccccaagcttgctctggctgggggcggaggtctgactcncgcntttcagggaanntggcnntcanannanntcnntcantcaagcgtccctagcatctcggaccccaggactgagcaggcagggtgtgacactgcccggtcccggcaccccaggagcnccgcctggatggagggggcctcccgcgtatcctccctgatttgaggcccgggtcctcaggatcccagagaacgtgacgtcaccaaagagaggctgacccccatcccagcaggtagaacaacacatgaggtaggcgtgagattgggacctcctagcagggggtggggagctgtgtggcncancaaggncccagggcaggtgggcagccaggacnggggctnnancgtcaattnttcttggcgcggtctgctgcgtccagggcagcatgttgcgggcggncgtgatcaggtggatgagctgatgagcgattc

SEQ ID NO: 680327 - DNA, 728 bp, Homo sapiens
tagttggagacgttgagctggtagccagtggtagatggtcaattggttctgcagcctgagagttgctctaacacagtgtaaggacggtgtctgctctggtgtgctgtgttgtccttggccctgcctgcctgtggctctgcccagatgcttcagatcctcttgtgttccggagattgcttgacttcaaccttctttgggtagctgcactatgtctccctcggggccacttagttctgcatggctcagtcactactttgaagacccctatttaatgtttgcttctggtcagattatagactcttgtcgatgttcagttacacgtcgtcattctcgtcagcacctaatcttcatctaagataggtattgatagggcataacttcatgtaggttaagcctggacaattggagtccgtcgttttgccttgcctacgtcagcgttcttgctggttgtaatgtcaagcctataaatgggcttccagggcttctggatctctatcgagctattggaaatctatttgcctctcatcagtctgaccaaattatgtagagcattaatgtagagactcccattaatgggaatacaagaggcagctggcataaaacatttctttcactttcctttcccactcagattgcttcaagagaccaacagaacacagggatcaaaaacaaggaaaatttagcaacttcataccttctaataagtaattcctgctagccactgcaca

SEQ ID NO: 680328 - DNA, 762 bp, Homo sapiens
gggcagtggaaaagaggccaggtgctaataaatgagtccttctctcaagccacgtgatgcaggcggaaggcagagaggtgcctgcagcccagacactcccactttgccaggctaggctgtggtgggggaggtgttcccctcccagttttgtcaagaacgttgaaggaggctctagtggccatggatagaacgtggcgtcgccctttcacaacgtaccctatgctggcgcgtacaggtcgtacatatcattgtggacgttggtgccacagctgtacaagatggtcggtcgtcccacgtcgcctcatggatgcacgagcggtctgtcagtgggggaacgcattgcacatgggaggctgacgctatgctgaaggaatggcccctccctacccaaagactggagcgcttctcaggctcaatttccctggtctgtacagcctgggagctgcgtctgcctgtccccgcactgcgtttactaggtatgggagagcctcccgacgtgggtggtccccgtacttgaggtgccggaactatcccggatggcgggcatggattggcttcgtccctggctgggaaaccccctgtctggttaccccctagggacggggtgcagcacctataagcagtgtgaggccgatttgtggcgcttgtgcacccaccaagcaaggccccaaagaagcgggtgcttgcatcaaggtgtcagggggtttgtgacgaaactggtagatcaattggcttgtcgggacggttgagggccacattgag

SEQ ID NO: 680329 - DNA, 338 bp, Homo sapiens
tgctaggcgggtcgtagcaagggggcaggtagtaactccccaggtggctgagggctagggtgacgctcaggtgggtctcctgttcccagtgctaccctgcatacggggctccttcccaggctctgtggcagcgaaggaggggtaggctgggaggggctgctgacgttgttcacttgggcaggacgtcagaggactcagacaccagcttcccatcacgtgtctcgagtcttcttcacaaaccacggccctggaggagctggtgcgggctgaaaggagctggagcccgggccaaacccaaagcttggagccccaggctggtagctaaggccggggcttgt

SEQ ID NO: 680330 - DNA, 651 bp, Homo sapiens
ggttgtgagtcgacgggtcctccatgattctggagggcgcgtaccagggagtacctgtgagtgcagtctcatgtccgtgcgatcgagatatgtgtgctcgtccatattcgcgggtacttgagaagctgtactgtgaactccagtccgacagtcgtctgaagttagggtgcacgcgtcacctgctcgtatatactgactgagcggggcgctgtcagttcggttactgtctcctcgtggggaccttccccttcaactcttgttctctcgggcttcatctacttgtgtggggagtgtcatcctaacggttgtctgagaatacagatcaacccagagaacaaagcggatgtccaaggtcatctccacagagcgagccttggctgattttctcttttgccagcatccatcctgcaccttgttgtcatgaactttgtgggctgaatcattctcattgtacttaattgaggagtaggagactaaaagaatgtgcactctttgaatttcctggataagagttctggagatggcaggtgattggacacattggatttgtctttcagatgtgcaacttgactgctagctctgcttttcatgcaggagaaaagtccagagttcactgtgtgtcagaacaatttgtaagaagacatttgatta

SEQ ID NO: 680331 - DNA, 498 bp, Homo sapiens
gacatttgtattttagtagagatgggttttcgccatgtggtcaggctggtcttgaactcctgacttcaagtgatccacctgcctcagcctcccaaaatgctgggattacagacatgagccacacgcgcccggactaaattttaacgttttcttttttttccccctgagacagagtcttgctctgtcgcccaggctggagtgcaatggcgcagtcttggctcatggcagcctccacctcctgggtttaagtgattcttctggatcagcctcccgagcagctgggactacaggtgcccgccaccacgcctggctaacttttttgtatttttggtagagacgggttttcgccgtgttggccaggatggtcttgatctcttgaccttgtgatccacctgcctcatcatcccaaagtgctgggattacaggcgtgagccactgcgcccagcatgttagacaatttttaattcatcctctctgtgctgtcgttttctcagctgt

SEQ ID NO: 680332 - DNA, 439 bp, Homo sapiens
tcacgcccatgtcacaaggagcagcagagcaggccccagcatttggacaaagctctgccacggggaggttccagtcccaagtcccaaggctggactacaggtctctggcggggcacagagcagcagtggggtgtgtctcagctgcaggctcatgggaagtgacgagtctaccgtagaattgccctgaaagcagaaggcggatttctaacccggtttgatggaatagagtgacacgtctacctcctttctcatgttctgactgaacaacatagaacttacacggtggttattaggtataaaatggctaaaagagaagctcctgtcgtccacagtagaaggccaacctggcagtttttgtcaaagccagcgggcagtgcctctccatcccgcagacggcttgcatgatgctccaggtggctgaggagaggaaggggcaggc

SEQ ID NO: 680333 - DNA, 145 bp, Homo sapiens
catgaagaggcatttaactccttacctcaggtgaccactgcttggcctcccaaagtcctgggattacaggcattagccactgcgccctgcccccagtactttgctcttaattctagtttcctcgcccttttcgtcagaacaggtg

SEQ ID NO: 680334 - DNA, 1037 bp, Homo sapiens
cctgcgattgtgcaggcatttgttccctacctgggtgtgctgctcccctcgcctggaccctgacttcagctccctgtattgaatgtccacgagggtgaagacaggcctgtcaggcctctggggaatctcccaaatccacatgaactcaccattcaccatgggcctttaaatgcagtaaactccagctaatcagatttcatggggctagctatgacccactgtgctccttcttcagcactcgtttgctactttcaggtgtaagatgcctggaatgaaacccagggggccttcctatgacacagatctttgcagcttcagaaccaagtcagaccatccctgcgactgccctggcttgacgaccatgcaaccttggtcccctgaaatttattgcctagtcccggcgtgcgttggacgtatctcgtcccatgtacaactattgcgagacaatgatcatgctgagataccgaagacactggaaaggctgctcatgccgcacaggttgcctgtgcaggcgctctgcgtcaaaaggaatccacaggagtgactgtgcgtgcaacccgcacggggatggacatgcccttgaccggtgtcactgtgcgcaggcagtgctgctgggaacgcaatctaccagtatacagttgatctctgcgtcgagccacggtggaacagtcccgagccagggcgggtactgaagtgccctgtggggacctgaaattgggctttgctcctgtgccgattccgttttcgccctgtacgttctctcaggaaagctagggaccggcctacttttcccagcagtcatgcgaaaccccactgttctattcttcgaacgactttgcctggacgctgaccacaagcggcacacacctggcaggttagcgccggaaagttcaccgtaaggtttgggtttcccccgcacatgtcggcggacacggcgagtctctggactgagcgtcgtcgtaatcagagtttcgccacagaggagccaggtaacgagtgcaccaataatacacgaaccccacagtattgtcgcgatt

SEQ ID NO: 680335 - DNA, 222 bp, Homo sapiens
tcccggggtcccaaatttttttttttgaaggaatggtccaaataaaaaaccttaaggggtttttttggtccaccttattaaaagggtaagggaaaccccaccatgcatgccttgccttggggaccagggaattcaccccacggttttggggaatttaccccggggcttagctttcattatcactgcttcccagggggtgcttggcaaagagattttccgcca

SEQ ID NO: 680336 - DNA, 84 bp, Homo sapiens
  misc_feature (76)..(76): n is a, c, g, or t
gatacggagtttcattctgtcaccaggctggagttcagtgagccgagatcgccccactgccctccagcctgggcgncagtctca

SEQ ID NO: 680337 - DNA, 129 bp, Homo sapiens
aagcccttgatacttaccacacagtgggaagagacagacagagagagagagagagagacgagagagagagagaggcagagacagagacagagagaaagagagagacagactatagaaagacagagtatg

SEQ ID NO: 680338 - DNA, 576 bp, Homo sapiens
ggggatactgcgagtatggcggcgtcaaaggtgaagcaagacatgcctccgccggggggctatgggcccatcgatacaaacggaacttgccggtcgagggactgtcgggctacagcatgcttgggccatagggattgaaccctgatctacgggcacgtggagcataatgaagtggaaccgtgagacgcaggcgccgtacaaatcgaggacttcgaggctcgcaatcgggctgtttgccactgtacgaggcagaaaccgaccggaggaccttgcaagatgcttcgggaagaagcctggagggagggagggcatcaatcgattgaaatggactgtggcccctgacgtgcaaggggtggggggagctctgtgtgttccaacaaaatccgggcgtggggttgccccccccttgggattccgggggggctcgttacggggctggtgcacccgcaagaggaggtctcctcttgttgcgagcccacgggttggcctgtgggtccagctgtagggccctgtggcccttcgcgtgccaatctgttattcacgtgccccttccccgcattgcgaacggattaatgc

SEQ ID NO: 680339 - DNA, 247 bp, Homo sapiens
tgctgggattacaggcgtgagccactgcgcccagcctattagttcattttcatactgttgataaagatacccaagactggataatttataaagaaaaagaagtttaatggactcacagttcctggtggctggggaggcctcataatcatggcagaatgcaaaaggcacatcttacatgcgcggcaggcaacgagagaatgagaaccaagtgcaacgtggaaaccccttataaaaccatcagatctca

SEQ ID NO: 680340 - DNA, 388 bp, Homo sapiens
tttttttaaaaaaccccaccccagcctgttcccaaaaatggcttaaaaaaacaagggatattttttttttaataaattttttttccattcttttttgaaacagggtaataccctgggcaccacatgtttaacattttcattcaaggtggggaaaaaacccctctggtgaacctagtttatacaccaattttttttcattcaaggtacccaccacctttttcaggggggggacgtttttttttccctaatgaaaagcaagcattttgttagaccttttatattgccttttaatttgactttaatgaatgggggggaaaaacaaaaggatcaagttttttttaaaacatttttttttaaaaggggacaaaaaaaaggcaatggtttttca

SEQ ID NO: 680341 - DNA, 127 bp, Homo sapiens
ggcacatgggcgggcaaaggaagtgagcgggagatggatcacagccgagggagtaaaggtgctgcaaggatgttagctgtgggcacgggggatttttcggaaggaacattaataaactaaaaacttc

SEQ ID NO: 680342 - DNA, 1035 bp, Homo sapiens
tgcccatttcgttgttgcaggacgttcactcattagggtgagctgggacctcttgctattatgctaatccttgaatagttggaaggtcccatttgacgtgtcgcattggctgctacatgcaccagtgggttccacgtgcctatgtaggtgctaccgcgaacatgcgcgacatgtcgcagtcttcggggccaacgcaattcgaagctcggcttacattatgctccctgcgagaacttaaacacgtagactcgtgggtaacgcgatcacactatgccactctcttgatgcgcgctgacctcgagatggaatacctgggagtcgtttctgacgtgtgcagagcgcctattttggacctaccctaattgtaacacgctcgtgagggacaacctgacggcgaagagttcccttcgcaaggacgtgacagggactcgcaaggcatggcttggcgggtggagcgtaagaacgccatgtatggcctggtatataccggtcaatactttggctgtcccgccacagagggccaaagaaacgcccgtggaggcatggataacccacccattgcaatgtgtggaaacagttgggatggcacagcacaaaaaagcaatggagtcagcggagccaaccatggttgtacaacttgcctcaagctgtgcacgggcaacgactcgcagagcacggacgactttcaatggggttggggcttaggcgctgaggtagttggggagtcaacagcgtttggacatgcgagaccggacagacgacagcgtcatacacgggtggacgcttgtgctggacagcagcagcgtaatgttttgacaacagtgcagtgggctagggcagacatttccaaccaagggatgtgtgatctatggccagacacccgaatgcacagtgtgtggaacgagtctctagcactatcagaccaggggcgtttccttaggaagagacacgttggacgtgtttagcctgtagcccacgagaatcgttcagttgttcgcaaataatacgatccaattccccgtcatgtgagtattg

SEQ ID NO: 680343 - DNA, 916 bp, Homo sapiens
ctctattttaatatgtatttccatgcatctgaaactaggctttttaaagaaatatgtcaaaagcaaagtaagtctaaattatagagaaaaagaagctagttggtctttaggctcggtactgtatctgggactcttcagaccagtagttggtgtcttgtctagcttcaggcagccatgatgatatgatgccatctggcatttgtatgaagcttgctattttttgaggccttctaacatgtgttttaccatttgtgtgtttcaactgctctgtgggatgttgctttagatgaatagagaagtttctaagaagttaagagatttgctcaagatcacagttcgccagagagctaagaacccccaggtccaatacattttatttatttatgtatttacctcgtgctttagtgcccccaactgttcgcagctgagtattcataggtgctgctaacctgcctagagacatgcaaaggggaaggataaaaacagaaaagaaaaaagagtgacagcttaaacagtgcaaaaagtgggaaagagcaagttataataaatcaagacagaattttagagctttttgcattttgactcatcatttattgtattgtgatcttgagcaagtaatttgatattcaagcctcaacttatctgtcaacatcggcataactatggttaattatcactgagctagtaaggtcattgagatgctgtctgtggctgtttttacgaacttcttaggccgagtggcttatgaaaatcttggaatcaactttcccctgtgaacacaaaccgattgcgaaggcagagcgttggattccaggccgaaagtctgtgcaacactattgcagctggcacggcacttggggggaactcctcagtttgggggcaaactggggggcattgaggggaggttgcacaatct

SEQ ID NO: 680344 - DNA, 163 bp, Homo sapiens
  misc_feature (18)..(18): n is a, c, g, or t
cgcgagatgtgctgcttngtcttgcacatgtgtcagttcaaaagtctcttctactcgggcacggttcttatctgctttgtttccttctctgttgagtcggaactttttggctttatcaatagaataaatcaccatctccatcaccatctccatcaccatctcc

SEQ ID NO: 680345 - DNA, 651 bp, Homo sapiens
caactattaccaatagacctaacaagtgagatagacagcaacacattaatagttggagacttcaatactccactgacagccttaggcagggcatcaagactgaaagtcaacaaagaaacaagggatttaaactataccttggaacaaatggacttaacagatatatacagaacattccatccaacaaccacagaatacacattctgttcaacagtgaatagaactttctccaagatggaccatacaatagaccataaaatgggcctcaataaattgaagaaaattgaaattatgtcaagcactctctcagaccacagtggcataaaactggaaattgactccaaaaagaaccttcaaaaccatgcaaatacatggaaattaagtaagcctgctcttgactgagcattgggtcaaaaacgaaatcaagatagaaatttaaaaattcttctaactgaatgacagtaatgacacaacctaccaaacctgtgggatacagcaaaggcagtgctaagaggggaaagttcatagctctaaacacatacatcaaaaagactgaaagagcacaaactgacattccaaggtcacacctcaaggggactagagacacaagaacaaactaaacccaaacccagcagaacaaaggaaatacca

SEQ ID NO: 680346 - DNA, 619 bp, Homo sapiens
  misc_feature (175)..(175): n is a, c, g, or t
  misc_feature (209)..(210): n is a, c, g, or t
  misc_feature (269)..(269): n is a, c, g, or t
  misc_feature (286)..(286): n is a, c, g, or t
  misc_feature (289)..(290): n is a, c, g, or t
  misc_feature (303)..(303): n is a, c, g, or t
  misc_feature (318)..(318): n is a, c, g, or t
  misc_feature (322)..(322): n is a, c, g, or t
  misc_feature (342)..(342): n is a, c, g, or t
  misc_feature (432)..(432): n is a, c, g, or t
  misc_feature (439)..(439): n is a, c, g, or t
  misc_feature (490)..(490): n is a, c, g, or t
  misc_feature (493)..(493): n is a, c, g, or t
  misc_feature (502)..(502): n is a, c, g, or t
  misc_feature (506)..(506): n is a, c, g, or t
  misc_feature (522)..(523): n is a, c, g, or t
  misc_feature (527)..(528): n is a, c, g, or t
  misc_feature (619)..(619): n is a, c, g, or t
ggtctgtggccggaggctgatcaggttctagaacagatcagacatttgtaatgatgcctgaaataaacactaaccacctcgacaagcaacaggttcaactcctggcagagatgtgtatccttatgatgaaaatgacaataaaatggagctgagaccaagaagaatgtcacctgancgagaacatgagaaaggattatgcatcgagcttnnagtgtcttcttattcaccaccgaaaataagcttctgctacagcaaagatcagatgctangattacctttccaggtngtnnacgaatacgtgtngtagtcatccattangcantccagccgagcttgaggaangtgacgcccttggagtgaggcgagcagcacagagacggctgaaagctgagctaggaatcccttggaagaggttcctccagaagaaattanttatttnacacgaattcactacaaagctcagtctgatggtatctggggtgaacatganatngattacatntggnggtgaggaagaatgtnncttnngaatccagatcccactgagattcccagctaatgctaaggtggtcaaagggaagaactaaaagcacctttctgcaaaaaggccgccagggcn

SEQ ID NO: 680347 - DNA, 946 bp, Homo sapiens
ggcccagtcactgagccgccgcgagattcagcagcctccccttgagccccctcgctcccgaagtccgtccccccctgcccgcttctccgccaacgcggcttctgagccgtccaccgaaggaaaaggaatcgtatcgtatgtccgctatccaagaatctccactctttcgacccctttgctgatgcacgtaagggtgatgacctgttcctgcctggccactgaggattatatccatataagaatccacagagaacacggaggaagaccctttactatgtccagggatcgctggattgattacgataaaaggacactagtgacgcccgttaccgcaaaaagtttgcctgcaaatggtactgttaatgtgagcatccggaatatggagacacgtacattcaggctacaagggtgaccaacgcaagaaacatattgccaggttcctcgtaggagatgtgcacgtgttaaaggacgatcagtgaaggtccatgggttaaaaagtgcttgtggcctcactgacaggctacgtgacgggattccttgccagtgagtacaacatccccttctctcccttgtcaccaggtttacaaacaacctcaacaggtggttattatagtacccatgggcggtccgcttataactgggacctaggtgtacgtcctttatgcactaagtgagaagagccatgctggtctagttcttgaagtcctcaatttaaaagacggctcgcaaatagcgcctgagggttaagccgtgaaccagcaaaccggatgttacgcagccaagtcctaagattaaacaattgcgggaccctagcacctggaggacgaccataaaaggtacacgaaccgcgattcaagaacgtgagaacccggctaaaggcgtggtacctgtccagcggcacaaacctcggagactcacgcaaccaatggacaaacaccgtggcatc

SEQ ID NO: 680348 - DNA, 81 bp, Homo sapiens
gatccaagggcacaaggagatgagcaaggtgtggaacgacctgaggcccaagctcagctgcctctttgcgggaccacacag

SEQ ID NO: 680349 - DNA, 160 bp, Homo sapiens
gcgggagggggtgatctacatctctctttacgccggtttctattgacttggtttctcgtgtgaccgcggtgtctggcgcgatattgatcaaccctggggttagtatagcgttagttacacttactgatatattagctaaaaggttaatcactagctgttt

SEQ ID NO: 680350 - DNA, 303 bp, Homo sapiens
aatgttactactcactgtcagtcatgtgccctggagaatgctgaggacggtgagcagcgcagaggcccacggggagaccaccttgtagcctacgtgccctgtttgaacgattgtggaccctatggccagtgcctcctgctccgcagacacagctacctgtatgccagctgcagctgcaaggcaggctggcgtgggtggagctgcacggacaacagcacagcccagacggtggcccagcagagggcggccacactgctgctcacgctcagcaacctcatgttcctggcccccatcgccgtctca

SEQ ID NO: 680351 - DNA, 1033 bp, Homo sapiens
gagagagagagagagagagagagagagagagagagagagagagagagagaggcaaatatctctaaagcacatgacgagtgacatcactcgatcgctgcagagacacacgctcgtcgcacggcgactaatgagtgacgctagtatgacctcttgtcgtggaccacctctcaggagggccaaaagggtgtggtgtaaccacagtagtcgcatacataccccgaaagtttcccgagtaatatgtatctctctcctgtcctctcgtagtataagacctatcctctgatgtggtacgactgacccaggtggtatgaagaacccaatactagtgagaagttccacgaggcgtgtctctgacgtgagtgatcatctcactcatctgttgtagagatagactgtgtgtcttatctctcatcagtatggcccatgtgttgcctctcatcagagcgtcctgagtagtggaatccgctgcgctgtcgtgggttatcatcacgaagcggggcaccgacactacggaggagcagactatgtgtgagagactattaccaaagtgagaattgtagcgtgatgttgtcgtgcctttcctctctcgttgaacaaagcgagcgagatttggtcgtcgtggtcatctcgaatgataaaacacactagttctaagtcgtagttgtaatattaacgctccgtggggtgatgttgttgctaaaactacgatcgtgatcccacagagtaagtgaaagaaagcaccaacttcgatgatggatggtgtgttgatccagtttggataggtgcgcagcattatcgtcagcccaccataaataaggcaagtcaaacactcattattcctaatcgcttcctctcgctgatgggtgttggtgcaccaaagtgcttgtgctccaaagtgattttttgggaatccctgcgtctttactggctggcgacggcctgaaaagcaacgactccaatattttggccacccgacaacaggtcttcatctgacaacaacgggtgagctggttctctcctataattggtctcc

SEQ ID NO: 680352 - DNA, 798 bp, Homo sapiens
ccaccaccaccccccacccacaccacatacactaacacttacgaaagcctgcgcttaaatctcgcacgaggaatcaccatggcgttatgggaccctgtacactgtatcctgaaaactggagggccttcaaggctctcatctgctgctcaagtacagctgtgaggctcagtgtcctgctgtgctctcctgcaccaccccacttccatttatggccaaaccaacctgcacccctgaatttctcctgcaaatttcctgcctgtgcaatggtcccagcatttgatgtgtgtgatgatgtgattctgtgtgttttgacgatgcaacgccattgcctactatgtgagcaatgagtgagctgcgtgggaagtactccagagtgcagcagcccagtgtgtgtgcagtggtgtgagctattgctgattcccgatatagtgcccccagccagtacctgggtgttccccaccttgggcatcactgcaccacaacaaacacgtgccactcgagaactgcgcaggcggacgatgatgaggcgaatatctggaggctgctgtgacttgcttacattgaacgcacgaggactctctccatggctgggccgaacgcacgtgacactaggcctgaccatccacgagttcgtcttgcccccgctggtctgttggctccttcttcgcgcagggttcctacggcgccctctcgttacctctcccgcccttttccgcactgcctgtcccgctcggcttgcccttcatcgcttctccccgctccccgctgtccgggctgtcttcggagctcgtcgtaacc

SEQ ID NO: 680353 - DNA, 475 bp, Homo sapiens
tcctaaagctcaatgtgttgggctctctggtttcatccttagagaagcatgagaacagattgaaaagttaggacatcataatgtgcagagtgtgtcgaagaagaaagtgagcttttccccttgagaaattctgcattagttctatctttccaggcaaaacaaatgggtatcttttcatacaaccattttcaaatgaaccttagaaaagtcttaacaatttacgggtacttttatggcaccaggaaatttaccattttagatgggattagggaaagacctcgtaattgagttgtgagtaaagaaaattgatgatgtactaaaccagtaaaattgtgtggaaaagtgttaaaggtcagcatgtctaatgtgggaatctagatatagcttagattcctatggctaagagtatttgctataacaattgatgtgcatgacaattatatattcctactcggtcatactggactgcttcgtc

SEQ ID NO: 680354 - DNA, 131 bp, Homo sapiens
agctggtaccggttttattgatgcacactgtaagttgtgggcctgccccttaatagacttactgtgtgtgatgggaatgacaaatgtgaagctcgtgaagtgagcaatgcaaatgtggaagaaaagaggtt

SEQ ID NO: 680355 - DNA, 778 bp, Homo sapiens
gcctcccaggctcaagtgatcctcctgcctcggcctgccgagtagctgggaccgcagatgcacaccaccgcactggctaatctttaaaaaatattttgtagaggccaggcgcggtggctcacacctgtggtctcagcactttgggaggccgaggtgggtggatcacttgaggtcaggagtctgagaccagcctggccaacatggtgaaaccccatctctactaaaaataattagctgggcgtggttgtgcacgcctgtaagtctcagacgtcccgagtagctgagattacaggcgcgtgccaggcacgcctaggttaattgtgtgtactttgtataagtagtgatagggtttacgctcgatgatttggccaggttgatctacgaactcctggctctcaggtgatctaccgtgccttggcctccctgaagtgctgggattacccggcgtgagtccaatgcgctccggctgaaaggccagcacttcacgcatcgatctttggtatcctggagggtgggcagaaagccagaggcgccaaggaccagggccctagtgccaacgaggggacgcgctgcgtgcgtggcgcaccttgctgactgggttgctagtaaaaccccgtgggagggggctctggacgatcctttgctactctcgctgtggtccacgcgctccggggcacttggatgccatcggtctgccccttttgcgccggacggttcctcggagggtgccctgtcatggactctctgacctcatttgcgtaatagcccgcgggtataa

SEQ ID NO: 680356 - DNA, 317 bp, Homo sapiens
aaggagtgcagataaaataggagtcattaagattaccatggggaaattcaaattgttataagctacttctgttccctggaaaagcagagccaggagagcatacagcatagctcctatgtagtgccgtatatggaaatggggaaaagtaaaattaaatgaacaggaggatttggaagcacaaataaataaggcaaagcaagcttattggctaaatacgggtaactaataaaacgtcctacctgtgaaataactattcagggaaagaaatttaaaggattacgtactacttctgtggatcttagctggcacattcccct

SEQ ID NO: 680357 - DNA, 616 bp, Homo sapiens
atgacccaccaatcacatgcctatcatatagtaaaagccagcccatgacccctaacaggggccctctcaggcctcctaatgacctccggactagaccatgtgatttcacttccactccataatgctcctcatactaggtctacataaccaatgatactaacgcatataccaattgatggcgcgatgtaacacgagaagagcacagtaccaagggacaacagacaccatcccggtccaaaaaggccttcgagttacgggataatcctatgtattacctcagaaggtttatgtcttcgcaggatttctcgtgagccttgtaccactcccagcctagccgcctacccgccgcaagttaggagggcgactggcccgtccaacaggcgatcagcccgcggaagatcccgttagaagtcccactccgtaagcacatccgtatgactcgcgatccggagtatcaatcacctgagctcaccatagtctaatagaaagcacccgaaaccaaagtaattcaagcacgtgtcatgacaattgtactggggtctctattttaccctcctacaagcctcagagtacttcgagtctcccttcaccattttccgacggcatctacggtcaa

SEQ ID NO: 680358 - DNA, 408 bp, Homo sapiens
  misc_feature (5)..(5): n is a, c, g, or t
  misc_feature (11)..(11): n is a, c, g, or t
  misc_feature (21)..(22): n is a, c, g, or t
  misc_feature (24)..(24): n is a, c, g, or t
  misc_feature (27)..(27): n is a, c, g, or t
  misc_feature (33)..(33): n is a, c, g, or t
  misc_feature (304)..(304): n is a, c, g, or t
  misc_feature (315)..(315): n is a, c, g, or t
  misc_feature (322)..(322): n is a, c, g, or t
  misc_feature (358)..(358): n is a, c, g, or t
agggnaagaantactcgtccnncngangagttntatgtatgtccctgggaagctgcatgatgtggaacacgtgctcatcgatgtgggaactgggtactatgtagagaagacagctgaggatgccaaggacttcttcaagaggaagatagattttctaaccaagcagatggagaaaatccaaccagctcttcaggagaagcacgccatgaaacaggccgtcatggaaatgatgagtcagaagattcagcagctcacagccctgggggcagctcaggctactgctaaggcctgagagtttttgcanaaatggggcanagggacnccctttgggcgtggcttcctggtgatgggaagggtnttgtgttttaatgccaataaatgtgccagctgggcagaatgttaaaaaaa

SEQ ID NO: 680359 - DNA, 348 bp, Homo sapiens
  misc_feature (5)..(5): n is a, c, g, or t
  misc_feature (11)..(11): n is a, c, g, or t
  misc_feature (21)..(22): n is a, c, g, or t
  misc_feature (24)..(24): n is a, c, g, or t
  misc_feature (27)..(27): n is a, c, g, or t
  misc_feature (33)..(33): n is a, c, g, or t
agggnaagaantactcgtccnncngangagttntatgtatgtccctgggaagctgcatgatgtggaacacgtgctcatcgatgtgggaactgggtactatgtagagaagacagctgaggatgccaaggacttcttcaagaggaagatagattttctaaccaagcagatggagaaaatccaaccagctcttcaggagaagcacgccatgaaacaggccgtcatggaaatgatgagtcagaagattcagcagctcacagccctgggggcaccggctggactctgtgcagggcctttgctatgggacgatgggtgcacccgacgatagtctgggttggagaaggaccggtt

SEQ ID NO: 680360 - DNA, 147 bp, Homo sapiens
gaacccggccgaagcccggttctctgctctctgcccgcccccctgccgccgtcgtaagacaggctccgtacaccgagcgacggggttgtctacctcgccccggggcggcaacttctacgggtactaccggtcgacgtcgtgtgtacc

SEQ ID NO: 680361 - DNA, 911 bp, Homo sapiens
agcgaggctggtccggtcgaggttctttgatcggagcagccggccggccctcactcggagcagccggccggccctcactcggagcagccggccggccctgcactcggagcagccggccggccctgcactcggagcagccggccggccctgcactcggagcagccggccggccctgcactcggagcagccggccggccctgcactcggagcagccggccggccctgccggacccgggcactgaggggcttagctacccgtggccagcggctgtggagggtgtactgggtcccccagcagtgccaggcccaccggcgctgcgctcgtatttctcgccgggcctcaagctgccttcccgtggtgcagggctcgggaccttgctagctccgcctattgccttgagcctccccacttccctctagttgggctccttgtgcggtccgagccatccatcgaggagcgcctatcccctgctccacggcgcccaagtcccagtcaatcaacccaaaagggctgaggagttgcgggcgcacggacggcggaactggcaggcagctccatctgcaaccccgactgcgggattccacttgaggtgaagccaactggggctcctgagttctggttgcgggaccgttggaagaaacctattattgatttaagccccgggagaatgtaaatacaccaatcggatactacaagtagtctagactcaagggttttgctaaaaagacaatcaaaaacagcaaacccatgatgtcttagcacttcaaagggtttggtgaaattgcaacaaatggaacacccctgatatactagagactcctgagtagaagacgtatggagaaacattggtgtcaacctctagggatttataaaccgcaacaaatcaagagccctgcttacaaacagaaca

SEQ ID NO: 680362 - DNA, 367 bp, Homo sapiens
agggccatggatgggtgtaggtctgtggcctgttaggaaccaggccacacagcaggaagtgagtggcaggtgagtgagagaagcttgtctgtatttacagccactccccattcctcacatgactgcctgagctctgccttctgtcagacgagcttcaacattagattctcataggagtgcaaaccctattatgaactgtgcatgcaagagacctaggttgtgtgctccttatgagaatctaatgcctgatgatctgtccctgtctctcagcactcccagatagactgtctagttccaggaaaacaagctcagggctcccggaagggctcccggagggttaaggggtcccggagggttaagggctcgg

SEQ ID NO: 680363 - DNA, 722 bp, Homo sapiens
agcggatggaggcggtgaaggcggaagcgtgggagggggccgcggtggcccaggacctgctggctctggggtatggaggtgtcccgggggcggcgtcacggggcgcctctatgcccaagacttcacgtggctgtgcgtgcggttggcggcggagctggcgacgctggtgcgccctctagcacgcagctacgatggcgtggctgctggacggtgctgagcgccggcgagggccctggtgcggaggaggagctttctgcggcagttgggcagcctgctgcgggagctgtactggccggatcgtgcgctctgcgtgcgggtgatggtgcgagtgcgcttcgggaagccggtgccggactgcgcctgctgcgctttctctgctcagagctccaagccacccgggctcctgtgcctccgctctctgctggatccgagtcctaagccaccccttggtgaaggggtacgtggagggagccggcatggtccaagaactggaccttagcctccaagccctggggctgtccagagctgcaccaggaaccaccgacaggcagctgctgcaggagattgcatgctaaagatctcagagctgcagccttctctgcccccagggtccctgaaagcccctcctcagctgctcgcgtagatgcacccagatggggaagcgtggacgtctctgtccaaaaagcctcagagatcagtaccgctgctgcgctgacttcttc

SEQ ID NO: 680364 - DNA, 678 bp, Homo sapiens
  misc_feature (477)..(477): n is a, c, g, or t
gagcatatggcaaatctacttttagttctttaaggaatctccatatttttttccataccagcagggtagtgttcccttttcaccacagccatgccaacatctattatttttggattttttaattatgaccattcttgcagaagtaaggtggtattgcactgtggttttgatttgcatttccctgataattagtgatactgagcattttatatgtttgttggccatgtgtatatcttcttttgataattgtctatttatgtccttagccaactttttgatgtgattatttgtatttggttggattttttttttttttgtcttgtgatttgtttgattgccttgtagattctggatattattcctttgttgaatgcttcgtttgtgaagattttctcccactctgagggttctgtttactctgctgattatttcttttgcggtatagaagctttttagtttaattaagttccacctttntatttttggttttgttgcatttgcttttgggttcttgggcatgaagtctttgcctaagccaatgtttagaagggtttttctgatgttaccttctagaatgtttacagtttcaggtctcagaatttaatctttgatccatattgaattgatgtttggctagggggagagattaggaactgttcatcttctactgtgccttgg

SEQ ID NO: 680365 - DNA, 229 bp, Homo sapiens
gctgggtgatctagaggatcccgtgtcccatgcatagttcggacatcacagttacaagtctcgatagcatactatcttaaaagattcattaaggggatgggtacggtggctcacgcttgtaatcccagcacttggtggaggccgaggtgggcagatcacctgaggtcaggagcttgagaccagtctgaccaacatggagaaaccccctctctactaaagatacaaaaaa

SEQ ID NO: 680366 - DNA, 85 bp, Homo sapiens
cactgggaactgggccaggcctgcggcacgcgtatcacggcttcctaaacacctcttatcaccggcaagaggtttatgtgcgaca

SEQ ID NO: 680367 - DNA, 140 bp, Homo sapiens
ctggcgtggtggtggagggagaaaagagttccactggcagcagatttgggcttgatgtttctgatttatttccaggacgacctggagttctcactttcatctgttgaatcttggctttcacttttcattctcttgagcta

SEQ ID NO: 680368 - DNA, 178 bp, Homo sapiens
tgaattttttttttttctatctggtccatctgctggattcatttctccaatttcatgtccattttggtgtgggagtcggggtaaggggtactcttgtcaaaaggcacattggggcatgtgtgtttgctagctcccttggccatgaaaatattttatgatattaaaaaaaattttttga

SEQ ID NO: 680369 - DNA, 908 bp, Homo sapiens
tccgatttatcgttattaattatcaaaatcatgaccagtgtgtaaacttacttgtgaaaatatacagcaactgtggggcttataacacatgagcaaagatgactttaacacgtgcactgtccacatctgtggggtctaaaggtcaaaaacaaagatcacagacaagacgttactaaacggacccctgcagtaggtcccgaattgcagaatcatccaatccccagctatggtcagcacggagatattcagcagaaagaaacccagcaaagtcctctctgagccgttagagtcaacaggcttttcatacacactatggagagcccagccccaataacccttgagaacacggtcccatgtctgtggctaacacggctctcaccgttggcctcaacaccccggggccatgctccctctgcttcttccatccccaccacaacgaaaaagggtatgaccgccgttaatattaatagtaagagaagaacttttgaggccgcaggacagggccgcagaaagcaagctctctgggtagtgccttatgctcacccacctgaggccctgtccaagtgccaaggagcttcccaatcctagagaactggctggtccttaggaaagtattgtctgtgttacgagaaaagggctttccatgaaatttaaggtccccatgcgaatttgttacactttccccctaaaagagaagaacaacccccggtgggcccggcaccccacgggaatgaaagagcatttccccacctcttccgggttaacggtgcgtgttggccctcgaccgcaggggtccagtcccctgaacagccgtgcccatgtagacaccgcgcgggggagggcactagaggaacgcgcaggcgatcacgagaggggaagccgcaaggcacctgtcccatatagaccac

SEQ ID NO: 680370 - DNA, 239 bp, Homo sapiens
agccgatactggggtttcgtgccggaatccaatatcgtcgggaaggccttcttcatctggatgaatttcagcgatctcagccgcatcggccggttcaactgattatgtcgctagccacgctagaaaaccggctggatcaccactttggtgacctagcattgcttgaacaggcgttgacccatcgcagccatggtgcgcgccacaacgagcgcctggaattcctcggggattccgtgctc

SEQ ID NO: 680371 - DNA, 536 bp, Homo sapiens
ccccagaacacctagccgaaagaaccactttcccccttctaggttgggacccctgaaaggtatacaccctttatggaatccgataatgctcagccctacaattttgccttgggaaatattgccataggggcctactctaagttcccttatcaaaggtctcgaggaagtagcatctgttaatttcgaaatcttaccatgtataaacagtacacacctcgtgttgatgatacaatatgtgaggaactttctaaactaaggaaatgctgatcgctcacacttatgaatttctaaaacctaggaagacacgcttggagcgattttgaatatacctaagtcccatttaaggtcaagtttccccgtagatgtatcaaaatacacccacctgtaaattaagatttaattcccgaatggactcaatatgttcaaaatccatctgtccactaatatatacctataagtaattaagtgttattttcgcacaatggcaatctcaaacgtgaaaatgtgctctatgaaaataatttgtttaattaaca

SEQ ID NO: 680372 - DNA, 443 bp, Homo sapiens
  misc_feature (237)..(237): n is a, c, g, or t
tcttgcccgctccactcccacctggggaataattcctgaaatccttttctagtaaaatgcccatgctcctctctcccagttatctacagagtttaagacaagaggtgacgtagtgagtaggagattcgtctccagatcagagacatctgggctttagtcctggactagccacttgtcacactgtggtcttgtgcatattcttagactctctaaatcttatttttctcagctgcttanaggaaataatgggagtttctctttcatcacactgttgtagaatcaagtgagatgtaacccttatagcttccagtgtctcagtggctcagactttgtatagagtctcattcaaagaagctcagtccaagcaccaaaaataacttaaaaagtacttcttcaatctttgttgcttctcttgaataacattacaggagatctcttgcgta

SEQ ID NO: 680373 - DNA, 1230 bp, Homo sapiens
gccggaccccgccagcccagccagcccagacccttactccctccccacgccaggacagacagccgttgctcacgagagaaggtggaggaagaaatccagaccctagacctgcgcgcaccatcatggaccattatgattctcagacaaaccaacgattacatgcagccagaagaggactgggaccgggacctgctcctggtacccgggcatgagagaagcagaaagagaaagaccatgcacggccatggtgtaactccacaccatccggaaggcggggaccaacagatcgagcaacactcgacacgaggccttcccgggatggcctgaacgctcagtgactgcatgcaagggagcgtccatatcaaggatgaaacgacattggaccaagcccaagagcgacaggcaacgactgcacacgtcgcacaaaagaatcatcacaaaacgatcaaacaacggaacctggcaatacccacgcaaccccagacacaaaggccgtcaccaacagggaaggaaccaaaccggggaaaacccgcacgacacagcggcggcaagcggaacccgacgaacgccatagaccaccactgcgagccaaatccacacctgcgcacgccagcaaatacatgcaacacaacgggcacaaaaaagaagaaaccaaacacgaaagagaagccaaaagcaagaaacacacacgaacaacaaggcaaacagccacatagcgccacacggtagaggaagaacaaagaagaaacaaaagacaaagacaccacatgaaacccaaaaacaagaaccaaaacaataaccaagacaccagacacacaacatccacagaaagggacacacagacaagagacactcaaagaaaaaacatacagcacacaagaacaacgcaacacaagagcaaaaacgagaaccaaggcaacgcggaacagtaggaaacagaacgaagaccaaaggccctgcaaggaagaagaaaaaacaaaacacaagacaacaccccacagaaagcactgagaagaaacacacgccatacagaaacgctgggcaaaaaaggaacagaaaagactgagaaataaatctacaacaacaaggcaacgagaactagagcagaaaaacacaaaaacaagacaaatgcacgacgctcaagacaagagacaaaaagacaaaacaagaagacaaaacagggagagaaacgaatcaaaaaagaaccaagataacgacggacaaaaacga

SEQ ID NO: 680374 - DNA, 662 bp, Homo sapiens
  misc_feature (546)..(546): n is a, c, g, or t
  misc_feature (554)..(554): n is a, c, g, or t
gtgcaggctggagcgcaatggtgcaatctcagctcactgcaacctctgcctcacgggttcaagtgattctcctgggagatggagaaagtctccattggtttatagttcagaattgaactggtataattgggaatgtctccatttttttggtagtcatgttcttcattctttagctttgtatcttctcaagttgaggaatgtgctaaactgagtagtaaatttaaaaaaggatttaagagagatcattataaaatgaattgcttcttctttgtaagatacaggaagtttagtagctttcttgaagtctcaaatgagaattgagatgttgaagagaacatctactcttttgctatttagtgatgggctaaaggcaatttactaatgaaatgaacaggcaggaaacaggccattgactacagaagtaattaccaaaaaaagtacttctttttattttaagaacttgcaacccatatataaaagaatccttcccagtgaaataagtattagttaaccacaacttgtgatcatgttaaataggaagcattnagttgcanaatttgtggggaggagcacagacagtgctttgaatggttcattcgtaatttgacaaagttgattaggcaataatccacatgcagaagttgtgagattactgctgtgtt

SEQ ID NO: 680375 - DNA, 230 bp, Homo sapiens
gggatgattgcccaacatggtgaaggtactcaatgtccctaatggtaaatttcccaacccctttcccataatttttaaaaagctttattagctccattatgttatgatacttaaatgtcataccaatagcattctgtacgcttccctaggataaaaacttcggatttatatgcatctggaaaagaaatttttccctgtaatttgcaaataaatgaatttctaaaaatcta

SEQ ID NO: 680376 - DNA, 432 bp, Homo sapiens
  misc_feature (194)..(194): n is a, c, g, or t
ggaaaggttcctcccccttgggaggggaaccctgataatttttctcttagggggggcggtccccctttgggggagccctaaggggggggagggtttttttagcccccccctcaaacccccccaattgggggttaagccctttgttttggggggaacccccctttaaaaaaaactttgtttcccctacccggggntcccccgttcccccccaagttacctgggggggttccgggggtgggggattttcctttttaaaaacccccccggtttttggggcctttttttgcaaagccttggtgggcaaatttttttttggttccccccaaggccgggcccgggggccccaattttgagccccaggttttcccttgggaaaaaccccccctttgggggggggaccccggaccccctttaaaaaaatttttggtttta

SEQ ID NO: 680377 - DNA, 169 bp, Homo sapiens
gctcggaaggtagtcgcctctacctataaatcttcccactattatgctacatagatgggtgtgctctttaagctgtacttaagtagctcgtctggtttcgggggtcttagctttggttctccttgcacagttatttctacgtaatacattactgcgaccggtctcgggg

SEQ ID NO: 680378 - DNA, 185 bp, Homo sapiens
aatcctccctcactccccaggtgctgcggcgtgacccctctgtgattacaacccctgctctcgctgctccatgcccacaggtgctgtgcgtcagtgccacatcagcatgctcttgatcactttcttgactttaaaagcgtcctcttccctccctccctccccgggatacagctccccgggataca

SEQ ID NO: 680379 - DNA, 178 bp, Homo sapiens
ggtggcgatctagaggatcccagttcaagaaatcagcagactacaaggcttataaagaaaaacagcaaacctgctctggtctttcaaccttgtccccggtctccagatgcagttacttgcacatcttttatcagtttatttgggtgtttacattccgtatttttaaacatactgctta

SEQ ID NO: 680380 - DNA, 968 bp, Homo sapiens
agcacagagcgctcgccttatgcctgatccagcgcccgtccacaccgcgccgcagcgtcaccatggatgatgatatcgacacgcgactacggtcggtcgacaagcggctccggtcatgtgcaaggccggcttcgcgggcgacgatgccccccgggccgtcttcccctccatcgtggcggcgccccaggcaccagggcgtagatggtggtgcatgggtcagaacggattcctatgtaggtgcgacgaggcccagagcaagagaggcatcctcacccgtgaagtaccccatctgagcacaggcatcgtacaccaacttgggacgacatcggagacaaatctggcaccaaaccttctacaatgagctagcgtgtggctcccagaggagcaccccgtgctgctgaccgagtgccccctgaaccccaaggccaaccgccgagaagatgacccagatcatgtttgagaccttcaacaccccagccatgtacgttgctatccaggctgtgctatccctgtacgactctggcgtaccactaggcatcgcagatgcgactcccggtgacgagggtcacccacactgtgcccatctacagaggggtatgccctccacgcatgccatccatgcgattggactggctggacgggacttgatgacttactcatgcagatcctccccgagcgcggtacagttcacaacagggcgaccgggaatcgtgcggacataaggagaagtgtgctacgtcgcctggactgcagcagagatgccaggtgcttccactcccctggacagagcagactgctgacggcagggacaaccaatgaaagaaagaacgagtccgtaggacttttcactcctctggcagaccaggaccagaaaacctacccctatgtatgaacgacatgaccaccgtctgcgccgacggaccctacgatcgccaccaaaacaacaccaacgagcatacacaatagag

SEQ ID NO: 680381 - DNA, 262 bp, Homo sapiens
  misc_feature (4)..(4): n is a, c, g, or t
cagngacttgttcatgacagagctcctttaggacattataacatgcttcctagattaggacttgcgggttctttatgttctggccaggtaaaaaacattatgctgcatacttgctgatgctgagggccagtcttctttttctgagtataggcaacccctcctcccaggccataactgcccaacaaaacagcccttaaaaatatcccaacattcgtgggtaccatacgttcccatttttatagaccattcgaaccggttggcg

SEQ ID NO: 680382 - DNA, 862 bp, Homo sapiens
  misc_feature (468)..(468): n is a, c, g, or t
  misc_feature (556)..(556): n is a, c, g, or t
  misc_feature (689)..(689): n is a, c, g, or t
  misc_feature (742)..(742): n is a, c, g, or t
  misc_feature (816)..(816): n is a, c, g, or t
  misc_feature (824)..(824): n is a, c, g, or t
  misc_feature (854)..(854): n is a, c, g, or t
ctgtcagttcatcaaactcatcctccgtccagttttgtttccttgctggctaggagttgtgatcctttggaggagaagaggcgtttttcagcctttttcagctggtttctctccgtcttcatggatttatctacctttggtctttgatgttggtgacctttggatggggttttggtatggatgtcctttttgttgatgttgacactgttcttttctgtttgttagttttcccttttctgtttgttagttttccttctaacagtcaggcccctctgctacaggtctgctggaggtccactccagaccctgtttgcatgggtatcaccagcagaggctgcagaacagcaaagattgctgcctgttcctttctctggaagctttgtcccagaggggcacccgccagatgccagctggagctctcctgtgtgaggtcctgactgtcccccagtcaggaggcacgggggtcanggacccacttgagggggcagtctgtcccttagcagagctcaagctctgtgcggggagatccactgctctattcagagccagcaggcangaatgtttaagtctgctgaagctgcacccacagccaccccttcccccaggtgttctgtcccagggagatgggagttttatctgtaagcccctgactggggctgctgcctttctttcagagatgccctgcccanagaggaggaatctagagatgcagtctggctacagcggctttctctggctgcantgggctccacccagttcgaactttctggcagctttggttatgctgtgaagggaaaactgcttattcacgcttantaatgacngatgcccttttccaaccaaacttgagtgtnccgggtgg

SEQ ID NO: 680383 - DNA, 208 bp, Homo sapiens
ctatgagaaatctgggccagaggaggactacggtacatgaagattatgattctacgtatgacagctgcattggaaaacagtatcattgataagtgttgtggagacgggtgcacaacaatgtgaatgtactatacagcttctcaactgtacacttaatacatgatcaatgataaattttatcattgggccgggccgcaggtctgtgagg

SEQ ID NO: 680384 - DNA, 135 bp, Homo sapiens
agtcgtggtcgtgcattcgatcaggtgtcaccatcgcgatttgcagcggcacttcgggacgcgtctgcggctctgatctttccaccagcgcttcaggccttcgctgccttcgtccgccatcgcctgattcatcag

SEQ ID NO: 680385 - DNA, 204 bp, Homo sapiens
aaaagtagtattatcatagaggatagctccatgcataatattgcatggagcttccagtgggacaggatgtggagatgggagacagtgatattgatgaacctgaccctgggtagggagggtctctggatagccctgacctaggttaatgtgtatgtgtctgtcttagtttcaaaaaaaactgtttaaaaagtataaaaaaaaaaa

SEQ ID NO: 680386 - DNA, 323 bp, Homo sapiens
  misc_feature (175)..(175): n is a, c, g, or t
  misc_feature (277)..(277): n is a, c, g, or t
gccaattttgcattttttataaagatggggtctctatatgtttcccaggctggtcttgcactcatgcctgtaatcccagcacttcgggaggccgaggcgggtggatcatttgaggtcaggagttcgagattagcctggccaacatggtgaaaccccatctccactgaaaatacanaatttagccgggcgtggtggcacgtgcctgtaatcccagctactcgggaggctgaggcaggagaatcacttgaacacaggaggtggaggttgcagtgagccnagatctcgccacttcactccagcctgggcaacagagactccgtctg

SEQ ID NO: 680387 - DNA, 888 bp, Homo sapiens
  misc_feature (176)..(176): n is a, c, g, or t
  misc_feature (215)..(216): n is a, c, g, or t
  misc_feature (888)..(888): n is a, c, g, or t
aggcactaggaagaagaacttccagcccaggagaaataagcatctgctttgtctgccgagctcagaggagagcccagacccctcccgcagccagagggctggagcctgctcagaggtgctttgaagatgccggaggcccgtctctgctgttggcatctgtgttgctgggcctggtnctgctggtggtgctgctgctgcttctgaggcactgggcnngggcctgtgccttatcggctggaacgagttcatcctgcagcccatccacaacctgctcatgggtgacacccaaggagcagcgcgttccgtgaaccaggttgctgctagcttgcggaagcccgggaacgcccaagagcgtgttggaggccattgacgaccttatctgcgagcagaaaggagtgggccatgaaacgtggcctaccaaggaaaggcaagatcgtggacgccgtgattcagggagcaccagccctccgtgctgctggaagcttggggggccctaccgtgtggctactcaggttgtgcgctatggcccgcctgctgtcaccaggggccgaggctgcatcaccatcgaggatcaacccccggactgtgcccgccatcacccagcgggatggggcatttccgctggcgttgaagcgacaaggtcacccttgtggttggaagccgtcccaggaaaatcattcccccaaggttgaagaacaaggtttgaatgtggaccacactggagcatggtcttcattcgaccactggaaggcccgggtacgtgcggacaccgcttctctgggaagaaatgtgggctgctgcgaagcggcactgctctggctgcaacagtgatctgccggtggcaagatccttagacatgtcgggagaacgtttttgtcacccaaattn

SEQ ID NO: 680388 - DNA, 137 bp, Homo sapiens
atactgtatatgattctcctgatcggtaactcattcagtttccatatgcgaatccagtgctatctgctgtattcagaactcttacatcggttttccaaaccccgatttgaagctactacccgtcgtagcttctaggg

SEQ ID NO: 680389 - DNA, 327 bp, Homo sapiens
acacttgaaacgtaagacagagggtgcagtgagacagatcgtgccactgcactccagcctggatgccagagcgagactccatctcaaaaaaaaaatttgagaatccaaagataggctgtaagctagatctttaaatacttgaaatatacttggtaaagatcacagaaaaacactctctaaggagaggttacagaatgttcaaaagcccaggggtgggataatgctgggggatttcagggaaattaaaggagactagtgtcactgtaacttaggtactcaagaaataggacaagcacagcaggagttagatcataaaggtcattatag

SEQ ID NO: 680390 - DNA, 207 bp, Homo sapiens
taaaacctttccggaaaattttaagcgggggccaagggcccccccccaacctccccccaggttgcccgttgagccagaaaaaaaaatttgccctttaaaaacccagcccaaggagggccccggggggggtcctcccttgcggcgggccccaaaaacttttggcttcggttcttttacaaaaatttttcctttaaaaacccaaatttt

SEQ ID NO: 680391 - DNA, 153 bp, Homo sapiens
gctgatcctagaggttcccgggccagatagctctcttggggttggggtggtggtgcttggcagggaagcctctctctctctcttcccggctctcgtccccttccagcgatctctggcttttttcctctggatggagggcaatcctaataagaa

SEQ ID NO: 680392 - DNA, 157 bp, Homo sapiens
  misc_feature (16)..(16): n is a, c, g, or t
acggactgatcacganccgggccagttcgtcgagcgaggtctgcccctccatcacgcggcgcatgccgtcctcggccagtgtcggaatctttggcacgcgcggtattccggacttcgcgaaaggttgcacggcgggcgatcagtccgttcgcatgtt

SEQ ID NO: 680393 - DNA, 753 bp, Homo sapiens
tgtaccctgctcttattctccttcattcctgcagcctcctttgccctgtgacctgcatgtactgggacggcacctaaagaggataccgggaccgctcctgaagccgcgagatgatatcaagcagatgcagcctgaccattagggccaaggccaaattgcaaaaaaaaaaagaagtttgcctttatatctactccaatccacgatctaaacttgggaggtcaagtcctgtggacagatcagaagacatagttccctccttctgggtgctccagatccatacataacactgatcgtctgggaaggaggatgaggatggcaggatgggtcattccatgctacatgacagggagagccacatgtagatgcccaaggcaccagctagccatccatatggacatgaaaaggactgatcagaggacagtgaattgtgcataatgagagctgggaaactgggaccatctatgaagaccaatggcgagcacagggatgagaggccacccaatcaagacaatgttcatatgcaaagaggacactggccaaagcgaagaaccacctgcaagaaatccatgctgatgccctagacatgatggaatggaaagacggattagtcccaccccctgagtaacagtgggcgactggaaattaacgaccaacgcaaaggcagaaagacacaccacagatagcacgcaacaactaacaggaaactgagacacacggagaaaaacaggacacgaagaaccaccatacaaaaga

SEQ ID NO: 680394 - DNA, 1189 bp, Homo sapiens
  misc_feature (161)..(161): n is a, c, g, or t
  misc_feature (183)..(184): n is a, c, g, or t
  misc_feature (189)..(189): n is a, c, g, or t
  misc_feature (213)..(213): n is a, c, g, or t
  misc_feature (239)..(239): n is a, c, g, or t
  misc_feature (899)..(899): n is a, c, g, or t
  misc_feature (1030)..(1030): n is a, c, g, or t
caacggaggagagaggtatcaccaagagatctgagttggagtaagggaaaagatacccaatatggtagtgttgtaaaaaagaccaacacgagattatgcaggagaccacgacaaatgtggtatagagagaccgctgaagcgtgaaacttggtgaatcattnaactagggccaccccaggaggnnggctngggcgggacagggtctcccgctgncaggtgcgcggaggcaggaggccggngtggcgtggggtcgcatggctgcaggcttcagcgttcagtgattgtcgctgggcacaggcgcggcgctggtgccacggcagcctgcaccttctccaccagcccggcccactggcgctgcatgtcttccaccaggggctcgaaccagctcttgaggcgggcctggaaggcctcggcctgcaggcgtatctgctgggcctgctcctccagcttggcgcgcacctccgccacctgctccttcacctcgtccaggcggtcgcgggtccggctgcccatctcctccatccgcgcgcgcagccgctcgccccaggcctgggcccgctcctgtagcggctggccggccagggagcccacagtgcggcccgcacgcggccctgttccaccaggggccccaggcgctcgcggatggcgctgaggccgcgctcggcgccctcgcgggccccggcctggtacactgccaggcgcttctgcaggtcatcggcatcgcggaggagccgcttacgcagcttgcgcaggtgggaggcgaggcgcacccgcagctcctcggtgctctggccgagcatggcctgcacctcgccgcggtactgcaccaggcggccggcacacgtcctccatgtccgcgcccagccgggcctgcgccgcctgcagctccttggacaccngtgcccgcgtctcctccgccaccggggtcagttgttcctccagttccgatttgtaggccttcaactccttcatggtctcgtccatcagcgccctcagttcctgggtgacctgggagctgagcagctcctcntgcacgtgctcacacagtgtatgcacccagcgcaggtaatcccaaaagcgacccagtgccagttcccagcgctggccgctctgccactcggtctgctggcgcagctcgggctccggctctgtctccaccgctgctcctcgtccgattacacaccaggca

SEQ ID NO: 680395 - DNA, 938 bp, Homo sapiens
  misc_feature (161)..(161): n is a, c, g, or t
  misc_feature (183)..(184): n is a, c, g, or t
  misc_feature (189)..(189): n is a, c, g, or t
  misc_feature (213)..(213): n is a, c, g, or t
  misc_feature (239)..(239): n is a, c, g, or t
caacggaggagagaggtatcaccaagagatctgagttggagtaagggaaaagatacccaatatggtagtgttgtaaaaaagaccaacacgagattatgcaggagaccacgacaaatgtggtatagagagaccgctgaagcgtgaaacttggtgaatcattnaactagggccaccccaggaggnnggctngggcgggacagggtctcccgctgncaggtgcgcggaggcaggaggccggngtggcgtggggtcgcatggctgcaggcttcagcgttcagtgattgtcgctgggcacaggcgcggcgctggtgccacggcagcctgcaccttctccaccagcccggcccactggcgctgcatgtcttccaccaggggctcgaaccagctcttgaggcgggcctggaaggcctcggcctgcaggcgtatctgctgggcctgctcctccagcttggcgcgcacctccgccacctgctccttcacctcgtccaggcggtcgcgggtccggctgcccatctcctccatccgcgcgcgcagccgctcgccccaggcctgggcccgctcctgtagcggctggccggccagggagcccacagtgcggcccgcacgcggccctgttccaccaggggccccaggcgctcgcggatggcgctgaggccgcgctcggcgccctcgcgggccccggcctggtacactgccaggcgcttctgcaggtcatcggcatcgcggaggagccgcttacgcagcttgcgcaggtgggaggcgaggcgcacccgcaagtccttagtgctttaggacgaacattgactggaccttctcttgggacttgaccaaggcggccttccacttgcctcatttttcccttccaaccggccaatggccgccttggagattttttgacaaaccggacccacctttttttcctcaacaaggtttagttg

SEQ ID NO: 680396 - DNA, 597 bp, Homo sapiens
  misc_feature (566)..(566): n is a, c, g, or t
tcaagagcaaccttcaaagtcagatgacaatgtgtatgccttcagacttctcatggaaaatgttttcccctgcaattctatactccaaagtataagtatagaataaaggcatttcagaccctttaaatctgaaatctttatctcccatgcatcctttctcatatgtgcaacactacacaaggagtaaaccagtaaataaaaagacagatatatggattccctattgcagtccgtacgtcagaagtctcctaaattcaaaaacgggccctgtccatgtggagccaaatgcatcttggaagacattcctagtagggtgcaaacttccagagacctatctcaggttcagtgtccacccaccctacttattcttcagtttgtcttcactagacagttgtactctgtgcctttgcaaaagtcaggatgtatatactctttgagtcaggtgcaaggcaccatttgtcttaaatttattctcattgctgtttcaagtgacctcaaagcaggcagcattttcttgcaattccatctagttattttttatgatcatggaagaacctaccattatngctgttacctgtggaaatgagggaagatgta

SEQ ID NO: 680397 - DNA, 345 bp, Homo sapiens
  misc_feature (19)..(19): n is a, c, g, or t
cccagttacaagtaaaaanaatgaaatgtgcaacaggcataaagaaaatggggaaatgggctgggtgtggtggctcacgcctgcaatcccagcactttgggaggccgaggtgggtggatcacaaggccaggagtttgagaccagcctgggcaacatggtgagactctgtctctaccaaaaatacaaaaaaattaactgggagtgtttgcacgtgcctgtggtaccagccactcgggaggctgaggcaggagggggaattgtttgagcctgggaggtggaagttgcagtgagccaagatcacgccactgcactccagcctgggtgacaaagtgaaaccctatctca

SEQ ID NO: 680398 - DNA, 931 bp, Homo sapiens
catgaataggggtgcagtgagttacacacacattgaggggggacagcgatggtacaggcgcaagccacaggactagtagagagtagaggtgggggccggcagagcaaggaccccaggaccaacattcttggccaagttggactggagagcactgtcccaagggtgccccaacctcagccatcatgcatcccaggagcatggacaccaccagaccaggcgatggtatcatagcatccagtggatcttggagacagatcccagagatggagatcagcatgggagagccgcacatagcttggccctgagtgcgctcgcatcactggttactacttctagccactttcctgctccaacaaatggagagaaagggggtgtgatctggagactcccccattacttcataggaggctgtgatgggagaagagctcagtcacccactagacgcagcactcaggatcacactacccagaaccccagcagtgacagcatgtgtaggcctcagaccagggatcagcgaccatgtcaggacaaggggtgacatgggagaggacggcaacaggactcatcccaggcaccaaagaaccacaccactcgaagacaccagagaagacccacacagagcaactaaagactagacagcgagacacacacacaaagacagcaatagccaacaggactgaacagagcacaagacaaacacaaacaaagcatgcagaagcaaaataacagaaacaaaaacagacacgacaacagcaccaaacatgccaaccggacgcaataacccgcggacccaaggcaaccacagaacacccaaagacagctgaaggacacacaacaaaaccaaggaaaaaaaaaaccaaaacacacacgaccagaaacaaaaaccacacgacagacgaaccacacacagaaaaataaaagacaaccaacc

SEQ ID NO: 680399 - DNA, 165 bp, Homo sapiens
  misc_feature (54)..(54): n is a, c, g, or t
attgcaacattggttcaggctggtgttcagggttccttgttttaggggtatggnagcagcatgtgtttcaagtgctagtggcccagcacagcggggtggatccgctcatatgacaccacttagaataaatcgccagagccaacgacacacagaccacacaacgac

SEQ ID NO: 680400 - DNA, 1512 bp, Homo sapiens
  misc_feature (316)..(316): n is a, c, g, or t
  misc_feature (1098)..(1098): n is a, c, g, or t
  misc_feature (1396)..(1396): n is a, c, g, or t
tttgacgcgaagctcttcagctgatatctaaggacgtagatacaacatacgtcacgaagcctgtggagcgttctgtgggaagccggaggctcggtcagcacgaatggccgcaactagagacatcgtctggggtaaatggcacagaggtgaatgtgtgtaacgcaatgggggaacatgatgtggtacatgtgcaagagtagattgcgacgtctgtaatagttgggaggatcaaagaatgcgtgctatgtatctatcaatatggacacgctatgatgagtggtcgtgacatcgcagctacctaattaattctaaaggntgctcattggacggacgtatcattgtagacgcggagccaaacacacacggacacaccctttgagtccatgtgtgagtcagagtgaactacaggtactgggtgacaattcaaagcagagctcaatggatgggaggactgccaaaacaagcgagcgcaaagtgcggtcaattattcgggcctcggagcatttttctcgagggcgcaacgtcggcagttggcagaatgtgtacacaccttcctttcctaagtggggggcaccgtggtacattcctaggtggactcagcgcccaactcctaccaatgggatggaggctggggcctttgtgacctgtggaaacctgttaatttggggcgtgcatgtagttgtccctttgccgcttctaacctgtgggcaagctccattacttcgcagatagaggccccattgatggtgggatttgcgttcccataggggaacaccccaagccacagcagtttgtaggcaccattgaaattacttttccctttggtgcggattacggccctccaacggacattaggataccggaccccctatttggcgttcaggggactcgaaagagaaagctaggaaacgtttaggagttagggaaccaaagcgcgtgtggggccggtaaaatatgggaattcccaaaacactgggctggtgggatccgcaagcccagaggggattcccctccttggggaaaagcacttcggagaggaatcccacgggagaccccgacactttcttgtgggggattaggttcatactattaaagatncggcagctttggtaatcacccgtgaggaaaacttccggatttgcgttcttctcggaaatttccgacgttcgcaattagctttaaaacacactttttagggaagcggcgcaaccaagcgttgggtggtaacaccgggggcgtttaagccgcaattccgttctgttgtttgtccggaaattataaccactttgtacggggcgagtacagtttttaggagccatttggagttttcgcaaacatctggtttcctctgactttttggcacaccgttgtgacttcctttttgtgaggcaaccanggttccattttgcacatatgcaaaacaggggacacgacaatgatgaaggcggcgcgtaaaaacatcaaaggtcggacagaggagcactccgcacagggaaacctgtgtatacacag

SEQ ID NO: 680401 - DNA, 361 bp, Homo sapiens
  misc_feature (333)..(333): n is a, c, g, or t
gcacagccgcaggccaactctcaactatgttaggtgggtgatggtgcctgaggctactgcctggccttgacggctcacagaggcccctgttcacagtggggggtccatgctctgctggattgtccaggcatccagtaagccaggacatgaacttggctttagagagaggccccagacaccagcaggagctgcctggagcctagagtgcaaggcccctgaggggacagcctcttttccaccctgttcctgctctagagctgcttggtgggaggggatgtgtccaccccagtttccccccagctggcactctgcccagacagcagagcaggaggngcctgagatggtagctccaggagctggt

SEQ ID NO: 680402 - DNA, 808 bp, Homo sapiens
tagtggttcattaacattgaagttatggccaacagcatttcaactcatatttcagagggtggaggttgtggggaggagtgttttcctggagagcctctcaacatagatacacttgtgtggacctaaaatcacccaagctaggagggccagcccatcctggtctgccctgggctgagggctttcccaggagagtgaactttcagtgctaaagccagacagggacagctgctcaccctacctgcctcctaacatctatccacgggttctgcatccaccctttggagtggcacaaaacaaagatgatcccctctttccccaagtagactctgagtgaagacacatcttaggtccacttctcaggctcaatatcctcaatttcttggacctccttcatattgtgcgaggtggcagaggctgcttgctgatcaccaggctcctctcctcttctgcactttccagcctctctcgcaggtaggagtggccacaggagttctagaatgtgagcagaaggcatgtggccacttccaggccctgcctatacacaccttccactcacagtcctccatgctcttgcacaagagggaagctgccctgggtcactgctaggggagggctgacctccatcaggagcccctcctaggtgagcaagccataagcggttgtgctgggtctctgtggttaggggcttacctgtcacagcagtccaatcactttgactggtcacatgacgcaagctcttttgtgaccagtcatctttgaaactttctgcctgttaaactccttttggagtcccgtgtgccgggtgtca

SEQ ID NO: 680403 - DNA, 289 bp, Homo sapiens
attctgagctttgcgattacggcatgactggaaacttagaagagtgggagatacaattctcggagatctgagctacagaagtgcaggactctctctttcctcatcatggtagatctgaagtaataaagaatacagatctcgatctggattatacgatacctgaagatcacctgtcctcttgtatgtccaaattcctagtgatgtgagaggggtctgcatatgtcaaggttgcaatacaacaagcaggctccagatttaggtgacctcgtgactgttagactcttgaaac

SEQ ID NO: 680404 - DNA, 719 bp, Homo sapiens
agcggatctctccgcatctgacaacagacggagcagaggaacgtgtagcgactctaagcgcgtgtgtatgtggccgtgtacggacgttggagacttccaggtagaggccggctaggaaactggcgtaacgcagtctctcttctcatattccatgcaagttgcgatgctatgtgaagagggccagctatcttctgctcttgccatacaagtgtggcagcagctgcctgggaataccatgacgacttcattggggaagaaagtagcacagtggggagtcttcttctgattgtctgtagtagcagggagcctgaagacagtccagctgagtagacgtacactcacggtgcgggagacgtacacgctgcataggaccagttgtgcatgggctcgtcatagatcgccaaaggatgattcctagatataccactcatgccatgcctcaagcccgaaggtccctatgggggctgaatcctggcgaagccctgtcggtggggattccagcagcgaataggcatgcaaagctgtccaacaggagtgttacgcgcttccgcaatcgggcaacaagctatggatcagaacgttctcgttagctcccccacgcgttgcctccagaccgtgcacaggaatgtagaactcccctctaggctcggatgccaatcgacagtggattaatcgattgggcctcgtctcctaagaggaagacgagaacgtagacccct

SEQ ID NO: 680405 - DNA, 138 bp, Homo sapiens
catgaacagatggacacgttctgcctccatccactcaagcgccaactaggcaccattcctccactgacaactgctcaagtgcacagggtctacccacacagacccaccaatgacgccgagcaatatagaggtgcggga

SEQ ID NO: 680406 - DNA, 374 bp, Homo sapiens
cactctttctgaccacagtgtaataaagctggaaatcaactccaatataaaccttcaaaaccatgcaaatacatggaaattaaataacctgctcctgaatgatcattgggtcaaaaatgaattcaagatgaaaacttaaaaattcttcaaactgaatgacagcagtgacacaacttttcaaaacctcgggattacagcaattttgttcttagggggaaagttcttgcccctaaacacttacttcaaaaggactgaaggaccacaaactgatcatcttaaggtcacaacttcagggaaactggaggaaccaaggaccaaaatcaaacctcaaaccccaggaaaatgaagggaaattaccaagatcaggaccggaa

SEQ ID NO: 680407 - DNA, 119 bp, Homo sapiens
tggaccaactgcaggcgcgcgctgtgatgaggagcgacttgatatcatgaaggttctaataactggtccagcggacaccccttatgcaaatggcggctttgagttgcggcttgcagttg

SEQ ID NO: 680408 - DNA, 975 bp, Homo sapiens
  misc_feature (602)..(602): n is a, c, g, or t
ttaatcaagggtgtaaccatcaatcggatcaaggctaaacccctaattgtagggggtgccgaattcttttttctccctgcccagcgtggcaatttctgcaaacgcattgttggagatttatagtcgctccacaataccttctcatgaggggaaccaatgcctgataaatttgcccccgtcgtagtatttcgaatgagtaggaagggttcttcacccgagctccaattgttgtgcgtgaaatttggtactaggaaactatccttcctcctagttggtctgctaactcggatttgggtacatagtctcttgggcctacgttcttggattctctattgttgcatagctaaatttgtccctaagtaaaggttatatcgccccgttctagccgactgaccagcccacaatgggcttaggagaatatgaaaacgggacgatataacacgggtatggactgttcctggttacgacacattgaacagatacatatgccataatggatgcttcgtgtttaaagtgggcatagccacgactgcttcactgaatacaggcaagtccttattcattctaccttgtatactcggagtgtcttttgcctggcacgnctagtatgtcactgttcatagtcaacaatgttgagttcaatatgttggagcaaagaccgagttcaaatagcccaccatgcatatgaaagttctagcactgtttaaatgactacgccttcctatactagtctgaagagataaatcattttgccaaggcacaggcgtcttgctctgttgaagcaagtcagtatccgagaaaactgctgttccctttgttgtgatgaggtagcagacacacaattgaagcacatgtggacacagatgacctgtgcatggacttgtgcccttgcagactaggagacctgcccattgtagtcgtaaagaaatacgtatctagaatcagacattacctccagggttcagtatcacacga

SEQ ID NO: 680409 - DNA, 240 bp, Homo sapiens
ctggagtgcggtggcttgatctcgtactcactagcaaacctctgctccccagttccagcgatactcttgcgtcacagcctcccgacgtaactgggattagcaggcgcccgcccaactaataaattagtagttaatagtaagagacagggtttcaccatagttggccaggctagtactcaaaactacctggacctacgtagatacgcccgcctacgacctcccaaaagtgctgggattaca

SEQ ID NO: 680410 - DNA, 175 bp, Homo sapiens
agcgttttcccttggtctttgggccagggggaaggggcccttttgggtgccagtgggggcgggtttctccctgccaggggggggttccagcccaggggggtttttggcccatcggggactctaagcgttgccccccgttgggaccccagttccagttttttggggggggaaaaaa

SEQ ID NO: 680411 - DNA, 112 bp, Homo sapiens
caggagtcagtgaggagaaggaagagcgccatacgcaacgcctctcccggcgtgcgattcataagcagtggccgacaggttccgatggaacggcagtaggcagcaataatgt

SEQ ID NO: 680412 - DNA, 1548 bp, Homo sapiens
  misc_feature (1)..(1): n is a, c, g, or t
  misc_feature (972)..(972): n is a, c, g, or t
ntgttgtttgttaatcatcgccgctggctcgccggggtcccccccgtgttgtgtacgccttaagttagtagtgctcggcggttgtgctctcttcaaacggggtttatttcgcgcccgcagtaggcccacccatcgtggtggtgtggggcgccgcggaaaaatttttctcggggggcgtcatcatccggcatgtggggaatgtttggggtgggctgtttttccacaagcgagccgcctcttttttttccgttgcgcggatgaggcggttatgggtgtccacccccggggtttgtggggcccgccttagaagtagttgttcgtccgcccctcctttggggggggcaccacctcctcgaattggctccccgccggtggtgagcagcacttgtgtgtggtttgcccgccccgccgattgtggttgtgaaaggaaatgcggcgtttaatactgtgggagattcccacgtgagacacccgccgggggggccttcttttttgggtgtcccgcagctttgggggaggcccccctctgtgggcccaccgcgtcccacaaaggcttgtagtgcgatgtgtatcccaccggcgccccacgtgtgtccccctcttgtttccccacggggggccacctggggcacagagtggtctcagcgctgagaaatgtgttctaagtccgccggtcgcagaaagagttgttttcccgcggcggcaccacagaggtggtcgcccccatcccccagggagagtggtgatatgtggcttcgcggagcagcgagcagcgcgctggtcccacagagagaggagtcgcagagagcgcactcctcagatagtcccacacactatagggcgtctacagacgccacacacgctatttgggggcgcccacagatgagagatatagtgtgagagacccgcagagagagattagagagagagagagacccccacaggatgatagtcgacacagaggatatggtnttgttagtctcggtgtgtgttaggagagattggtatagggagagagcccctcactagagaatcatatagagagaggggacacccacgagagtatatatatactgcacagaggagatagagagagagttttatagatgagagacgttgctcacacagagaggcgacagacggtttctgctctgagagagacgtgttttcccctctcacaatatacgcccacctcgtggtgtactctacagagagtgtactctgcttgcgtgtgcgttgcgtgcgcgttgcgtgcgcgtgtgctctgcgtgtgcgtcgtgctctgcgtgtgctctaagaatgttcccacgccacaaaaagaatccaccccccgcggagttaaaaggcgctccagccccagaaaggttctccttccccagaaaagcccccaggcccagaaaagccagcgccggtctctcccaaagacttccagaaagggtcccaaaagcgtcccagccccggaagcccctgctcccaaggcatctggcccagaaagccataagtggccatccattaaaagttattaaggttttttttgaccctgttgga

SEQ ID NO: 680413 - DNA, 771 bp, Homo sapiens
aagaccggggtatgtaaggactgtaactgaacactcagcgtgagcagctggccaaagctggatgaggaagctgttggccggaggcgagatggttccagtccagctatggagacccgaggccgtgggacctcacagctggactgagggagccacagccaaggccatcagtgacctgagctgatgcatagaggcccgccaccggctgctactctaggggactcaacagagaagcgcactagctacgccctgtcaacaaagtgatcaagtaccgcctcagccacagccctctacactcctcattccttcggaacaccacacctgctaccccgttaggccagccccatagtccccacattactacagtcgtaccaacccatcatcccgggactacttactccaagaagtatggcttacaacctgcgggccattcgcgtctacatgggtagactccgatagtctacaccgtgcaccatataggtgtggcacgtggaggataggaggtccggccagtgaggcagggcttcgtcacaggtgaccttcatcacccatgtacaatggcggaacctcgtgcattgcctggcgcacacggaggtggttgcgactgatcctgacgagaggacaaaaggtgccacttacccaactccctgggcaacacatcattaactgaggccactcgcagtgacctacaggcagatgcccgagacgagaggacccggagcattgcaaaccacaggaccctgtccaaatcacagatcttcacaccacttttca

SEQ ID NO: 680414 - DNA, 926 bp, Homo sapiens
aaggagactgctgaacaagcgacaagagcggaagttcggggaatgggggctcggagcgcggggacaagtttgatgtaatgtatattttacaagtaaaaaaatgtttctcagcctcagaccttgaactgaacacataggactgacagacgtttagatttctttgaccatcacggcacatctgtggctcgaagcgcgagtcgcgtctcatcactctggtaatacccatacactgtagggttaggtcaacgatgggcggattgccttgagatccaggtgttatgagatcagtctgggcaactatgataaaacaactgtatctagtagaaatgcgacaaattaatccaaggctcatagactccatgaccatgccagcccaatgtgctaggcatcgcaggcgctagagtcgatcaggagcgatggacgccttgtctcaaacaagaaatgagaacaacatggatgaaaactcatgatagaacatgttctaattcgcgggaattatgggaacgcattgtgtcgagtgaaaatggtgtggcaagtttttcagcagagggggggcagagacaatgcgggagaacgcgggaacattgggtgacggagcgtgcagtgatttgcgtgttgtgccggaggagtacgtacgggtcctcgtggggacacctagcgaggttcgccgacaaaattagaaggtgcaggaccttcgtggtgcaaccaaccggtttttttgaggcggcgggcttaataagttgtacgccccctgtgtggggcagaaaaagagaaccctcctgggtggatgcacttcggctcaacaaatgttcccccgcgggtaacagtagttccccccaggcgtggcggtggttttaacaacataaaatttctccgggagatataagagcccattggggggttcaaacacggtgccgccacctcta

SEQ ID NO: 680415 - DNA, 405 bp, Homo sapiens
  misc_feature (405)..(405): n is a, c, g, or t
cgggcgccacagcttctctgtgcttcagttatgcccatccatacacaaggggattgacctagatatcaccgggctcagacattctagtgattcttctattctgacagacattacttgtgaagaggcatcattctactgctctcctctcatctcattcaaagaagactgaaatgccagagatacaacttttaaaagtgttttatagctactgatttgtacacatatcagattgggttcactagtttgtctggggtagggccccaggtctggtctcacataaggcactctgagcctcctctatcacttattagttcccttcgcttccctagtgtctgctttctccaggtctctactcctacttctgctcatctgattcaggagggcagccctctttgttctactcan

SEQ ID NO: 680416 - DNA, 207 bp, Homo sapiens
agtaacaggctcagatggtatgttctcttatcctttgtgggagttaaaaattaaaagaattgaactcatggagatagagagtagaacgatggctatcagaggctattaagggttgtggtggagaggaaagagaatggttcatgtggaccaaaacataggtggaatgcataagatgtagtatttgatagccatcttgagcctgtgtct

SEQ ID NO: 680417 - DNA, 244 bp, Homo sapiens
catttaattatatcctattcacacaactattttccatcatcatgatgcaacactaagattataaactacacaagacactggatatacatgcactacattccatcgaaaggaacaaaacatgtacagcactacagacatagagaacccaaatattaatatactaagtgtcttcaaagagctagacctatgtgagactattcaaaccattatatatcatgtatacttgccaacttaatcaccacgt

SEQ ID NO: 680418 - DNA, 541 bp, Homo sapiens
gaggagaagaaaaggagaactaagaagaaaggaaaagaaggagaagaaagaagaactaagaagaaggagaggaagaataagaaggaaagaagaaagaaaaaagtaaaagaagaagaaagaaggaagaaggaaagaagaggaagaactaagaagaagaaagaggaggaaagaacgaaagaacgaataaggaacaacgaaacggagaacgaaacgaactaaagaacgaggaacgaacgaaacaacgacaaacgaacggacaacgaaggacgacaaacaggacacgaaaacaaggacacgacacgaaccagatacgacaacgccggacacgacaacgacaacacgaacacgtataacgacacggacacgacacgaacgaacagacacggacacacgacggacacgaaacaaacgaacacgacggaaacgacacgaacacggaaacgaacggacggacgaacgaaccaaggacgaacgaaacgaacgaacctaacgaacggacgaagaacggacgacgaacgaagagacccaagaacaacgaacg

SEQ ID NO: 680419 - DNA, 973 bp, Homo sapiens
  misc_feature (732)..(732): n is a, c, g, or t
gtctggcactgtgctggcgtggtctgcgggatcccacttatgaatctctccagatggggagctggggcaggataacagccccaagtacagctgtgtcctaatccccagaatctgtgaccacgctgcctcgacgtggcggaagggactctggcgaggtgtgatgagaagtgaatggatcattgtttcttagttgacttcggacaagtgaatgtaccgggtcattggtgagcccaggtgtgagtgagatgcaatgggcatggatcttcgagcccaatgggctagacttctagggtctaatcgaaggattcaaggggagattcgtccaaaattagagcgactcgcgatgagctgtgatataaatggttgtcagaaactgtaggggtacatctttttggtatatctaaaagagaaaaggagccgggtttactccaaggtgtgaccagggcgggtctaaatattcttgaactcctggtagatccagaagggttgagggcatcgagacagtggcgggggagtacctcggtgtgaggccaatattgtgttgtcgagggttaaggtttctggcagaggaagagattaaaccgggatggtgtggatggcacccgttgctattggtggaagtcctggcaaacggggggggactatgtgctggcgtcatgaaagatgggtcgcggaagacatggaagctgtcacctgatgtaattggcattgcccggtcgtggtgtaactganggggtgcgactgtgggacatcaggggggactaagaatgatgagggcgcaaccctgtggtagtggcgcccgggagtggggggggggccttgaaaaatggtggggatactggaggtccggagcccaagggggtctgttgaagaaaagggggccaagatttggggggggggagcctatgtcgaggataacaacggacaagaggtgtgtataaccccccataaatatcgatttattgctcgagag

SEQ ID NO: 680420 - DNA, 486 bp, Homo sapiens
  misc_feature (202)..(202): n is a, c, g, or t
  misc_feature (231)..(231): n is a, c, g, or t
  misc_feature (379)..(380): n is a, c, g, or t
  misc_feature (394)..(395): n is a, c, g, or t
  misc_feature (450)..(451): n is a, c, g, or t
aagaacatccttttccctctcattctacccttttcctctccccgattccttgtagagctgctgcaattcttagaggggcagttctacctcctctgtccctcggcagaaagacgtttccacacctcttaggggatgcgcattaaacttcttttgcccccttcttgtcccctttgaggggcacttaagaatggagaaatccagnttgtggtttcagtgaatacatggctcacnctgtatttattgctaggagaagctctgaggtgtgggggagagatgactcatgtgttcgctcgagggttggcgctgagaacgccctgggctagggggacgttgggagagaggaacatatatgggagagctccgggcgaaatatttgtgnngggtattttctttnntactatcctctgtggggttccacagcgtgtgcaacacgtatcttgactcaaaggnnagaaccccatataagacgggtataaaacaacatta

SEQ ID NO: 680421 - DNA, 522 bp, Homo sapiens
atccgagcaaagtacgagcagcgtttatttttggctccctttaaaaatgcccaggggtgccacttgccaaacagctcttcaaatcagttcaagaaaagaatctgcccaatgtcttacttctgctggcatacagtaataaggaacaaatcaatagccccaccggagaccgggacaggcgcacagctcttcatgtggcctgtgagctgcctaatgtggtgatgacacagctgctagtctggtatggcattgacgtaaaggccaaggatgttaatggtcacacggcgctcttttatgctagaaaatctgcaaatcaagaatgtgtggacattctacttcaacatggatgccctaacgagccctcaagttccatgagtaccccaattcagagaaggaaaagcagctgttctagcattttgagaactgattcccggactgcccttgtatagccagccacactgtcatgaagaaagctggcttcaaatcagtgactttgtagccagtcaaaaacacgtctggttgctc

SEQ ID NO: 680422 - DNA, 581 bp, Homo sapiens
cgcaaacaccagcccggtcgtcggggagccccccgcgacctctgggcgcccccttgcgaccctgggtcctctcgccctcaattgcccacaccgcgtggggctcccctgcgcggccggcaaaaccgcgggggggagcaaaaaccccccgggagcaacgtggaacccagaccgcccccggcgcaccattcggtggaagaggtggcaggcgaaccctcgtcgccccgttacgcaaggcggacccaccacaggtgttctgccccacatgtccaccgctcccaccaaaatgggggagcttgggcaccagagaccaaaagcggcgggatacctcggtaaaagccaatgcgggaggcgctccctcccaaagtaagcggtccggatcgggggtctcccaaatgatcccgggaaaggagacacgcccccaagcagccccctcagaccggcaggcgccgcattttgcccgcccgcaggaggccggcgggaagacgcagtagaagacacgtggcgggggcccgtgcccgggtcgtgcctcagaaccccaccggcagggagcggcaccccaaaccaaacccgcccacaaaaca

SEQ ID NO: 680423 - DNA, 324 bp, Homo sapiens
gagctgtatgttcaatcattcaacaagcatttatttaaaacctgtaagggctcacacaggtgcagtggctcacacctgtaatcccagcacttcccgaaggccaaggcgggtggatcacttgaggtttagaagttcaagaccagcctggcaacatagtgaaaccccatctctactaaaaatacaaaaaattagccaggcatgttggccacgcttataatcccagctacttgggaggctgagggacaagaatcacttgaacccaggaggcggaggttgcaatgagccaagactgggccatggcactccagcctgggtgataaagtg

SEQ ID NO: 680424 - DNA, 849 bp, Homo sapiens
atggtgcccgcgcattcctgcgtttcctatggagtggctcctggtatgtatttcccgccatcctggggccgccattaggcacataggggtgcaccaaactaaagggcgcgcgcccgaattctctcccgcgggaccataagttggtgccccacccagtactattgtctgccggaagcgctccctgttagttgctccccttggggcgatttctgtccatcctgcggggagggaccgccctcgctctttagggcaggcacgccactcacgcccgctcgcgcatgtcgtcggcgcactcctcgtgtggtgtttttcacgaacggcaagctgctatgttcccccggttctgcgcgtcccgtctttgtcaggtataccccttcatgtcctgccggggccacggcttgcactcgaaggcttattgcgtctcctgccacgcgtgcttcaccgtcttgggtagaaatgcccacgtgtaccccaccccggtgccgcgcgcgcccctttatacatgcacgtgcgtgctgcgcccacgcgcttatgtttgccgtgcaagctgtatctcttgcaccacggatgcacgtccccatgggggtccccccgcacgctgggcggtgtgtagctgcgctgttaatgaatatagttgcccgccccgcagttttcgttcatctctccgctggcgaccaatggtgcggctgtgtgtcgtggacccggggtggacacaacacattccctctgtttgcggtacagtcccccgcctcccgttcgggcagccttcgtttccatgaccatcttaatagagagacatctcttcgatttccgtgtattcaaaagcaccccccttccccccacaaaaca

SEQ ID NO: 680425 - DNA, 417 bp, Homo sapiens
  misc_feature (22)..(22): n is a, c, g, or t
  misc_feature (50)..(50): n is a, c, g, or t
  misc_feature (59)..(59): n is a, c, g, or t
  misc_feature (111)..(111): n is a, c, g, or t
  misc_feature (123)..(123): n is a, c, g, or t
  misc_feature (280)..(280): n is a, c, g, or t
gggggttgggggtgggggggtncggggggcgggggtgttggggggggtcntgtcggtgncgttgtggtgcgcggggggggggggggtgtcgggggttcggctggggggtgnttgtgggggggntggtccttgggatgggggggggagggcaggggtggcccagggggggggtggagttggcgtgcggggtgtcggcggggccagggtctccggtgtctgccaggggggggggctggggataggcgggggtgggggggtggggttcagagggcctgggggntgggggaggtggggggcctgtgcacgtagggggagggaaccggcgtgcggggggggaagcgccgtcaggggagtacacctatcccccattctcctcctatccctcaacccgggcatcattacgggggtttcctctta

SEQ ID NO: 680426 - DNA, 254 bp, Homo sapiens
tgtcgatctagaggatccaagttgaacacgaaggaggtggtggaggctgtgacctttgtagagacaccacccatggttggttgtgggctttgtgggctacgtggaaacccctcaaggcctccggacctccaagactgtctttgctgagcacttcagtgatgattgcaagaggcgtttctataagatttggcattaattctaagaaagaaggccttttaccaagttactgcaagaaattggcaggattgaggatt

SEQ ID NO: 680427 - DNA, 141 bp, Homo sapiens
gccctcggagaggcaggatcggagcccttccacccactttaaggcacggagcagaattgggcaggtgtggaagcagcccctggcaggctgccctgcagtgcctctggagcgacccaaggtggctgacagtctgccagttgt

SEQ ID NO: 680428 - DNA, 288 bp, Homo sapiens
aacgggactttcacagcaggaaacagtattaaggtgaggcagggacatagagcatgaccgagtccacggagtatcacactagtcctagtgctatgtaggtgaagaccccctatctctactaatgattttaaaaattaactgggtgtggtggtgcacacctcgtagtcccagctactatgagaggttgactcagtgagaatcgcttgaacccagggaggcggaggttgcagtaagccaagatctcgccactgcactccagcctgggcgacagagcaagactccatcttg

SEQ ID NO: 680429 - DNA, 167 bp, Homo sapiens
ggggtgtaatcggcatataaaaattcagtaaggcccattataaataacttatcgggacagattcaataataaaaataatcgggttaaaataaaaagaaccaccggtttaataacatataaatatctggtaataaaacagggggcatcgataaacaccgggtaccgag

SEQ ID NO: 680430 - DNA, 971 bp, Homo sapiens
ggcagctgaagatgatgaggatgacgatgtcgataccaagaagcagaagaccgacgaggatgagctagacagcaacacaagaggaaaagttaaactaagaacaaaaaaaggccgccgagaactattcaccctccactttcgccggctcagaatctaaacgtggtcaccttcgagatagcagaggcccgcccggccctagcgggggcgagtgccacaccggtagatgaccacgcgactcatccaactcgaccagaaccctaaacgcatgaagaaattagcgaaggtagggggaggagaacataagaagccaaaagttcccaagggccctgcttgtatatttctgtgaaaagtcacttgtaaacacaggaagaatgggttggtcaatggttaccatttcacattcttcatcattttgcgtacatcatgcgtgagggtcagccatttttaatggatctgcggatgaacaaaccagctttcggagcgttcgtcatgtcctacttctggactttacttgttgggtgtgaccatgtaacatggataatctcgagggagaaaaaaagcgcttgtgaaaaaaaggaaaaatgaggaaacagaaaagacgaatgttattccgagcgattccgagtaacttggggggtatgtacgttagcggtactataagaagttggtagtatgagatggtcaaaaagggcagagattaaaaggttcctgatttataccattagaggttctaaggaaggtaggaggccagtatcaataggccggtcggaggaatgtggctgaaacacgtgggtccgacaataacgaggacttccatgggcaacacaaacaaacacgcacaaaaaagcacaaaaaggaacagcatagaagaaccaaagaagagaaaacacaaaagagaggagcaacaaaaaaggaagagaaaaacaagcccaaaaagcacacaagaacaaaaaagacacgaacagagaaaa

SEQ ID NO: 680431 - DNA, 514 bp, Homo sapiens
tccggggttatccctgtttttggggcaaacccctatacccccctttgagggtttggaaacctttgcccgcatctaaactcctgggggaaatgtttatttgtccaaggagggggaaggggccccaattcccaaagggtctttccccgggggtggggggtttttttaatgcaggggggcccccaggttttccccttggaaagggggcggtgggggcaacccaattaatggggggtgggcccccctttggggcccccggggtttcccctttatgcttcggggttgttttttggggggaattgtgagggggaaacatttttccccgggaaacagttttgcccatgttttccccaaggccgaaattacccccccctaaaggggacaaaaggggggggtccccccgggggggggccgctttaaaaaaagggggtcccccggggggcgggaattggggccgagccccccccccttgtttatttgggaaaaggtaaaaaaaaattttcccccctggcccggc

SEQ ID NO: 680432 - DNA, 264 bp, Homo sapiens
tggtcagcaaaaatcttttaaataagagagtaggacccaggtaagttttggtaccctcggtgggcccgtcggcctcgggcacgctcgaacttccggccctgggagcggactatggatggccaagtcagcatatgaggatataaagacttggtttttaacaaaaaacaacatatccattgagatgcactttcttggtggtggttcttctacaataattcccaaaaaacttgtgcaaaacacaaaacaaaagaaaaaaaaaagagg

SEQ ID NO: 680433 - DNA, 235 bp, Homo sapiens
cgggggggggaaaaaattgggggggggccattttttttaaaaagggggccccaaattttaaaagggggggttgtttttaaaacgttaaaaaaaaaaacggggggaaagtttcccaagggccaaccttttttgggttataaaaaaaaggggtttttggggaatggggcccccccccttcgggaggagaaaaaaaaaaaaagggggttccctttaaaaaaaagttttttccccccca

SEQ ID NO: 680434 - DNA, 113 bp, Homo sapiens
atagctgttctagaggatcccgagcctagttaaaagtggagccagaaaagaagagcaaggtatggctatgagaagtaggagggaaattaggcagtgacactttgcatccaggg

SEQ ID NO: 680435 - DNA, 427 bp, Homo sapiens
  misc_feature (398)..(398): n is a, c, g, or t
gagttcagctctagagtagagccacacacagcccgggcgcatgccaacatgccggcctttgattcttctgctgtacggctgcgcgctgacacgggcggggaaactgaggcccgggcggctgggggatggggagccgaggcgagggactgggcaggcacagcccaccgtgcagccccccgaggctgtcctcagtggcctcagtgtgcccggacaccgaatgcagctgggccagagccatggcatcccccgcccgccggctgagtcagacgtgactcagggcggctcctgggccctggcttcagtccagtccccctctgtgtccctgggaaaggccagcagagctgcctctttgggccctccgaggctctcactgcccaggggcctggccaccagatggngtccctggatagccctcgtatgggcactg

SEQ ID NO: 680436 - DNA, 418 bp, Homo sapiens
  misc_feature (234)..(234): n is a, c, g, or t
ctacaacctcaagacataattgggaaaagaaagaataattttttaaataaataaataaatgaaaataagcatatgagataatgttttataaatcaaagaaatgctaattatactataaaatattcatacacatataatacttgtttaaaattacagtaacacctcacattgtgccaaatctcatttttatttttattttatttatttatttattttttgtttttgagacggagntcccctcctgttgcccaggctggaggacagtggcggcaatcttgggctcactgcaacttctaccgtcccaggttcaagcgatcccctgcctcagcctcccgagtagctgggactataggcacatgccaccacgcccagctaattttttggtattttagtagagacaggagttcacccatgttgg

SEQ ID NO: 680437 - DNA, 105 bp, Homo sapiens
aatcgagctcggcccgtcttttgtagacatgatgaccattctcaaccacgatgcatcagtatttattacaaaaattttaatcagaaaaattaaagactggtcctg

SEQ ID NO: 680438 - DNA, 331 bp, Homo sapiens
ttgtagcagtgaattactaataaagtagccaggcatggtggcgcctgcctgcagtcaccgctactggggaggccgaggtgggaggattgcttgagcccaggagttccagactgaaatgagctatgatcatgccacttattccagcctgggtgacagagtaagaccctttctcttaaaaaaaaaaaagtaataatggaaagtggcacactggcaacttgggaggctgaggcaggagaatagctggaactgggagggagatggttgcagtgagctgagatcactgtactccagcctgggcaagagagtgagaccctgtctcaaaaggcaaaag

SEQ ID NO: 680439 - DNA, 194 bp, Homo sapiens
tgttcgagttgcataggtattctctatgagtaccccgaactgggcgctgaagccgctgaacaggccgaacgtcatgacgtacatgagcgtttttgaaccaatatcaagactgtttgaagatgtcgatctgccgacggaagttcgcctttactggaacgtctttgagcatagtgaatgccaaaatcgtggccagg

SEQ ID NO: 680440 - DNA, 860 bp, Homo sapiens
cgcggtggctcacgcctgtaatcccagcactttgggaggccgaggcaggcggaccacaaggtcaggagatcgacaccatcctggctaacacagtgaaaccccatcgctactaaaaatacaaaaaattagctgggcgtggcggcgtgtgcctgtagtcccagctgctggggaggctgaggcaggagaatggcgtgaacccgggaggcggagcttgcagtgagccgagattgtaccactgcactctagcctgggcaacagagcgagactccgtctcaaaaaaaaaaaaaaaaaaagagatcccccggcctaagaacccgggaggctgaggaaggaaaaccgtttgacccaagaattcgaaggttgcgtgacccgaaattgggcccactgcacccacagccgtgggcgaacccagcgagacccccttcctccaataaagcaacaaaggaaaaaggtccccctggaaagaggccttaatttaatgggaacttttaaaattctcccttttggcagacggggacaaacacagctgtccgggagcattttggaccttgaagaccccgggcgcccgggagacataattgtgggccccccagtggacagtgccacacagcattcaactcgtgggagaaaaacgcgtcttcgggagaactgagctcctccaaaaactgggaacctggtctctgaaccccgagaacgaaagttccacaagccgcaaagaaaaaaaagaaaaagatgtgcggccgcgacccaggagtctcaaccacgcgtgggccgcccaagaagacacgtccagggccggacgcggaagggggtcccaaaccgggacggtcgaccggcggccgatcagacgacacccacga

SEQ ID NO: 680441 - DNA, 504 bp, Homo sapiens
agcggaggggggcccgagccacccggtgccgccgcgtcccgccgccgccctacccctacctcgtcacagggatacccagccaccatcccagggtctacaacatccacagccggaccgtcaccgctatcctgccaacatcttactcgtggatcgataggagagactgtccatgtcatgcagcggtatggggtgcaatggaggactgcgtgtcacgccttcccatgggacatcgtatcctggcacatcatcactcattccaccatatatgagacttcatatatgcccgtgtatagaagcgctgtaggcagggaaaggccgaacggaaatgcaccacaaacattgttggggagaccagacgtttgcagcctgttaaaaggggaacgaaacgacggaccccggggagtattaacgataacagacgacaagcttcaatctatattgtccattaaatggtaagaattgataggatgttaccaagtaagatagtaaattatgaataaaagc

SEQ ID NO: 680442 - DNA, 116 bp, Homo sapiens
ggaggggtagagcaggacttgaaagatttaaactggcccttggctctggccactatgcgtgatcctgtagagttccccacgtattcattcgtcatcactcgccccaatattttacc

SEQ ID NO: 680443 - DNA, 1028 bp, Homo sapiens
ggagagaactagtctcgagtttttgatattttttttggcataaaacaagtttaatttccaaaccagggtcacagtcatcgcgttatcccacatttggagcaaggataaaaaaggtgagtaataaaacattttacagtctacatttccagaggaggaacgtgcagttcaccactataaccaccacagacaaacttggggggtggggggagcggagagtcctcaggaagcagaaaagcgtggaatcagggaaagcataaaattaaacctaccagaaaggaagaggaaagggacgggggcacagaaatggaatgaaacacccaatcccaaaagagctgttaagtgaactgggaatgtaaacaagggaccaccccgtgccaagggctaaagcaagccaggaatactaccaagatcaactcacggcccccatgagggacagatcgggggcagcaccaaggccaaccctccataacatttccagccccaaactgggcccgtggacgcccccaaaaaacacaaggtgaggggtgagcgcctgaacgatagagcgaaaaccctcataaggcactgacatcctcacctgagagaaaacgccacggaaatgaaggcagagacaaagcaggccaaagtccctcgagtgaaaccgacaagagcaacgcactcgggacaaaatccctacagtcagcgaacacaaacacacccgtggcaaaccaaggggggaccacaagtgcagccgcaaaacaaggggaggagaaacaacggcactcaggcaacacacgggaacacaccgacacacacgcacccacaacaaaggcgaaacgaagcaaaagcagcacacacgaggacaccccagacacacccaaacacgcacaccatcgcatcatccgacccgcaaacgacccacacccaccacaatacccccaaccccgtctactccgccaacaacacacagcaccatccaggacccgcgcacacacaccaccggcagcgaccccaccaacggaccaccagctccccccacgaccgcccac

SEQ ID NO: 680444 - DNA, 1708 bp, Homo sapiens
  misc_feature (414)..(414): n is a, c, g, or t
  misc_feature (1009)..(1009): n is a, c, g, or t
ccgtgaatgatggctctcacgtaaatctttttgggtgtgaggactcctcctcgtcgtgggacttttcttctggcctccgctggtcgtgtgggtttttcttattaccggcgccgtcgtctcgtcctttctcaggtatttctcagcggagaatgggggcgacatggacctcctcttgtggccgcccctttctgccgcactgtacgcagtgggcgttgctcatacacattatgtcttgcccccccccactggggccggcccttctctgttgtggttgttcctccgtgtgggacaaatcttctataggctctcattttgggcactttgtataggaagtaatccttgctgccgccttcgatatgggggggggtgtcttggttcttcacctcgggggggggacccctgcttgtgtttctnctcttttggcgggtaatccttttctattttctgcccgtcacccataattagaggtggccctccctcccctctcgggtgggggttctcaccccgctggtacccctactggttgtgagtcgtcctttctgctatggccctccacaggggggttgctttctgggcccccgtgttggtggtttgccccgttgttttctcgctcacatcgagtatgtgtttcttcctccccccgcctctatagttcctccgcgtcgttcctcctgtcggtatgctgttccttgatggtcgtctctctcctttgtctcccaacaagttcttatgttctccctatgaacggagaaagagcgttcttcgaggggtattcttcaccacccacagcccattggcgttctcttctcggcggttgtgtttgcgccattttttgtagagcgcccacgtgtcgcgctgggccacgcgggtgtgtcctactcaacaggggcgcctttctctcggggagagactccgctccgctaacagcccacggttttctttcacacggttactcccgctcgtccttcttctggccccccgcgagatagggccgctctcgactcaacgntttgggtcctccctctcacaggagagacatgtccttctttgtggcgacccacacaagagagctcttgtggcgcctctctcgttgagcccacccccctggagagtgggagacccgtttctgtgtgcgcacacacccaagtggccctctccacacagagcgcacgcgcatctccgccacgacactgcggtcgtctccgcacacaccaccacactcccagacggctgtcgcccgggcgcgcgcgctgtggcgccccacagcgagaggctctctctgtgggcacacacactgtctccaatagagaaaggaggggccactggccacacttttggtgtatgtgcccacaggtggtgttctcctgtttaagacccgccgctgcctctcccagagtgccaaatactgctctgctgtgttttgcgtcttcttctctctgtacaccacaaaaaggtataacacgcacacgcccggaaaagccaaataggtgatctcgaataaccttgttttgcgcccataaagggtgttttcaccaaagaacacgtgtctccacttaggaacttaggaccactcatctcggccccgagacccaactccctggataaaaggaataaggagaatcgtgtttgtaacgagttaccggattgtttctttcctggattttaaacttttggttaaattgtgaaattatggaggagattttataga

SEQ ID NO: 680445 - DNA, 230 bp, Homo sapiens
  misc_feature (30)..(30): n is a, c, g, or t
  misc_feature (49)..(49): n is a, c, g, or t
  misc_feature (64)..(64): n is a, c, g, or t
  misc_feature (67)..(67): n is a, c, g, or t
  misc_feature (104)..(104): n is a, c, g, or t
  misc_feature (116)..(116): n is a, c, g, or t
  misc_feature (128)..(128): n is a, c, g, or t
  misc_feature (141)..(141): n is a, c, g, or t
  misc_feature (162)..(162): n is a, c, g, or t
  misc_feature (197)..(197): n is a, c, g, or t
ccctttttccccccgcctttttttaaacanaatttgggtttaatgattnttgtcccttgggccnggnctttgctttccctccccagtaaatatgaaataatttnctttgcccatancagacccaactntaatttcttgggngttggggatttggccttgggnataaatggccccccgtttttgtttttgtgaactcntttgtggggggggtaaaaaaaatcccaaaccca

SEQ ID NO: 680446 - DNA, 277 bp, Homo sapiens
cgtacagttgcgtgtagtctatataaacaacactttttggggtctgatgaacgttggattgggcgcttaaaccgggttcggttcaatcccggaagggcagtttctgctaacaaaagtggccactaagcactcgcatttcacgcccggctccacggcagcgaggcgggcttcttaaccatttaaaggttgagaataggttgagatcggttcgggcccaaagaactctaattattcggtttaacggaataaaaatggcgtgcgcaactggtacgggggg

SEQ ID NO: 680447 - DNA, 180 bp, Homo sapiens
atagatggctaccaaaaccggcacattcaagtacagcatgactatgcttgaaacttaaaaacaaatctacagtgagattaaagcattaaaatcatatctctcaatctagaatacatgttaaaacaaaaacctcaacaggaacgcagaagtgctagctcacatttttaccatatcccagcg

SEQ ID NO: 680448 - DNA, 243 bp, Homo sapiens
aaagcattaaatcttgttggacaggttttaaatataacgtatttcccttacctcttttttgatcatgaataaatgcagtttgtttgactgttccatcaggattaaagacatctgtcttccctcaatttcatgacgtcactcacaggtggcaaggtcgctttcccaacttggaaaattgtatagttacgacgaccagcacgaaaactatcaagtagtttatcctccaccatttttaagatattt

SEQ ID NO: 680449 - DNA, 551 bp, Homo sapiens
ctgtttttccatttccccgcactgctcagagatgggagaactatgtgtgcctttggactcacactcccaggatccagtatgagtcatctggcctcaagttctttctcccaggtgggctccataaacaatcaccttgatttttaatcccccaggaatcgcacggagcccgggaatcgcacgaggatactacattgccctgccattgacgctgctggttctgctggccggttacaaccatgacaagctcattcctttgctgctgcagttgacaagccggctacagggagtcggcgcgctcggccaggcagcctctgacaatagcggcccagaagatgcaaagagacaagccaagaaacagaagacaaggcggacgtgaggaggaaggggacagttgcagtctcacttgggacaggccacagccaggggtccagccactacccacccataggataaaaaccaaaagcatacatcagctaacttcagcctatactactaaacccacaccccatatcccttatcactataacatcctacacccatcctcacccctc

SEQ ID NO: 680450 - DNA, 611 bp, Homo sapiens
ctgtttttccatttccccgcactgctcagagatgggagaactatgtgtgcctttggactcacactcccaggatccagtatgagtcatctggcctcaagttctttctcccaggtgggctccataaacaatcaccttgatttttaatcccccaggaatcgcacggagcccgggaatcgcacgaggatactacattgccctgccattgacgctgctggttctgctggccggttacaaccatgacaagctcattcctttgctgctgcagttgacaagccggctacagggagtcggcgcgctcggccaggcagcctctgacaatagcggcccagaagatgcaaagagacaagccaagaaacagaagacaaggcggacgtgaggaggaaggggacagttgcagtctcacttgggacaggccacagccagggcctttgtttgcaaaaaaagttccagtttatttggtgtttggttccatggcgggggaccctagggattcatttgtttttttcccttccctttgcattttagatcctgctggaaaccccggccacctgtatcccctattaggaggtaaaaatcaataaaatggccccttcatttgtgttgtagcccca

SEQ ID NO: 680451 - DNA, 280 bp, Homo sapiens
ctgtgtacatgtccataagtctctttactgcatctcggtgactggtagttgaggtctctcatacagcttcagccttctagaatggtaacaaatcagccaattggatacgaaacacagaagactatgtaaaattcacccatcacactttgagactactcactggttggaagaatatagtgttgcagcaaatcctgtatgaaagagagatgtgggcttccttttagagtcttgtgttaggtgctgagaccttttacatgggcttatacagggagagagtctt

SEQ ID NO: 680452 - DNA, 309 bp, Homo sapiens
caagccgtgtgggtgccctcaaggtgtgtgcaccatggaatgggagactggaggaacccagggtggccaaccatgggtccggtccctctggtgtgagccatgagccagctgagcctgagtgcgaagacggagagaaggccgaccacagtcatgacatcaacccccataacctggggacaactcaagaaaaccacacaggaggctgagaaactactggagcaccagggacagtctgtaaagttggatggaccatcaatgggaaatgagagctgcccaccctgggcttacactccttcaattattacataa

SEQ ID NO: 680453 - DNA, 945 bp, Homo sapiens
  misc_feature (667)..(667): n is a, c, g, or t
cagtctcccaacactgaagttccaaaataatccttaccactttgtaaaccatttatagctttggaaaggtggttaacgtggattcccttcggttaattcatttatgccatggttccatggaaccttcctggctggtaccatttggcacatcagggagagttaaccacacatttccaccaatttttacactgggcctaatatttcctttgggtgctgccccttttatggagagcatagtgggcgtttttcctcggagagcttggggattcttcctacaacataagagtgctctctttcctccttccctaaataggcgcacaggggtgctccctctctcactaccaacaggtgaacccaacacactccacacacgggtggttatcttaataaacacaactatactcatctatcacttaatacttcccaccaaggggcggcctacctgcggagaaggacgtcttcagggggcaattgtgcttcacacacaccttgtttaaccacccccctcgggtcggccccccacacagggtttcctcaccccacccacctcggcgtgccacattcatcttcaacccaacaactacgtttatctccccaacagccgaggggcacgcaccaccccttgtggctaggacaacctaaaaccttatcctctgcggcaacagcncatctgcgggtccgtctacacacaacaacactcgcttctatcattatcgataccgccccccccaaactttacacaacccggcgattcgacccacaagccgcctggcgcctccgggcgccccctaacatttggggctgccagagcgaccagcaacctcaaaaactctgggcgggcgcaaccccattctcgcggcaccccccagcgcccaacagccaacctcttcccatcgcccacttccaaaagccaccacccaaccagccaaaaagtgcaggcacaga

SEQ ID NO: 680454 - DNA, 155 bp, Homo sapiens
gcatggctgtcggagtgcatggctggccggactgcatggctggccggagtgcaatggctggcaagttggtgcttgttagcaaaataccttagttccttgacaggtagatttctttctttctctctttctttcttttttttttttttggggggggg

SEQ ID NO: 680455 - DNA, 159 bp, Homo sapiens
tccccctctctaccctcctgtcggtctacctcggagggggtcggcaaaggggacgacagatgtactaggggtggggtactctcggtaacactactcggacagtgactgtgactcttatgacccttcggtgccggcaggacgcggctcccatactcttcc

SEQ ID NO: 680456 - DNA, 580 bp, Homo sapiens
agacagggtctcaccccagagtgcagtggcaggatgacatcacaactcactgcagcctcaacctcctgggctcaagccatccttctagctcaggctcccgagtacctgggactacaggcatgagccaccacacctggctaattttttaaattttttgtagagatgggggtctccctatgttgcccaggctggtatcgaactcctgggctcatgtgatccacctgcgtcagcttcccaaactgctgggattacaggcatgagccattgtgtccagcccccttgggcttctttatcatcaagtacacagaaaaggtaacaggcctcagagaagcccaattctacagagaaaaaaagaatcaaataatgaattaagaaagtatccaggaaaaacatttttaaaaagtcattctttccctaagaattctaccgagtaatacaacataaaatattaataggcacctagttaaataaacttgatttaactctctctcagccaaatataatacagaactggtttgtctgtgtcagtgatttccgatcctagtgctcattaattataagggaggttttgtttcatttt

SEQ ID NO: 680457 - DNA, 287 bp, Homo sapiens
agaccccccggggccaagagactgaagagtctgaggtaggataatgacgtgaacccgggaggcggagcttgcagggagccattatcacgccactgcactccagcctgggcgacagagcgagactccgtcttaaaaaaaaaaaaaggaaaaaaaaaaaaaaaaaaaaaggggttccctggggtttctaaaaaaaaaggggggggagtttaatgggggcgggggggaattttttatggtttggccttaaaaaggtcctttttccaccttctaaacttttttttggccca

SEQ ID NO: 680458 - DNA, 344 bp, Homo sapiens
  misc_feature (167)..(167): n is a, c, g, or t
agaagttatgcacagaggcattcattgaaatgagttttaaaactcacttaaaaataatgagcaactgaaatctcccaaatagatacatagaagtaaaatacagtgaatccatatagtggaacagtaggcagcccttttttgggtgtatagggaaatagagaaacatntctgtgtaacataaactgaaaaagtcatgatacaaagttatattggattatgaacctatccgagttaaaaaatgcattaaagaacctatgcgagttaagaacgcaattacaggctcatgcctgtaatcccagctgaggcaggagagttgcttgaacctgggaggcacagattgcagt

SEQ ID NO: 680459 - DNA, 1237 bp, Homo sapiens
  misc_feature (17)..(17): n is a, c, g, or t
agcggaggatgccgcgngcggccgcggggccgagggtttgaaccgggggtctgtcgtccgcggcggggctgcgtcggctgcggcgggtgtgggaggtggcgacggccggggccggggtcctgcccggctgcggaggcgggcgcgacgggcgcgggggtcgctgctcctgaggcgatgatgggcaaggaagaggagattgcgcggatcgcccggaggctggacaagatggtgaccaagaagagcgcggagggagccatggatttgctgcgggagctgaaggccatgcctatcacgctgcacctgctccagtccacccgagtcgggatgtctgtcaacgcccttcggaagcagagctcggatgaggaggtcattgcactggccaagtctctcatcaagtcctggaagaagctcctggatgcttccgatgccaaagccagggagcgggggaggggcatgcctctgcccacgtcctcgagggatgcctcagaggccccggatcccagccgcaagaggccggagctgcccagggcaccgtcgactccgaggatcaccacatttcctccggtgcctgtcacctgtgatgccgtgcgcaacaagtgccgcgagatgctgaccgctgccctgcagacggaccatgaccacgtggccatcggtgcggactgcgagcgcctgtcggctcagatcgaggaatgcatcttccgggacgttggaaacacagacatgaagtataagaaccgtgtacggagtcgtatctccaacctgaaggatgccaagaaccctgacctgcggcggaatgtgctgtgtggggccataacaccccagcagatcgctgtgatgacctcagaggagatggccagtgatgagctgaaggagatccgtaaggccatgaccaaggaggccatccgagagcaccagatggcccgcactggcggcacgcagacagacctgttcacctgcggcaagtgcaggaaaaagaactgcacctacacacaggtgcagacccgcagctctgatgagcccatgaccacctttgttgtctgcaacgagtgtggaaaccgctggaagttctgctgacccctcgtgtagatgtgctgcagccttgggccctccccggcccacgtcctccgttgacacagcttctctggagaccctagaaggcggcatgtcctgccctcaacctgcctgcctggattgcacctttctgccctttccccctcattattaaatgtttcttttt

SEQ ID NO: 680460 - DNA, 926 bp, Homo sapiens
  misc_feature (17)..(17): n is a, c, g, or t
  misc_feature (473)..(473): n is a, c, g, or t
agcggaggatgccgcgngcggccgcggggccgagggtttgaaccgggggtctgtcgtccgcggcggggctgcgtcggctgcggcgggtgtgggaggtggcgacggccggggccggggtcctgcccggctgcggaggcgggcgcgacgggcgcgggggtcgctgctcctgaggcgatgatgggcaaggaagaggagattgcgcggatcgcccggaggctggacaagatggtgaccaagaagagcgcgcatttgtcgccggcaacagtttggagtctgaggttggatccccttttcttctggagcttccgtgcctcccctgcctcttcccagcccttgtcatcctccttcacaggccagccagatacctgtcttgcctgtgggcccattttcttccctgtctgtccccaccccacaagaaccaggtttctctaataaattctctcccttctttaaaaaacaagaataaacaacanaaacgatgcagacactactcgcgaaaacgttttgtcggcgcggcgtgttgacccgaactggagaagttttactatacctgctgctttaggggcggccggggccccacattaggaatcaaagtctacaagtggcgactagctagtgagcgtaggagataccccggggtgtataccaagcgtgctggggtttgtgtacgcaataaaaaaagggccgcaggggtgcgacccatggtggtttctggggacacaatgccaggagtgggcgtacttgagcggacatttccgggaatcaatacaccgggagtgtccaaagcggcagcaacgagttgataattgacgccccccgtggggttggtgcacacgatgcgaaaatatctacaccaggggcacactgtgtcatctggacagaagcagccgcctaatgaagcacaagtgcggcgctgtatagtccgg

SEQ ID NO: 680461 - DNA, 220 bp, Homo sapiens
  misc_feature (6)..(6): n is a, c, g, or t
tcatancttggaagaaaatcctcagctcgggggtgttctatttctcagggccaaaggaggggtctcgcttggacctgactggtccgcacgcagaagcagggggatgacagctctgagatggggggacactccttcgttctgacggcagccacagggttttgcatctggggcctgtggtggcctgctggggggtacccgacgtctcgacacttcgtacgtc

SEQ ID NO: 680462 - DNA, 478 bp, Homo sapiens
  misc_feature (17)..(17): n is a, c, g, or t
agcggaggatgccgcgngcggccgcggggccgagggtttgaaccgggggtctgtcgtccgcggcggggctgcgtcggctgcggcgggtgtgggaggtggcgacggccggggccggggtcctgcccggctgcggaggcgggcgcgacgggcgcgggggtcgctgctcctgaggcgatgatgggcaaggaagaggagattgcgcggatcgcccggaggctggacaagatggtgaccaagaagagcgcgcgtttgtcaccctccgtctcccatagcatttgtcgccggcaacagtttggagtctgaggttggatccccttttcttctggagcttccgtgcctcccctgcctcttcccagcccttgtcatcctccttcacaggccagccagatacctgtcttgcctgtgggcccattttcttccctgtctgtccccaccccacaagaaccaggtttctctaataaattctctcccttcttta

SEQ ID NO: 680463 - DNA, 452 bp, Homo sapiens
  misc_feature (17)..(17): n is a, c, g, or t
agcggaggatgccgcgngcggccgcggggccgagggtttgaaccgggggtctgtcgtccgcggcggggctgcgtcggctgcggcgggtgtgggaggtggcgacggccggggccggggtcctgcccggctgcggaggcgggcgcgacgggcgcgggggtcgctgctcctgaggcgatgatgggcaaggaagaggagattgcgcggatcgcccggaggctggacaagatggtgaccaagaagagcgcgcatttgtcgccggcaacagtttggagtctgaggttggatccccttttcttctggagcttccgtgcctcccctgcctcttcccagcccttgtcatcctccttcacaggccagccagatacctgtcttgcctgtgggcccattttcttccctgtctgtccccaccccacaagaaccaggtttctctaataaattctctcccttcttta

SEQ ID NO: 680464 - DNA, 1369 bp, Homo sapiens
  misc_feature (17)..(17): n is a, c, g, or t
agcggaggatgccgcgngcggccgcggggccgagggtttgaaccgggggtctgtcgtccgcggcggggctgcgtcggctgcggcgggtgtgggaggtggcgacggccggggccggggtcctgcccggctgcggaggcgggcgcgacgggcgcgggggtcgctgctcctgaggcgatgatgggcaaggaagaggagattgcgcggatcgcccggaggctggacaagatggtgaccaagaagagcgcggagggagccatggatttgctgcgggagctgaaggccatgcctatcacgctgcacctgctccagtccacccgagtcgggatgtctgtcaacgcccttcggaagcagagctcggatgaggaggtcattgcactggccaagtctctcatcaagtcctggaagaagctcctggatgcttccgatgccaaagccagggagcgggggaggggcatgcctctgcccacgtcctcgagggatgcctcagaggccccggatcccagccgcaagaggccggagctgcccagggcaccgtcgactccgaggatcaccacatttcctccggtgcctgtcacctgtgatgccgtgcgcaacaagtgccgcgagatgctgaccgctgccctgcagacggaccatgaccacgtggccatcggtgcggactgcgagcgcctgtcggctcagatcgaggaatgcatcttccgggacgttggaaacacagacatgaagtataagaaccgtgtacggagtcgtatctccaacctgaaggatgccaagaaccctgacctgcggcggaatgtgctgtgtggggccataacaccccagcagatcgctgtgatgacctcagaggagatggccagtgatgagctgaaggagatccgtaaggccatgaccaaggaggccatccgagagcaccagatggcccgcactggcggcacgcagacagacctgttcacctgcggcaagtgcaggaaaaagaactgcacctacacacaggtgcagacccgcagctctgatgagcccatgaccacctttgttgtctgcaacgagtgtggaaaccgctggaagttctgctgacccctcgtgtagatgtgctgcagccttgggccctccccggcccacgtcctccgttgacacagcttctctggagaccctagaaggcggcatgtcctgccctcaacctgcctgcctggattgcacctttctgccctttccccctcattattaaatgtttctttttgccaaaaaaaaaaaaggggggcgtcaaagatcctcggggccaagtacgcgtaaccagcttctgtccagggcctatagggagcgataaaagaggacggcgtcgttacaccgcggacggaacagtgcggactgg

SEQ ID NO: 680465 - DNA, 278 bp, Homo sapiens
ggtatctctagataaagcagtctgttagcaacgcatactctgtcttttgttcatctgggaatttctcaatttcaccttcagcttcggaaggatagttttgctggatattgaattcttggtttacagttttttatttttctttcagcccttgaggatcttatactaccattctccagcctcctcgtgtctcatgcttgaatttggctgttaatcatatagatgctcctttatatgtgatcagtcatttttcacttgctgctgtcaacatttggtctggt

SEQ ID NO: 680466 - DNA, 2407 bp, Homo sapiens
  misc_feature (17)..(17): n is a, c, g, or t
  misc_feature (1217)..(1217): n is a, c, g, or t
agcggaggatgccgcgngcggccgcggggccgagggtttgaaccgggggtctgtcgtccgcggcggggctgcgtcggctgcggcgggtgtgggaggtggcgacggccggggccggggtcctgcccggctgcggaggcgggcgcgacgggcgcgggggtcgctgctcctgaggcgatgatgggcaaggaagaggagattgcgcggatcgcccggaggctggacaagatggtgaccaagaagagcgcggtgaggggcgcgggccgccaggaccccgggaaccccgccccgccgagaccccgtcgagcccgccgacccccgttagggccggaagacgacctgaggggcaggacgagacccctccccggcagagactaaccgggacgcaggggagacccccacccgtggccgagacccctgccccgggccagccctgccgttcactcccgcaaccccggcagaggccgcgatcaggcctggaccttgtcccgggagagccacccgctctggactcagacccctccctcgcccgcagtcacaggctccgcacccttccctgtcccttaactccagacccccagcctggcccgtcgactccttccttggccctgtcccgcctctcggagcccccggggtgttcgggcctcctctgcgggccgcgccagccccttgccttcctccatcccggcctgggcatcctcacaggccgagccccgccccccaactcagccctctcccacgctccgtctcttacagcgtttgtcaccctccgtctcccatagcatttgtcgccggcaacagtttggagtctgaggttggatccccttttcttctggagcttccgtgcctcccctgcctcttcccagcccttgtcatcctccttcacaggccagccagatacctgtcttgcctgtgggcccattttcttccctgtctgtccccaccccacaagaaccaggtttctctaataaattctctcccttctttagccaggacttagcccgcagcaacttgggtgtgggtagttatgtggacaccctccgaaaagagccggtgtgcttatataagagccaggaggtcgggcaagcctcctctgggagtgtctgggcgctggagcctctgggccggctctgtacagtgcgggctgggcctctgtgttctgtgcggccacagagagactatggagagaggctgtgtgtgaggactttgaaggggccagnaggcagaaggaggtgatatgtctgtgagatctaaagtcctttatgaaggtcctccttctccttccaggagggagccatggatttgctgcgggagctgaaggccatgcctatcacgctgcacctgctccagtccacccgagtcgggatgtctgtcaacgcccttcggaagcagagctcggatgaggaggtcattgcactggccaagtctctcatcaagtcctggaagaagctcctggatgcttccgatgccaaagccagggagcgggggaggggcatgcctctgcccacgtcctcgagggatgcctcagaggccccggatcccagccgcaagaggccggagctgcccagggcaccgtcgactccgaggatcaccacatttcctccggtgcctgtcacctgtgatgccgtgcgcaacaagtgccgcgagatgctgaccgctgccctgcagacggaccatgaccacgtggccatcggtgcggactgcgagcgcctgtcggctcagatcgaggaatgcatcttccgggacgttggaaacacagacatgaagtataagaaccgtgtacggagtcgtatctccaacctgaaggatgccaagaaccctgacctgcggcggaatgtgctgtgtggggccataacaccccagcagatcgctgtgatgacctcagaggagatggccagtgatgagctgaaggagatccgtaaggccatgaccaaggaggccatccgagagcaccagatggcccgcactggcggcacgcagacagacctgttcacctgcggcaagtgcaggaaaaagaactgcacctacacacaggtgcagacccgcagctctgatgagcccatgaccacctttgttgtctgcaacgagtgtggaaaccgctggaagttctgctgacccctcgtgtagatgtgctgcagccttgggccctccccggcccacgtcctccgttgacacagcttctctggagaccctagaaggcggcatgtcctgccctcaacctgcctgcctggattgcacctttctgccctttccccctcattattaaatgtttctttttgccaaaaaaaaaaaaggggggcgtcaaagatcctcggggccaagtacgcgtaaccagcttctgtccagggcctatagggagcgataaaagaggacggcgtcgttacaccgcggacggaacagtgcggactgg

SEQ ID NO: 680467 - DNA, 2344 bp, Homo sapiens
  misc_feature (17)..(17): n is a, c, g, or t
  misc_feature (1217)..(1217): n is a, c, g, or t
agcggaggatgccgcgngcggccgcggggccgagggtttgaaccgggggtctgtcgtccgcggcggggctgcgtcggctgcggcgggtgtgggaggtggcgacggccggggccggggtcctgcccggctgcggaggcgggcgcgacgggcgcgggggtcgctgctcctgaggcgatgatgggcaaggaagaggagattgcgcggatcgcccggaggctggacaagatggtgaccaagaagagcgcggtgaggggcgcgggccgccaggaccccgggaaccccgccccgccgagaccccgtcgagcccgccgacccccgttagggccggaagacgacctgaggggcaggacgagacccctccccggcagagactaaccgggacgcaggggagacccccacccgtggccgagacccctgccccgggccagccctgccgttcactcccgcaaccccggcagaggccgcgatcaggcctggaccttgtcccgggagagccacccgctctggactcagacccctccctcgcccgcagtcacaggctccgcacccttccctgtcccttaactccagacccccagcctggcccgtcgactccttccttggccctgtcccgcctctcggagcccccggggtgttcgggcctcctctgcgggccgcgccagccccttgccttcctccatcccggcctgggcatcctcacaggccgagccccgccccccaactcagccctctcccacgctccgtctcttacagcgtttgtcaccctccgtctcccatagcatttgtcgccggcaacagtttggagtctgaggttggatccccttttcttctggagcttccgtgcctcccctgcctcttcccagcccttgtcatcctccttcacaggccagccagatacctgtcttgcctgtgggcccattttcttccctgtctgtccccaccccacaagaaccaggtttctctaataaattctctcccttctttagccaggacttagcccgcagcaacttgggtgtgggtagttatgtggacaccctccgaaaagagccggtgtgcttatataagagccaggaggtcgggcaagcctcctctgggagtgtctgggcgctggagcctctgggccggctctgtacagtgcgggctgggcctctgtgttctgtgcggccacagagagactatggagagaggctgtgtgtgaggactttgaaggggccagnaggggagggagccatggatttgctgcgggagctgaaggccatgcctatcacgctgcacctgctccagtccacccgagtcgggatgtctgtcaacgcccttcggaagcagagctcggatgaggaggtcattgcactggccaagtctctcatcaagtcctggaagaagctcctggatgcttccgatgccaaagccagggagcgggggaggggcatgcctctgcccacgtcctcgagggatgcctcagaggccccggatcccagccgcaagaggccggagctgcccagggcaccgtcgactccgaggatcaccacatttcctccggtgcctgtcacctgtgatgccgtgcgcaacaagtgccgcgagatgctgaccgctgccctgcagacggaccatgaccacgtggccatcggtgcggactgcgagcgcctgtcggctcagatcgaggaatgcatcttccgggacgttggaaacacagacatgaagtataagaaccgtgtacggagtcgtatctccaacctgaaggatgccaagaaccctgacctgcggcggaatgtgctgtgtggggccataacaccccagcagatcgctgtgatgacctcagaggagatggccagtgatgagctgaaggagatccgtaaggccatgaccaaggaggccatccgagagcaccagatggcccgcactggcggcacgcagacagacctgttcacctgcggcaagtgcaggaaaaagaactgcacctacacacaggtgcagacccgcagctctgatgagcccatgaccacctttgttgtctgcaacgagtgtggaaaccgctggaagttctgctgacccctcgtgtagatgtgctgcagccttgggccctccccggcccacgtcctccgttgacacagcttctctggagaccctagaaggcggcatgtcctgccctcaacctgcctgcctggattgcacctttctgccctttccccctcattattaaatgtttctttttgccaaaaaaaaaaaaggggggcgtcaaagatcctcggggccaagtacgcgtaaccagcttctgtccagggcctatagggagcgataaaagaggacggcgtcgttacaccgcggacggaacagtgcggactgg

SEQ ID NO: 680468 - DNA, 1035 bp, Homo sapiens
  misc_feature (34)..(34): n is a, c, g, or t
  misc_feature (68)..(68): n is a, c, g, or t
  misc_feature (89)..(89): n is a, c, g, or t
  misc_feature (106)..(106): n is a, c, g, or t
  misc_feature (127)..(127): n is a, c, g, or t
  misc_feature (129)..(129): n is a, c, g, or t
  misc_feature (149)..(149): n is a, c, g, or t
  misc_feature (173)..(173): n is a, c, g, or t
  misc_feature (218)..(218): n is a, c, g, or t
  misc_feature (226)..(226): n is a, c, g, or t
  misc_feature (244)..(244): n is a, c, g, or t
  misc_feature (291)..(291): n is a, c, g, or t
  misc_feature (315)..(315): n is a, c, g, or t
  misc_feature (333)..(334): n is a, c, g, or t
  misc_feature (340)..(340): n is a, c, g, or t
  misc_feature (345)..(345): n is a, c, g, or t
  misc_feature (352)..(352): n is a, c, g, or t
  misc_feature (354)..(354): n is a, c, g, or t
  misc_feature (360)..(360): n is a, c, g, or t
  misc_feature (362)..(363): n is a, c, g, or t
  misc_feature (368)..(368): n is a, c, g, or t
  misc_feature (373)..(374): n is a, c, g, or t
  misc_feature (377)..(378): n is a, c, g, or t
  misc_feature (380)..(380): n is a, c, g, or t
  misc_feature (384)..(385): n is a, c, g, or t
  misc_feature (391)..(393): n is a, c, g, or t
  misc_feature (395)..(396): n is a, c, g, or t
  misc_feature (400)..(400): n is a, c, g, or t
  misc_feature (406)..(406): n is a, c, g, or t
  misc_feature (409)..(409): n is a, c, g, or t
  misc_feature (412)..(412): n is a, c, g, or t
  misc_feature (415)..(415): n is a, c, g, or t
  misc_feature (426)..(426): n is a, c, g, or t
  misc_feature (428)..(428): n is a, c, g, or t
  misc_feature (431)..(431): n is a, c, g, or t
  misc_feature (435)..(435): n is a, c, g, or t
  misc_feature (439)..(439): n is a, c, g, or t
  misc_feature (448)..(448): n is a, c, g, or t
  misc_feature (516)..(516): n is a, c, g, or t
  misc_feature (611)..(611): n is a, c, g, or t
  misc_feature (628)..(628): n is a, c, g, or t
  misc_feature (687)..(687): n is a, c, g, or t
  misc_feature (770)..(770): n is a, c, g, or t
  misc_feature (780)..(781): n is a, c, g, or t
  misc_feature (795)..(795): n is a, c, g, or t
  misc_feature (840)..(840): n is a, c, g, or t
  misc_feature (856)..(856): n is a, c, g, or t
  misc_feature (885)..(885): n is a, c, g, or t
  misc_feature (902)..(902): n is a, c, g, or t
  misc_feature (941)..(941): n is a, c, g, or t
  misc_feature (960)..(960): n is a, c, g, or t
  misc_feature (966)..(967): n is a, c, g, or t
  misc_feature (986)..(986): n is a, c, g, or t
  misc_feature (1017)..(1017): n is a, c, g, or t
cccccttctccatcaatctttccaaatccccaanaacctccaacttcctttatcaacttccaaccttntataacttcatatacacaatnctcattcaaccaacttnccacccctttccatcttcatntnctttcttttcaacctttccnttataacttcttcccctatacccnctttcccttctcatcaaccctctcttttccaacccctccaacttntcttcatncctttatcttcttccttnccttaaatacacctacttttatctttttatttttctttttatttatntctaccatcttttcctataccttnacatctcctttcttcccnnctccantccangccccananccaccnanncccanccctnnttnnanccannctactnnnanncctngcccanccngancanctccatccttnangancctncctncattcccangacacacggcaggagtgctgggacctggaccgccaggccagcgacagcctggcccaggcggagcaggnacccagctctgcgggccccacctcttcctcgtcttctgaacgtgcctatggcccaggacagcctggcaggtggcctcgctgcccccagttccccnctctgcccccacactcntctaagttgcttcacactggtcactggcccggcacactgggctattgctttatccctancctgagagcagcccctccccaccatccctccacatgctgcaaggacagactgaagggctgtgagcaggtgtaagggctcccanatccgtgagnntgtgtccgcagcgnctgccactctgggctgctccagcctgcaacttagtggaaggaatnacttcctcctgaggcnacaggcgagaaaggtagggatgggccagnctcccgtctcagctgtngggagacagtaggcaggctgagtggcccagagcactccnggaagtgggactcccctgncttgcnnatgtgcctctccagactgntcctgcacttaccccctccccgcagcacctncttgcccgtctgccacac

SEQ ID NO: 680469 - DNA, 1501 bp, Homo sapiens
  misc_feature (124)..(124): n is a, c, g, or t
  misc_feature (937)..(937): n is a, c, g, or t
  misc_feature (1270)..(1270): n is a, c, g, or t
gctgatacagatagtggtgaatactctcttctcctcgtcggtgcccacatattagtagacctggttcttaatatatgtcataatcatgggggggagaggcccgccttttgacacaccccagcgngggggggccctacaaactatagataaggtggatgaacccaacgtcgtcctttaccaccacggcctctcttcttctgaagaagaggagtagccggcccctccgatgaaacctagtgatgtgtacccgcccttgggagcttttttcctcccgctcccactgcccattgggggtatgaggcgatgtttcctcccttcttccccccccctgtgtggcccccccccatctggggggacttcatcaaaaaaaagagggttgtgccgttcggtgtgtttttctcctgaggccagggggggggcgcccacttgtgttttccgctgctgaattatgcggggttgtttgttaggaagtagcccccttcttcctgcttatccgctcctggggggaagaaggcctcttctgccacaaccagcggggtggtcatcaacaccgcttgtggagagtccccggggggtggcgccacccccgcggagaggggaaacacctcacacaggggagggaggcgcgttgtggcccccacttcgggcgcggaccacaccacctgcttttcttctggggaagagccttctccccccgcggagaagaagtgtgagcaccacaacaggggaggagaccacagcacctgtgggtggggagacgagacgagccacaccaacaagtagtgtcgtcgctcttgggtgagacgccgccccctctgttgtcgcccgcacaaagagagggactactctgtgggagaaaaagggagagagggggagaaagagataaatatgttgggttgagagagctctctgtgtctgtaaaacataaacagagagngggagtttgtgagtactctctgcgagattttgtagagtgggagatacacatatataggcggctcgagaggatgtctcggtgttgtctctctcggagagaaggatataagagacacagagctggtctctctctctcgggtatctcggccacgcgagagatgcgggttctgtgctttttgggagagaatctctctttataggagaggcgctctcctcctctctcgcacatggcgcctctcacagtctgtggcacagacacagcccccgagagttgtttctctcctctcgcttgagatcgcgaatttctctttctcctccacaggatagagagatnttttctctttggcttatatgtttgagaattccacttgccctctttttgttcacatcacacacagagaaggtgagatgtttggagaatcgcttttttttgttttgtgtttgagattaaatgggtttttttaaagagaataaacacacaaaggttttttattagcacttttgaaaaaaggaaagtataaaagtacacagtttaataaaaaggggccttccccccttagaaata

SEQ ID NO: 680470 - DNA, 1250 bp, Homo sapiens
cccgctacggatgtgggttacaacttggaatgcttgaggctgcagaacccctccccttcttgactgagcagtaagggttccctgctgtggtgcaggaacatgtgggcagagccctgggtgtctccaggagggagccatggatttgctgcgggagctgaaggccatgcctatcacgctgcacctgctccagtccacccgagtcgggatgtctgtcaacgcccttcggaagcagagctcggatgaggaggtcattgcactggccaagtctctcatcaagtcctggaagaagctcctggatgcttccgatgccaaagccagggagcgggggaggggcatgcctctgcccacgtcctcgagggatgcctcagaggccccggatcccagccgcaagaggccggagctgcccagggcaccgtcgactccgaggatcaccacatttcctccggtgcctgtcacctgtgatgccgtgcgcaacaagtgccgcgagatgctgaccgctgccctgcagacggaccatgaccacgtggccatcggtgcggactgcgagcgcctgtcggctcagatcgaggaatgcatcttccgggacgttggaaacacagacatgaagtataagaaccgtgtacggagtcgtatctccaacctgaaggatgccaagaaccctgacctgcggcggaatgtgctgtgtggggccataacaccccagcagatcgctgtgatgacctcagaggagatggccagtgatgagctgaaggagatccgtaaggccatgaccaaggaggccatccgagagcaccagatggcccgcactggcggcacgcagacagacctgttcacctgcggcaagtgcaggaaaaagaactgcacctacacacaggtgcagacccgcagctctgatgagcccatgaccacctttgttgtctgcaacgagtgtggaaaccgctggaagttctgctgacccctcgtgtagatgtgctgcagccttgggccctccccggcccacgtcctccgttgacacagcttctctggagaccctagaaggcggcatgtcctgccctcaacctgcctgcctggattgcacctttctgccctttccccctcattattaaatgtttctttttgccaaaaaaaaaaaaggggggcgtcaaagatcctcggggccaagtacgcgtaaccagcttctgtccagggcctatagggagcgataaaagaggacggcgtcgttacaccgcggacggaacagtgcggactgg

SEQ ID NO: 680471 - DNA, 1936 bp, Homo sapiens
  misc_feature (17)..(17): n is a, c, g, or t
agcggaggatgccgcgngcggccgcggggccgagggtttgaaccgggggtctgtcgtccgcggcggggctgcgtcggctgcggcgggtgtgggaggtggcgacggccggggccggggtcctgcccggctgcggaggcgggcgcgacgggcgcgggggtcgctgctcctgaggcgatgatgggcaaggaagaggagattgcgcggatcgcccggaggctggacaagatggtgaccaagaagagcgcggtgaggggcgcgggccgccaggaccccgggaaccccgccccgccgagaccccgtcgagcccgccgacccccgttagggccggaagacgacctgaggggcaggacgagacccctccccggcagagactaaccgggacgcaggggagacccccacccgtggccgagacccctgccccgggccagccctgccgttcactcccgcaaccccggcagaggccgcgatcaggcctggaccttgtcccgggagagccacccgctctggactcagacccctccctcgcccgcagtcacaggctccgcacccttccctgtcccttaactccagacccccagcctggcccgtcgactccttccttggccctgtcccgcctctcggagcccccggggtgttcgggcctcctctgcgggccgcgccagccccttgccttcctccatcccggcctgggcatcctcacaggccgagccccgccccccaactcagccctctcccacgctccgtctcttacagcgtttgtcaccctccgtctcccatagcatttgtcgccggcaacagtttggagtctgaggggagggagccatggatttgctgcgggagctgaaggccatgcctatcacgctgcacctgctccagtccacccgagtcgggatgtctgtcaacgcccttcggaagcagagctcggatgaggaggtcattgcactggccaagtctctcatcaagtcctggaagaagctcctggatgcttccgatgccaaagccagggagcgggggaggggcatgcctctgcccacgtcctcgagggatgcctcagaggccccggatcccagccgcaagaggccggagctgcccagggcaccgtcgactccgaggatcaccacatttcctccggtgcctgtcacctgtgatgccgtgcgcaacaagtgccgcgagatgctgaccgctgccctgcagacggaccatgaccacgtggccatcggtgcggactgcgagcgcctgtcggctcagatcgaggaatgcatcttccgggacgttggaaacacagacatgaagtataagaaccgtgtacggagtcgtatctccaacctgaaggatgccaagaaccctgacctgcggcggaatgtgctgtgtggggccataacaccccagcagatcgctgtgatgacctcagaggagatggccagtgatgagctgaaggagatccgtaaggccatgaccaaggaggccatccgagagcaccagatggcccgcactggcggcacgcagacagacctgttcacctgcggcaagtgcaggaaaaagaactgcacctacacacaggtgcagacccgcagctctgatgagcccatgaccacctttgttgtctgcaacgagtgtggaaaccgctggaagttctgctgacccctcgtgtagatgtgctgcagccttgggccctccccggcccacgtcctccgttgacacagcttctctggagaccctagaaggcggcatgtcctgccctcaacctgcctgcctggattgcacctttctgccctttccccctcattattaaatgtttctttttgccaaaaaaaaaaaaggggggcgtcaaagatcctcggggccaagtacgcgtaaccagcttctgtccagggcctatagggagcgataaaagaggacggcgtcgttacaccgcggacggaacagtgcggactgg

SEQ ID NO: 680472 - DNA, 1874 bp, Homo sapiens
  misc_feature (17)..(17): n is a, c, g, or t
  misc_feature (684)..(684): n is a, c, g, or t
agcggaggatgccgcgngcggccgcggggccgagggtttgaaccgggggtctgtcgtccgcggcggggctgcgtcggctgcggcgggtgtgggaggtggcgacggccggggccggggtcctgcccggctgcggaggcgggcgcgacgggcgcgggggtcgctgctcctgaggcgatgatgggcaaggaagaggagattgcgcggatcgcccggaggctggacaagatggtgaccaagaagagcgcgcatttgtcgccggcaacagtttggagtctgaggttggatccccttttcttctggagcttccgtgcctcccctgcctcttcccagcccttgtcatcctccttcacaggccagccagatacctgtcttgcctgtgggcccattttcttccctgtctgtccccaccccacaagaaccaggtttctctaataaattctctcccttctttagccaggacttagcccgcagcaacttgggtgtgggtagttatgtggacaccctccgaaaagagccggtgtgcttatataagagccaggaggtcgggcaagcctcctctgggagtgtctgggcgctggagcctctgggccggctctgtacagtgcgggctgggcctctgtgttctgtgcggccacagagagactatggagagaggctgtgtgtgaggactttgaaggggccagnaggcagaaggaggtgatatgtctgtgagatctaaagtcctttatgaaggtcctccttctccttccaggagggagccatggatttgctgcgggagctgaaggccatgcctatcacgctgcacctgctccagtccacccgagtcgggatgtctgtcaacgcccttcggaagcagagctcggatgaggaggtcattgcactggccaagtctctcatcaagtcctggaagaagctcctggatgcttccgatgccaaagccagggagcgggggaggggcatgcctctgcccacgtcctcgagggatgcctcagaggccccggatcccagccgcaagaggccggagctgcccagggcaccgtcgactccgaggatcaccacatttcctccggtgcctgtcacctgtgatgccgtgcgcaacaagtgccgcgagatgctgaccgctgccctgcagacggaccatgaccacgtggccatcggtgcggactgcgagcgcctgtcggctcagatcgaggaatgcatcttccgggacgttggaaacacagacatgaagtataagaaccgtgtacggagtcgtatctccaacctgaaggatgccaagaaccctgacctgcggcggaatgtgctgtgtggggccataacaccccagcagatcgctgtgatgacctcagaggagatggccagtgatgagctgaaggagatccgtaaggccatgaccaaggaggccatccgagagcaccagatggcccgcactggcggcacgcagacagacctgttcacctgcggcaagtgcaggaaaaagaactgcacctacacacaggtgcagacccgcagctctgatgagcccatgaccacctttgttgtctgcaacgagtgtggaaaccgctggaagttctgctgacccctcgtgtagatgtgctgcagccttgggccctccccggcccacgtcctccgttgacacagcttctctggagaccctagaaggcggcatgtcctgccctcaacctgcctgcctggattgcacctttctgccctttccccctcattattaaatgtttctttttgccaaaaaaaaaaaaggggggcgtcaaagatcctcggggccaagtacgcgtaaccagcttctgtccagggcctatagggagcgataaaagaggacggcgtcgttacaccgcggacggaacagtgcggactgg

SEQ ID NO: 680473 - DNA, 311 bp, Homo sapiens
cttgggaggcgagtggcggatcacctgaggtcgatcgagactgccggccaacatggggaaacccagtctctactaaaactataaaaattagctgggtgtggtggtgcatgtctgtaatcccaggtactcgggaggctgaggcacaggaatcgcttggatccggaacccgggaggtggaggttgcagtgagccgagatcacgccactgcattccagccggggtgacacagcaagactaaataaataaataaataagaggaattatcaatcagtggtagcggttatggaaaaactttatgatttaccggagtg

SEQ ID NO: 680474 - DNA, 164 bp, Homo sapiens
cccccggctaagagcggtctgttgcgtgaactgtgtgtgtgggttgcagacgtggctcagatcccgagttgccgtggttgtggtataggccaggcagctacagctctgattagacccctagcctgggaacctccatatactgcaggtgcagccctaaaaaaggc

SEQ ID NO: 680475 - DNA, 659 bp, Homo sapiens
taccccttcgccccaggcaaccatcatctactctctgcttctatgagttcaacttttcattgcagcactgttcacaagagctaagatacagaaacaatttaagtgtgctgtgatggatgaatgatgagaatgttgtatatatacataatggaatacgattcagaactaaaaatgaaggaaatcctgccacttgcaacaatgtggatgaacctgcagaacattatgctaagtgaaataagccagacacagaaagacaaatgctataggatctcacttatatgtgaagccttaaaaagaaaatgaccaggtgatatggtttggctgtatccccacccaactctcatcatggattgtagttcccataatctccacgcgttgtgggaaggacctggtgggaggtaattgaattgtgagggcggttatccccgtgctgctgctgttgtgatcgtgagttctcatgagatctgatggtttctgatggttttataaggggcttccccctacttcgctttgcacttctttctctcgccgccttgtgaagaaggacgtgtttacttccccttccaccatgcttgtaagtttcctgaggcctcctcagccatgctgaactgcgggtccattagacctctttcctttactaatcagaaaacacccaaaaa

SEQ ID NO: 680476 - DNA, 289 bp, Homo sapiens
tgaatcagtgctgcgtgtggatacaggtgcaagctggcccaggagaatggctgtggggtcatggtgagtcatcgcttacgagagactgatgacacattcattgctgacctgctggtggagctgtgcacaggccaggctagtgaggcatcctggtgagtgaagagaactctctgtgggattggtatttctagctcacccacctagtctgtcgttccaggtgtttgaggtgtgcaggggagcttcaggagagccgaggtttactttcaggcgtgagaggacagccactgag

SEQ ID NO: 680477 - DNA, 297 bp, Homo sapiens
  misc_feature (22)..(22): n is a, c, g, or t
  misc_feature (80)..(80): n is a, c, g, or t
  misc_feature (88)..(88): n is a, c, g, or t
tcccctcctaagtggacctccntttcgagagagagaagggggggtttagtagctactcttgcctcaagcctgagccggcncatacttngaagaggaggaaaaactggattggggaagattctggggcaaaatgaagccaaattgagaacgaggagaaaagaagatgctaaggccgcagataaggaggtcttgagtgttacagctctttttgaatttgtctagcatgctttctgctttttactggaaagtgcccccccccaaaaaaataaaaatttttttttttaaaagaaagattgc

SEQ ID NO: 680478 - DNA, 142 bp, Homo sapiens
caggcagatagcctgagctcacaagtttgagactagcctggggcaacatagcgaaactctgtttctacaaaaacaacaacaaaaaacaacaacaaaaaaaacttgaaaattagcccagcatagagatgtgtgcctgtagtcc

SEQ ID NO: 680479 - DNA, 396 bp, Homo sapiens
tttttcatagtgtcagtagtgtctgcttgttcttgatttctagttttatttcactgtcatccaataagattcttgatatgatttagatatttaaaaatttctttagacctgttttatgattgttgtctatctcctcttaggtgtggtagtatttgttttatgaatctgagtgctctaatttggggtgcatatatgtcagattgttatatcttcttgcttaattgatccctttatcattatatgatgtacttctttaactttattcactgttgatgatttattcttgcttacttttggtttgcatttgcatgaaatatcattttttacccccttaccttgagtatctaagtgccttcaccagttaggtgagtttcttgtaagcaacactgtgttgaa

SEQ ID NO: 680480 - DNA, 130 bp, Homo sapiens
ctgctatttatttgataacatctttcgcttcacccaggctggttcagaggtgtctgcattcttgggccgcatcccctccttgtccatgctgagcccgccccttgtccagctgatcccaaccttgtcccag

SEQ ID NO: 680481 - DNA, 118 bp, Homo sapiens
cacacaacaaatagtgtcaaacaaagtagacaactaagaaaaacatctctttcccccaaatccaatccaaaacaaacagtgcaagatgggaaacgggggtgttggaggataacatcac

SEQ ID NO: 680482 - DNA, 991 bp, Homo sapiens
gtagaaccggctggtagggatagtcagaggcggagtcctgagtagtggtcactgatgcacggactctgtgcccatgaacatatgggatcgctggatctactttgattcgctttaatcttccctcatttgaatgcgtctccgcagatgttcctggtgaaagtctatgctgttgtgcgcccttcgtatgttgtgatgcggtgtgtgccgtcttatgtccatgttggtcgtgcaatatggttcaggctgcgcctgctgctcctgccgttgggggcctcccctgcatctggattgatttgcctgctgtggacacactcgttgcctctgtatacctggaagcggatgtaggagtgtggatcgtccttgccatggattgtgcattccttacatggagttggctcgtgggtcgctgccctgggttccgttttggtggtcgtgccgcgtgcagttcttcccaacgggtttcactgggcgcggacctgatctttagctgtcttcaccctcgagtgcactctatgccacggcgctctgaaggtttcctctttctgggcggtatcgttgatgtcaagcctgcctcgttggatggtgctgtttattcctgagtgaatgtcacttgggagtccatttggcttttcctgggcaaaactgtctgtgtgactggtggtcctttgtgggtgggttcgtcctaaggtgtctccacctctggctggtctagcgccctgatggtgctttgatgtcctgttggggcctctgcttgctcgcttccttggagtggtggtccaggttgttcgcaaagtccgtgctgctgctggccacccatggcggggtcgaaccccgtccatactcggggtcccaacggtttcgccttggttgtgggaccggtacccttccctgttgacaggtaagctttgtggtgggtcaacgcgatgggttgagaccctggttgggcgaccattctctgttggttgccctttggacagatcggggctgaacc

SEQ ID NO: 680483 - DNA, 3460 bp, Homo sapiens
  misc_feature (4)..(4): n is a, c, g, or t
  misc_feature (535)..(535): n is a, c, g, or t
  misc_feature (538)..(538): n is a, c, g, or t
  misc_feature (540)..(540): n is a, c, g, or t
  misc_feature (544)..(545): n is a, c, g, or t
  misc_feature (548)..(548): n is a, c, g, or t
  misc_feature (1040)..(1040): n is a, c, g, or t
  misc_feature (1096)..(1096): n is a, c, g, or t
  misc_feature (1119)..(1119): n is a, c, g, or t
tccntaatgacttcttcaaggacatgttccctgacctgccgggggggcctctgggacccatcaaggcggagaacgactacggtgcctatctcaacttcctgagtgccacccacctgggaggcctcttcccaccctggcccctggtagaagagcgcaagctgaagcccaaggcctctcagcagtgccccatctgccacaaagtcatcatgggggccgggaagctgccgcggcacatgaggacccataccggggagaagccatacatgtgcaccatctgcgaggtccgcttcaccaggcaggacaagctgaaaatccacatgcggaagcacacaggggagcggccctacctgtgcatccactgcaacgccaagttcgtgcacaactacgacctcaagaaccacatgcgcatccacacgggcgtgcggccctaccagtgcgagttctgctacaagagcttcacgcgctctgaccacctgcaccgccacatcaagcgccagagctgccgcatggcacggccccgacgcggccgcaagcntgntncgtnnagngccgccagcctgctcttcgggcccggcggcccggcccccgacaaggcggccttcgtgatgccccctgcgctgggcgaggtgggcggccacctgggcggcgcagctgtgtgcctcccgggccccagccccgccaagcacttcctggcagcgcccaagggcgccctgagcctgcaagagctggagcggcagttcgaggagacgcagatgaagctgttcgggcgcgcgcagctggaggctgagaggaacgcggggggcctcctggccttcgcgctggccgagaacgtggcggcggcgcggccctacttcccgctgcccgacccttgggccgccggcctggccggcctccctgggctcgccggcctcaaccacgtggcctccatgtccgaagccaacaactaggctggtccctgtcggctccagcccaccagccctccagtccttctccctccaggcccactctaccctaccccatggatctgaacttttcatttnaaaaacacaaagggaaaatgggaaaataataataatactatcagtgatggcatttncccgggctcctaaagcagctgcntccttttgctggtctgagacgggcatcttttcccaaaaggccaggagcccgggcctccctccctgtctctctggctctcatatagaaacttgcaccggcccatgccacaaagaactgggtgcccaggggcacttaggagctgggtgagtcatgaggggtcagggggtggttggcctggtgcccagccagccacagcaggaggaggtaggggctgggcatgcaccttggttaagccccaccccctatggcaaagtctctgccaacactcctctgagggctcattttccagtctccagtggccccggggtctttttgagaactacccacctgccacatagaaagaaatgctctgttggcagggaggcctcctggaaccagtcaggaaccaggctctggaaggcccgggccatttcttccctgacctgtcctgtgaccttgacaggtcagccctctgtagctcagtgtcacctggctatggaaggggctggtaactgaggtttccgccctccacctctaaacacatacacacctatccccccagagaatcacagagatggtagaagctttgtactccccaagtccatggggaaacagtttatctttctggacttagttttatcacatccagctctatattagcatattagcataggtgagaaatatggccagactagacagagatcaggtcatcaggggagcttccgagcttcagcaaagcccacaggtagctctgcgaactcagaatgctaccctaccttccctgcaggccgctgttcatgtctggactcctgggggcgctatttaatgtttacccccatctccagtgccccctccaaggctgtgcagtgtcttggggctctcagggccaacatcgaagagatgggggccacctcttaacacctggcaacagtctcccctcatcctgattcctgacaacagacaaaacaccggtttctagggtttatctgtttgttttttgagttgagggttcctcagggccttggcattgctagtgatggtcccctttgctgtgtgagaaccccctcaaccccttcctcctccctctggggatgaagtgggagtatttggctccccatttttgacaaaagggctcagtgcagggaggtggaggcctctgaggtttgaagggctctgtgagttagagttgtcacatgttctcctggttcttgaatttgcagcaggtcctgaaaaggaaggctctgctggccccgtgccttcctgaccttctctctccttccctcccctctcttttcttgccaagtttgctttggtttctgagcagcccagagaggaggagggttcgtccccagggagagcccagggctggagtccccaatccctgtgctatgggcacaaagagacttcagctcttcctgttgccttggctttttcctgagcaaaaacacaacaaacaaaaaggccagagaagagcacagactctgtccctctcacaactctccagaagagaccccctgattcttcacaccaccggatgccactccagccagcaggattgctacacacaccctctgttctcagaagtcatctgcctgggcagccgcctctcagattcctgtcttcgtttcagacacttttctctgaagcatgcccatgtccaccagccaacgtgcccccgtgttcccccccatcagccaagtgattggggctgaaccagactttaaaagagaggaaaaaaaaaaaaaaaaggaaacatgaataaattggaatccagtggtgttggggcttttgtttttattttgtaaaggtgatgacttcttataaactcaatttttcagatgactggttagttctttctgttttttcttggctgcagtttggaattgtacattgtaaaatatccaaagatgttgagtactgtatgatcaagaacttgaagcaaatgggttgtcgggggaggggtggttgtgtttttgttttgcttcaatttttttttttttttttgatgtttcaatttccctgtctgtctgtgggagaactttggaattttttctatttataactctttttttatgtgattgctctacgtaaaatgacactcaacaaagtttgccttagtgattcaagggacaatcttccataacttcggtcgcacgccacatcccgccgagaaaaactctcagctaattttctggcctatttattaaacagtattaattgacttgattaaattatattgagagttgcacttctgtgagatgtgacttctgaaagttcacaggacagcaacaagccagtcttaaggtttttaattgttgggtgtcataaacttaaaataatgtcaaagacaccttaacaaaga

SEQ ID NO: 680484 - DNA, 2432 bp, Homo sapiens
cggcgcttggcccagtcccgcggtcctcgtcgcgaccggcccgggccgcaggacgccgcgctcgggggagctgagccacctctccgccaggcccgtgcgagcggtacaaagaaaagagcacttccctgctggggcagaggccaagccagagccctggccccatcacctctctgccctgcttgagtctggaatggacctccctgcctggaagctgcattgcccttggtcctgggcctgcctgccccctggggaacacaggcagcagccacattggcagtgaggccgtggcagcgtcggcagcagaggatgccccaggccctggagcgtgcagatggcagctgggcctgggtggtgctgctggccaccatggtgacccagggcctcaccctgggcttccccacgtgtatcggcatcttcttcactgaactgcaatgggagttccaggccagcaacagcgagacctcttggttcccctccatcctcacggctgtgctccacatggcagggcccctgtgcagcatcctggtgggacgcttcggctgccgagtgaccgtgatgctggggggcgtgctggccagcctgggcatggtggccagctccttctctcacaacctcagccagctctacttcacagcaggattcatcacaggtggaaggccccagtgcgcctccaggctggtttcccctcttgccccgcaggcctgggcatgtgcttcagcttccagtcaagcatcacggtgctgggcttctactttgtccgccggcgggtgctggccaacgcgctggcctcgatgggcgtctccctgggcatcaccctctggccgctgctctcccgctaccttctggagaacctgggctggaggggtaccttccttgtcttcggcgggatctttctccactgctgcatctgcggggccatcataaggcctgtggccaccagtgtggcccctgagaccaaagaatgtcccccgccacctcccgagacacctgcacttggctgcctggctgcatgcggccggaccatccagcgccacctggccttcgacatcctgcggcacaacacaggctactgcgtgtacatactgggtgtgatgtggtccgtcctgggcttcccactgccacaagtcttcctggtgccatatgccatgtggcacagcgtggacgagcagcaggcagccctcctcatctccatcatcggcttcagcaacatcttcctgaggcccctagccgggctgatggcaggacggccggcctttgctagccaccgcaagtacctgttcagcctggcactcctgctcaatgggctcactaacctggtgtgtgcggcatcaggtgacttctgggtgctcgtgggctactgcctggcgtacagcgtgtccatgagtggcatcggcgccctcatcttccaggttctcatggacatcgtccccatggatcagttccccagagccctgggactcttcactgtcctggacggccttgctttcctcatctccccaccactggccgggttgctcctggacgccaccaacaactttagctatgttttctacatgtccagcttcttcctcatctcagctgccctcttcatgggtggcagcttctacgccctgcagaagaaggagcaaggcaagcaggctgtcgcggcggatgccctggagcgggatcttttcttggaagccaaagacggtcctgggaagcaacggtcccctgagatcatgtgccagtcttcccgccagccacgtccagctggcgtcaataagcatctttggggatgtcctgcctcctccaggaccagccatgagtggctcttatggccaaaggcggtactgcaggccaagcaaacggctctgggctggaatagccctacctgagtgccctgtttgactccgccactatctgccatgtgagttgggcaaattgttgaccacctctgagccttgaaaaagtaggaggttactttgttagagcaaaataataaaatttaattttaaaaaagaaaacgtaggaggttcgtttggatgagctagtctcttccggttgaaaagtctgactcggtgagcatcctgacgactccatttccttctggctccccacccagtcttacacttggccttgccatatgccacatgctctgaagggagagtgcttgcatggactttgccaaatcctgtctgctccatctcagttgaatggaaaaggagggaggtggggctggtagataggtgcatttggtgctagtatccaccaggttttgtgtgcatcccgtaatgagcccacttcctgaaaacatttaaagaaaaaagatatcagctggagatggcagtgcgcacatgtaatcccagctactcgggaggtttaggtgggaggatcactcaaacctgggagtttgaggccagcctgggcaacacagcaagaccctgtcttttttt

SEQ ID NO: 680485 - DNA, 2973 bp, Homo sapiens
  misc_feature (4)..(4): n is a, c, g, or t
  misc_feature (535)..(535): n is a, c, g, or t
  misc_feature (538)..(538): n is a, c, g, or t
  misc_feature (540)..(540): n is a, c, g, or t
  misc_feature (544)..(545): n is a, c, g, or t
  misc_feature (548)..(548): n is a, c, g, or t
  misc_feature (1040)..(1040): n is a, c, g, or t
  misc_feature (1096)..(1096): n is a, c, g, or t
  misc_feature (1119)..(1119): n is a, c, g, or t
tccntaatgacttcttcaaggacatgttccctgacctgccgggggggcctctgggacccatcaaggcggagaacgactacggtgcctatctcaacttcctgagtgccacccacctgggaggcctcttcccaccctggcccctggtagaagagcgcaagctgaagcccaaggcctctcagcagtgccccatctgccacaaagtcatcatgggggccgggaagctgccgcggcacatgaggacccataccggggagaagccatacatgtgcaccatctgcgaggtccgcttcaccaggcaggacaagctgaaaatccacatgcggaagcacacaggggagcggccctacctgtgcatccactgcaacgccaagttcgtgcacaactacgacctcaagaaccacatgcgcatccacacgggcgtgcggccctaccagtgcgagttctgctacaagagcttcacgcgctctgaccacctgcaccgccacatcaagcgccagagctgccgcatggcacggccccgacgcggccgcaagcntgntncgtnnagngccgccagcctgctcttcgggcccggcggcccggcccccgacaaggcggccttcgtgatgccccctgcgctgggcgaggtgggcggccacctgggcggcgcagctgtgtgcctcccgggccccagccccgccaagcacttcctggcagcgcccaagggcgccctgagcctgcaagagctggagcggcagttcgaggagacgcagatgaagctgttcgggcgcgcgcagctggaggctgagaggaacgcggggggcctcctggccttcgcgctggccgagaacgtggcggcggcgcggccctacttcccgctgcccgacccttgggccgccggcctggccggcctccctgggctcgccggcctcaaccacgtggcctccatgtccgaagccaacaactaggctggtccctgtcggctccagcccaccagccctccagtccttctccctccaggcccactctaccctaccccatggatctgaacttttcatttnaaaaacacaaagggaaaatgggaaaataataataatactatcagtgatggcatttncccgggctcctaaagcagctgcntccttttgctggtctgagacgggcatcttttcccaaaaggccaggagcccgggcctccctccctgtctctctggctctcatatagaaacttgcaccggcccatgccacaaagaactgggtgcccaggggcacttaggagctgggtgagtcatgaggggtcagggggtggttggcctggtgcccagccagccacagcaggaggaggtaggggctgggcatgcaccttggttaagccccaccccctatggcaaagtctctgccaacactcctctgagggctcattttccagtctccagtggccccggggtctttttgagaactacccacctgccacatagaaagaaatgctctgttggcagggaggcctcctggaaccagtcaggaaccaggctctggaaggcccgggccatttcttccctgacctgtcctgtgaccttgacaggtcagccctctgtagctcagtgtcacctggctatggaaggggctggtaactgaggtttccgccctccacctctaaacacatacacacctatccccccagagaatcacagagatggtagaagctttgtactccccaagtccatggggaaacagtttatctttctggacttagttttatcacatccagctctatattagcatattagcataggtgagaaatatggccagactagacagagatcaggtcatcaggggagcttccgagcttcagcaaagcccacaggtagctctgcgaactcagaatgctaccctaccttccctgcaggccgctgttcatgtctggactcctgggggcgctatttaatgtttacccccatctccagtgccccctccaaggctgtgcagtgtcttggggctctcagggccaacatcgaagagatgggggccacctcttaacacctggcaacagtctcccctcatcctgattcctgacaacagacaaaacaccggtttctagggtttatctgtttgttttttgagttgagggttcctcagggccttggcattgctagtgatggtcccctttgctgtgtgagaaccccctcaaccccttcctcctccctctggggatgaagtgggagtatttggctccccatttttgacaaaagggctcagtgcagggaggtggaggcctctgaggtttgaagggctctgtgagttagagttgtcacatgttctcctggttcttgaatttgcagcaggtcctgaaaaggaaggctctgctggccccgtgccttcctgaccttctctctccttccctcccctctcttttcttgccaagtttgctttggtttctgagcagcccagagaggaggagggttcgtccccagggagagcccagggctggagtccccaatccctgtgctatgggcacaaagagacttcagctcttcctgttgccttggctttttcctgagcaaaaacacaacaaacaaaaaggccagagaagagcacagactctgtccctctcacaactctccagaagagaccccctgattcttcacaccaccggatgccactccagccagcaggattgctacacacaccctctgttctcagaagtcatctgcctgggcagccgcctctcagattcctgtcttcgtttcagacacttttctctgaagcatgcccatgtccaccagccaacgtgcccccgtgttcccccccatcagccaagtgattggggctgaaccagactttaaaagagaggaaaaaaaaaaaaaaaaattcaaggggggccccgttcccaattgccctttatggagagttttttcaatttacggggcccgtttataaaccaacgtttttggtggaaacccccgtgttcaccccatttaatctggttggaagaaa

SEQ ID NO: 680486 - DNA, 2131 bp, Homo sapiens
cctgctgagcagggtcaaacatcgcccattctgaatcctcactttgtaggggaaaaattgaggcacggagagggatcaggctttgctcaggccacatggccagtccatggcaggtgggtatcagaatccaggcctgctcgtgcccttgaaaccacctggctagttccagctggaactgccctctccagccactctcctcctctcccagccacctcctcattcagctgctacctgctggctgtcttctcccacagggcccctgtgcagcatcctggtgggacgcttcggctgccgagtgaccgtgatgctggggggcgtgctggccagcctgggcatggtggccagctccttctctcacaacctcagccagctctacttcacagcaggattcatcacaggcctgggcatgtgcttcagcttccagtcaagcatcacggtgctgggcttctactttgtccgccggcgggtgctggccaacgcgctggcctcgatgggcgtctccctgggcatcaccctctggccgctgctctcccgctaccttctggagaacctgggctggaggggtaccttccttgtcttcggcgggatctttctccactgctgcatctgcggggccatcataaggcctgtggccaccagtgtggcccctgagaccaaagaatgtcccccgccacctcccgagacacctgcacttggctgcctggctgcatgcggccggaccatccagcgccacctggccttcgacatcctgcggcacaacacaggctactgcgtgtacatactgggtgtgatgtggtccgtcctgggcttcccactgccacaagtcttcctggtgccatatgccatgtggcacagcgtggacgagcagcaggcagccctcctcatctccatcatcggcttcagcaacatcttcctgaggcccctagccgggctgatggcaggacggccggcctttgctagccaccgcaagtacctgttcagcctggcactcctgctcaatgggctcactaacctggtgtgtgcggcatcaggtgacttctgggtgctcgtgggctactgcctggcgtacagcgtgtccatgagtggcatcggcgccctcatcttccaggttctcatggacatcgtccccatggatcagttccccagagccctgggactcttcactgtcctggacggccttgctttcctcatctccccaccactggccgggttgctcctggacgccaccaacaactttagctatgttttctacatgtccagcttcttcctcatctcagctgccctcttcatgggtggcagcttctacgccctgcagaagaaggagcaaggcaagcaggctgtcgcggcggatgccctggagcgggatcttttcttggaagccaaagacggtcctgggaagcaacggtcccctgagatcatgtgccagtcttcccgccagccacgtccagctggcgtcaataagcatctttggggatgtcctgcctcctccaggaccagccatgagtggctcttatggccaaaggcggtactgcaggccaagcaaacggctctgggctggaatagccctacctgagtgccctgtttgactccgccactatctgccatgtgagttgggcaaattgttgaccacctctgagccttgaaaaagtaggaggttactttgttagagcaaaataataaaatttaattttaaaaaagaaaacgtaggaggttcgtttggatgagctagtctcttccggttgaaaagtctgactcggtgagcatcctgacgactccatttccttctggctccccacccagtcttacacttggccttgccatatgccacatgctctgaagggagagtgcttgcatggactttgccaaatcctgtctgctccatctcagttgaatggaaaaggagggaggtggggctggtagataggtgcatttggtgctagtatccaccaggttttgtgtgcatcccgtaatgagcccacttcctgaaaacatttaaagaaaaaagatatcagctggagatggcagtgcgcacatgtaatcccagctactcgggaggtttaggtgggaggatcactcaaacctgggagtttgaggccagcctgggcaacacagcaagaccctgtcttttttt

SEQ ID NO: 680487 - DNA, 1187 bp, Homo sapiens
  misc_feature (171)..(171): n is a, c, g, or t
  misc_feature (192)..(192): n is a, c, g, or t
  misc_feature (604)..(604): n is a, c, g, or t
gccacgagctgcgaaagggcgggaaaggcagttggagaagaggtaagcggttactcactccatggctgcagcaaggagaggcggcggcggctcggctgaagaaagaaggtgggagcggagagcgcaggcgtgaaatcttcccaaggctgcagacaccgacggatttgcttngggagccagagtagctgccgncaccagagtccggagccatgagcgggtttaattttggaggcactggggcccctacaggcgggttcacgtttggcactgcaaacatgacggcaactaactcgatcgaacctgacgtacaggggtatattctattacgtgcacacctctggtcactggagggttgaatctttcggggctcccgttcgcataccaggccacaaagttacacccttatccgaaccggacgcatgttcctcatcttgtgccgacgccgagaatctcctggaccgagcaatagacgacgaggcgtatcacgtgttagggaatcagcgaactcttgcgttcgggggcggaactggactattgcttaggggatcggatgctgtcaacaggctcaaactctgagcaagcaacagactgcacaacacccagnccatgggcaaaggcccagtcgtgctttggggctgggacagactaggcaagtctcactaatgctcatgatcgagcaccgttcaccatcgcagccagggcacaagaaacgccagcggggtttgtgttcggcccctccgactagctctgtggctccgagctaccacatcgtggaggcttctcattcactggtggaagcacggccgaacagtccgggttcaaaatgggtcagcaggaagtcagcccagccaaggaccggccagatgccttcaatccgggaacgccagaagcacaacagaaggtgcagccaggcaggggtccaaaccaaaggcaacgacccaggtgggcaaggcgcatggggaaagaaggcaactacattggcaacaggggaactccttgtacccgtaaccaagggggcccatgttgggaaaaggctcactaaggacgagaaaatgggaccaaaaacacgggacgcacaccaacaaaggaacacgaggtgaaaaggcaggacacaaagggacacacaggagggaacagagagtggaagctggcgcggccagcggtcctcgcagtgaaagagaaagaaa

SEQ ID NO: 680488 - DNA, 1640 bp, Homo sapiens
ctagttttagaagtcaatagcatttactagaggacaggcgccactgaaaacttcccaggatttaattcatcaactagaggttttgctgcagagggtttaaagcttacttccagtgctcaagctttttcaaaacagctgaaagacgatgacaagcttatgctgggccaacatcgaagagatgggggccacctcttaacacctggcaacagtctcccctcatcctgattcctgacaacagacaaaacaccggtttctagggtttatctgtttgttttttgagttgagggttcctcagggccttggcattgctagtgatggtcccctttgctgtgtgagaaccccctcaaccccttcctcctccctctggggatgaagtgggagtatttggctccccatttttgacaaaagggctcagtgcagggaggtggaggcctctgaggtttgaagggctctgtgagttagagttgtcacatgttctcctggttcttgaatttgcagcaggtcctgaaaaggaaggctctgctggccccgtgccttcctgaccttctctctccttccctcccctctcttttcttgccaagtttgctttggtttctgagcagcccagagaggaggagggttcgtccccagggagagcccagggctggagtccccaatccctgtgctatgggcacaaagagacttcagctcttcctgttgccttggctttttcctgagcaaaaacacaacaaacaaaaaggccagagaagagcacagactctgtccctctcacaactctccagaagagaccccctgattcttcacaccaccggatgccactccagccagcaggattgctacacacaccctctgttctcagaagtcatctgcctgggcagccgcctctcagattcctgtcttcgtttcagacacttttctctgaagcatgcccatgtccaccagccaacgtgcccccgtgttcccccccatcagccaagtgattggggctgaaccagactttaaaagagaggaaaaaaaaaaaaaaaaggaaacatgaataaattggaatccagtggtgttggggcttttgtttttattttgtaaaggtgatgacttcttataaactcaatttttcagatgactggttagttctttctgttttttcttggctgcagtttggaattgtacattgtaaaatatccaaagatgttgagtactgtatgatcaagaacttgaagcaaatgggttgtcgggggaggggtggttgtgtttttgttttgcttcaatttttttttttttttttgatgtttcaatttccctgtctgtctgtgggagaactttggaattttttctatttataactctttttttatgtgattgctctacgtaaaatgacactcaacaaagtttgccttagtgattcaagggacaatcttccataacttcggtcgcacgccacatcccgccgagaaaaactctcagctaattttctggcctatttattaaacagtattaattgacttgattaaattatattgagagttgcacttctgtgagatgtgacttctgaaagttcacaggacagcaacaagccagtcttaaggtttttaattgttgggtgtcataaacttaaaataatgtcaaagacaccttaacaaaga

SEQ ID NO: 680489 - DNA, 263 bp, Homo sapiens
ggtaagaggtgactagaagggaaaataactaggggaggttaggaccataggaggagatacagggtagactagggtacctagcggataggcactaccctagagtaaccataatatacacataacataagggtcctagcagctaaactaaagtagacacacaaataagaacagagggtacctagtaaggtattcacgacagactgacatacctaatagagtacataagaggaggatactaaacccataacataccagccagcagg

SEQ ID NO: 680490 - DNA, 250 bp, Homo sapiens
gaaacgcacaaggaaaaaccaggtatgcccaagtagcaagcaataatattattaaaccaacagggacaaaagttaagacatggagaaagcaaaatattcattcacataatgagaaactaaagttgaagctaatatatcaaccggggaaaagatttaagcgcaagcgatgcttggctatctttcacattcatttcttttcttctgagcgaaggcatatcagatattcttgaacaagtcaatacagctctgc

SEQ ID NO: 680491 - DNA, 1081 bp, Homo sapiens
actgagcaactagcggaatccagtagcaggccctccggacttttttccttgggtaccaggtactcggggccaggaacctgggtctgagccctgctcaggtttgtcccagccggctcagcgcagctggctgtgtgttgctgctcctacagctcaatgcactggaccttctcgtccagcctggatgcctctatcatttctctttgtctttctctggcctccataccgttctgaagagctcaccttcctctaggttcctcctgccctgctcttcccaagtgacccagccctcacctgtagggcagccaaggctggtggtgcagctgcccccagtgaaggtcattgggcatcgcactgggcagtgcagaggtccaggctgaggagttgagtggcgcgcccatcctggcgcctgtgcagagaacgggaggggggcccctggcttggatcctagaatcggtgaagtctgagggcccccctgcagtctcagcaggacctgctctatcaaggggcttcctccttcctttccccaccctgtctccttggcggggaggattagtgccaggtgggggaagccagacatttgactgacgggagaggaaggcttgccaggcagcccgaagactgttgtgaaaatggggctgcttttgcaagggaagctcttttactccccattcctgtcctccagaggccccccttttccctgccgtgttattggtgtcaaccctggggtaagtggctggctggactcacccctgctccccgtacacctgtgcctgtgactggcggtccaagctccccacacacacatcttgctggtgcctttccctgaagtcaccacccaggggctggctgtcatcagcccattcttgtcccagcagggtaccgagggaatgataaaacagaatgtgtttgaattacacacaaaaatgttccctgcagcaggtcataaactctgtgaactaatgaagctgacaaacagagctggagtacgtttcccctgaacctgagcaccccttgctgagctaggaggaaaggaagtcgagcgccgcgaattagtagtagtagtagtagtagtagcggccgc

SEQ ID NO: 680492 - DNA, 806 bp, Homo sapiens
  misc_feature (171)..(171): n is a, c, g, or t
  misc_feature (192)..(192): n is a, c, g, or t
gccacgagctgcgaaagggcgggaaaggcagttggagaagaggtaagcggttactcactccatggctgcagcaaggagaggcggcggcggctcggctgaagaaagaaggtgggagcggagagcgcaggcgtgaaatcttcccaaggctgcagacaccgacggatttgcttngggagccagagtagctgccgncaccagagtccggagccatgagcgggtttaattttggaggcactggggcccctacaggcgggttcacgtttggcactgcaaagacggcaacaaccacacctgctacagggtatcctataactccagcatctggcactggagggttgtaattatagggtgctcccttccaatccagacacaagtaccccattccatccggcactgttctcaccttgccacaccataactccggaccacaacagacgaccaggcttcagcttttggaacagctgactcttgcttacggcggggaactggatcatacttcggaggatcggtgcttcaacagctcgaacttgagcaacacaagctgccaaccccagccatggcaaaccccagaggacttagggcttgagcagaaagcaaacctcactaatgccatatcgagcaccgtcaactccagccaggacacagcaaccaccgagctaagaggtcacgcgccccatacaaccaccttctgtagggatcccagctaccgaccattctggacgcgcttctcatttgcctgcgtggaacccacgggcccaaaacctccggttaccacagttcggctcagcaagcgcacattcagccaa

SEQ ID NO: 680493 - DNA, 979 bp, Homo sapiens
gtttttattttgtaaaggtgatgacttcttataaactcaatttttcagatgactggttagttctttctgttttttcttggctgcagtttggaattgtacattgtaaaatatccaaagatgttgagtactgtatgattcttcacaccaccggatgccactccagccagcaggattgctacacacaccctctgttctcagaagtcatctgcctgggcagccgcctctcagattcctgtcttcgtttcagacacttttctctgaagcatgcccatgtccaccagccaacgtgcccccgtgttcccccccatcagccaagtgattggggctgaaccagactttaaaagagaggaaaaaaaaaaaaaaaaggaaacatgaataaattggaatccagtggtgttggggcttttgtttttattttgtaaaggtgatgacttcttataaactcaatttttcagatgactggttagttctttctgttttttcttggctgcagtttggaattgtacattgtaaaatatccaaagatgttgagtactgtatgatcaagaacttgaagcaaatgggttgtcgggggaggggtggttgtgtttttgttttgcttcaatttttttttttttttttgatgtttcaatttccctgtctgtctgtgggagaactttggaattttttctatttataactctttttttatgtgattgctctacgtaaaatgacactcaacaaagtttgccttagtgattcaagggacaatcttccataacttcggtcgcacgccacatcccgccgagaaaaactctcagctaattttctggcctatttattaaacagtattaattgacttgattaaattatattgagagttgcacttctgtgagatgtgacttctgaaagttcacaggacagcaacaagccagtcttaaggtttttaattgttgggtgtcataaacttaaaataatgtcaaagacaccttaacaaaga

SEQ ID NO: 680494 - DNA, 126 bp, Homo sapiens
cggagtggagagagaaaggatgtgtagcgttttacagattctaaaaggtctgagacctgtagcattaataattttagatgccctccccttctccactcccgggctacccgcagcgtcgatacttcc

SEQ ID NO: 680495 - DNA, 222 bp, Homo sapiens
agcagattatatttctgagttttctattctgctccattggtctatgtgtctgtctttgtaccagcaccattctgttttggttacggtagcttttttgtttgtttgtttttttgagacagagtctcactttgtaccccagaaagtaaatctagttagatgtggtttgtctcggctcactgcaacctccaccccgtgcgttctagcaattctcctgcctcagcc

SEQ ID NO: 680496 - DNA, 185 bp, Homo sapiens
cgccccaaatcattttaggagaatggcacagaccacccactgtttttgtcaatctgtgttcttttcttctgagcaggtccttaaccctggcaaaataaacttctaaactgattgagacttgtctcagaatacttcttggtttacaaggatgatagcaacaatggtgagggtggcatcgataaaca

SEQ ID NO: 680497 - DNA, 898 bp, Homo sapiens
ccactctagacaggcggcgtcgcgcagcatgagggcatcgttgtgggccttgccgatggtctggtgatcctcgtgcatgccgaatccggtcaagtgcacgggctcgccgttgacgaggaggcgggcgccgtcgacacggatagttcggacgccgaagacctgctggtaagtatcgattacctgatcaccgtcgactagggagatttcggcctcgtaaagatacccgtggcctggctgccagagatggaccgacgggatgcgggcatgggcgttcgcactggttccctcagcgaccacgttgccctcggtgtcgaaaattgtcacccgagtcgttaaaggttcagcatcgtgcgaaagaaccgaccaggtgacgattccgtcatttccgtcaatgtcagtggtgatggtgacgtcctcaatgtgggcctgggggcggcgacacagccacacgtcgcggtggatgccggcgtaattgaagaagtcgtgccagtacttctgcttcggggccctcgggagagtcgacgataacccccggcggaatggtctggaaggacaaccgattgtcgacacgaactgtgagccgacatttttttgccccggcagaactgactcggtgatatcggcttcgaaagggaggtacccggcaagcatgtctgacgaacctcgacgtcgttgaccccaaacgggggcgggcatgagtcgcagaatcgaaatggacgacgaacgcgatccatcggggtccagcccggggcggaaatggcggaaccttcacggtgggctaccccgacctggtgaccaacacgtgaacgcgggagggaggggaaccacgggggaagaaaatccctggggaacgaaaggcccgggaaacagggccaacctctcggggggcgccgcttac

SEQ ID NO: 680498 - DNA, 452 bp, Homo sapiens
ggagtgtgagcagaacagttgttaaagaataagaaaatctttcagtcatcattcagtccagtttccctgcagagtgcatgagccactggtataaaatctttgtgaaacgaatcagaaaggatgtccctggtgatccatgaccttttgttagtatagtaatggactggtaagaaattcactctgtgaaagcagtgagcacacgagcttttgccttctgagtgcctattgtgttagcacatcccagcacagttattctgtctttgacatccttaattcctgtaagggctgtctcatcagtgcagtcaatgtctttctgggggaatagtgcaaaacagtgatatttcatcagcatcccaggcttattctggcattaaattttcatcagcagtgaccttggcaaacttgtcaatgaatttctgcactgcttcagtaaacatttagaatttaagaaa

SEQ ID NO: 680499 - DNA, 381 bp, Homo sapiens
  misc_feature (16)..(16): n is a, c, g, or t
  misc_feature (94)..(94): n is a, c, g, or t
  misc_feature (102)..(102): n is a, c, g, or t
  misc_feature (111)..(111): n is a, c, g, or t
  misc_feature (171)..(171): n is a, c, g, or t
  misc_feature (191)..(191): n is a, c, g, or t
  misc_feature (234)..(234): n is a, c, g, or t
  misc_feature (236)..(236): n is a, c, g, or t
  misc_feature (248)..(248): n is a, c, g, or t
  misc_feature (254)..(254): n is a, c, g, or t
  misc_feature (259)..(259): n is a, c, g, or t
  misc_feature (261)..(261): n is a, c, g, or t
  misc_feature (267)..(267): n is a, c, g, or t
  misc_feature (275)..(275): n is a, c, g, or t
  misc_feature (281)..(281): n is a, c, g, or t
  misc_feature (285)..(285): n is a, c, g, or t
  misc_feature (289)..(289): n is a, c, g, or t
  misc_feature (309)..(309): n is a, c, g, or t
  misc_feature (311)..(311): n is a, c, g, or t
  misc_feature (317)..(317): n is a, c, g, or t
  misc_feature (322)..(322): n is a, c, g, or t
  misc_feature (344)..(344): n is a, c, g, or t
  misc_feature (352)..(353): n is a, c, g, or t
  misc_feature (366)..(366): n is a, c, g, or t
ccaatttttttgcagngaaagggtggcgccccgcagccttgggaggcctgcccaggctcccgtggagcttccaacagctgtttggccccgcagntgcccccncttcctttnagacctgcactttcatgcttgccgcatcatgcctccctgtgggggctttgggcatggagnaggcaaaaaagggggtgccnggcctcctgtatttggggtcttcccccagtggatgtttcatgnantttggccccacncactcncaatnantttggntggccccncgcagngggnccanccgccccccaggtggcctcncnttttgntttgntaagtttggagaaaacagaacnataaaccnnatgcaggtggggnccgcccggcctttca

SEQ ID NO: 680500 - DNA, 424 bp, Homo sapiens
tttctttcgcccagtgctgagtgaagtggtgccttcttggctctcgcgacctcctccccaccggttcaagcgattgtcctgcctcggcctcctgagtggctgggattgcgggtgcccgccaccatacctggctaattttgtatttttagtagagatggggtttccccatgttggccaggctggtcttgatctcctgacctcaagtgatccacctgcctcagcctccaaaagtgctgggaatataggcgtaagccactgcgcccagcccaacttgccattttaacagttcttagtgtacagttcagtagtgttaagtatgttcccattgttgtacaatcaatcttctcatcttgcagaattaaaactctgtacccattgaacaacagctgctcatttcccccagccccagactgggcgaaagaaa

SEQ ID NO: 680501 - DNA, 196 bp, Homo sapiens
  misc_feature (122)..(122): n is a, c, g, or t
  misc_feature (163)..(163): n is a, c, g, or t
cccgtctccaccaaaaatacaaaaaagttagccaggcgtggtggcgggcgcctgtagtcccagctactcgggaggctgaggcaggagttgctgggcactcgacacaaggatttctatcagtntgctctcctgcacatcacccaggtctggagtgccaggaggntcaaaaacatagaatcaaagattagccaccttc

SEQ ID NO: 680502 - DNA, 567 bp, Homo sapiens
tttccctagcgtgctaaaagaaatccagttgtatttatattttctgtattatgtattttcatgcaagtttattatgttggtatagaatgagccaaggtcttcttagagcaatgaggtagttccctgccctgtctccatctccctgtctgcactgtctctcccagagttgtttgctggtgccttctttgcagtccccgtgtgcgtgtgtcatgccgcgttggctgacccagccccctgtggtgtcttccccatccctgtgtgacgtgtcgctcttggtagttcctccgtgtttcctttgtttccttaggtgacttgtctttgccccactccctgcagtccgcagcaccctgttgtctccttccctctcctcccgcttctcctcagacgtcatctgttctttctagagttggtccccctttgcccagggtccagggttcctaacagcctgttttttttctttctttttttttttaagtgagacagagtctcgctccttgttgcccaggttgacgtgcagtgatgcggcctcagctcattgcagcctctgcctccggggtccaggtgatt

SEQ ID NO: 680503 - DNA, 1361 bp, Homo sapiens
  misc_feature (375)..(375): n is a, c, g, or t
accgcggcgctgcgttcattggtggacaaagtgattatagttggaagatctaagctttacgaatggggtgacaaatgatcgatcaacagaccctagcaggtctagtcgaagttcatgcgcgtcattagtcaatataccgttatgcttgatcgattagatcagagattacatctggggacagtggcaatgggtatacgaccgatcgtctgaagcagcagtatgtccaggagtgtgattcatgaggattggaagacaaggagagggccacgagaggagattatactagggatagaggatgttctgctaggatagtgtcgcaagtataatgtccaatatgctatcagttgtgagtaacacattgatgtttatggcatnctgctatggagtggtaacgtaagtaaaggaaacaacgatgtgagattgccacatgggaataatgacactatcgtcatatatgatgtggacattcggtcattaggatactgcgtaagatagaattgctcgtctggaacaacacgattacataggccagtacatgggtaagcctgaaggtggtagccgataattttaaactagggagccgaacatcaatggcgatgtagccaaggcattttgaaaaatcagaagaggactctggactagagggcattcttagtccctacggcaagggcctgttactatggcacaatatgagagggggatcaatcaatagtatgacaaactttctggtacccccaaatggaacaagggctgggggcctataactatatcgtattctttacacataattcatatgtaaagacacaagataaagggaacatgagggaaagcaaggcatagaaaagatacccaaggggcataaagacctaacacagacacaatcacaaggaaaatagcgcaaggggcgaaacaacaaagaagaaaatcggggacaaaacaaaatgtaccacgggaacagcagaagcaaaaacacagcccaacgggaacaccaactcagagtggagaacgagcaacaacacaaaaaacccccaaataaacacaatacgggccacagaaaggaggagaaaaaaacaagaaaagagaagcctcaaaaacaaacactactaggcacaccagcgaaacaaaagaagagcaacgacgaaaacagcaaaaaaaacgaacacaagagacaaaaaagcaaacgcaatgtcaaccaacgcagcacgcgccacaaacgagaaggcaacacaaaaaaggttagacgaaccagccacaagcgcgcataaaataaaccacgaaaacaaagacacagagaacaaaaagaaaaacaaaagaaaaaagccaagagccgccccacaaaaccacctcccggagaagaaaaa

SEQ ID NO: 680504 - DNA, 235 bp, Homo sapiens
ggtttgggtgctctgaggatcccccgtatatgtaccaagacaacctggcacataatgaaaccctatctctactaaaaaaaatacaaaaaattagctgggagcagtggaacacagcaatctcagctactcatgagggtgaggcaggagaatcacttgaacctgggaggcagaggtggcagtgagccaaggtcacgaactgcactccagcctgggcaacagagcgggacttcatctc

SEQ ID NO: 680505 - DNA, 747 bp, Homo sapiens
attcaatgaacatttgatgagttgatgcttctgttttagctatgatcttctgggttgtttgtttgtttgtttttacacagaatgttgtccaggcttgagtgcagtggcacaacctcggctcactgcaacctcttcgtcccgagttcaggagaatcgctttaaccctagacgcagaggttgcagtgagccaacatcatgctactgcactccagcctgggcgacagagtgagactctgtctcaaaaaaaaaaaaaaatttatgaaggatttcaagacaaggtcagaagaccatcaaactaaggatgggacccatgtgactgcacaggtcatatgctcatgaagctggccaggatggcaagtccaggacaccaagccaggctctttccggggcaccgtgcacctcttccctggctcaagggtccatctgcgggccagttccggggatttctctgacccgccactccacacaggctgggacgtccaggcggtcttcagagaggtccactagatatcaggggacgctgcccagtactttcccatcaaagaccaggaccacagaacacttccagaaaacgcttccagaaatgctcaatccgtgccagcatggaagatggcctgctattttccagtgaagaccactggtctggaagaaatgtggcgggtgtctacctaggggaatgtcccagtgcgcagatgagatctgactgatcacttcacacattttagaccaaagttacggcttgttgtg

SEQ ID NO: 680506 - DNA, 719 bp, Homo sapiens
  misc_feature (136)..(136): n is a, c, g, or t
  misc_feature (200)..(200): n is a, c, g, or t
  misc_feature (204)..(205): n is a, c, g, or t
  misc_feature (208)..(209): n is a, c, g, or t
  misc_feature (213)..(213): n is a, c, g, or t
  misc_feature (215)..(215): n is a, c, g, or t
  misc_feature (253)..(253): n is a, c, g, or t
  misc_feature (257)..(258): n is a, c, g, or t
  misc_feature (264)..(265): n is a, c, g, or t
  misc_feature (281)..(281): n is a, c, g, or t
  misc_feature (309)..(310): n is a, c, g, or t
  misc_feature (348)..(349): n is a, c, g, or t
  misc_feature (360)..(360): n is a, c, g, or t
  misc_feature (363)..(363): n is a, c, g, or t
  misc_feature (376)..(376): n is a, c, g, or t
taggctaggtacgagccgggtgttagcgagtagtctagttagatcggcctgtaatctccttttgcgcgacacggtctcagctgttccgcctgaggcgagtgacgctggccgccaacgaggtatacgtactgggacnctcgccctcagtctcgtctccggcgcggctacctgccccgttttccctgtgagttgacctgctncggnncgnnggcngncaatggcaggggccgctccgaccacggccttcgggcangcgnngatcgnncccgccgggctcaggnaagaccacgtactgcctgggcatgagtnnagtacctgcgcgcgctgggccggcgcgtggcggtggtnnaacctggaccnggncaacgaggggctngccgtacgagtgtgccgtaggacgtagggcgagctaggtaggggctagggcgaacgtagataggacgcgctagcgcctaggggcccaacggcggcctagctctactgcataggagtacctaggaaaggccaacctaggactaggctagcagtagcccatgctacgaccccctaccgcggacactaactatcctactatcgactagcccagtgccaggtaggagctctagcacgcatacacggcgccttgcgcagcatcttctcccaaactggcgcagtgggacctacaggctagactgccgtaccacctacgtggatactcactacttgcacagaccctgcca

SEQ ID NO: 680507 - DNA, 360 bp, Homo sapiens
tgctttgttttgttttgttttgagacggagtctccagcccaggctggagtgcagtggcgcgatctcagctcactgcaagctctgcctcccaggttcacgccattctcctgcctcagcctcccgagcagctgggactacaggcgcccgccaccatgcccgggctaattttttttgtatttttagtagagacggggtttcaccgtgttagccaggatggtttcgatctcctgacctcgtgatccgcctggctcggcctcccaaagtgttgtgcatgtattatttgattgtgttccaaaagtttattcttctgaattccgtatccttattttccaccaccaaaagtcatcaattcaacatgta

SEQ ID NO: 680508 - DNA, 749 bp, Homo sapiens
  misc_feature (320)..(320): n is a, c, g, or t
ccttatgcccccgttatttaggtttcaaagaaacgatcctgtgtcaaaccccctacttcgtacacatctaatgtttatacacccactatgtaaaactctccccccccaacaaaattttctaatcgacatttttttccccccatgctcggaattacgtgccttgtggacgtctaaccaccccccttggtaaccagttcgctgctaattaacagcatctcccccccctcttttccttagtaacccaacttgtcgcccgtgcatcattaaccattgtggagaggtggaagtcgcctctggagacaccattcttgtgtgcaccncggtataacctcttgagtcagtccggtcctcacaccccccgctcgattaaactctggacttagggagtagcggtataactatcgagtgagacgtagtctcgaggagcacaagcccccgacaagttctgtgtttctcgccgagggcctacatctgcgtgattccactgcaatactactagacaaaactttaatcaccaagccccgtcttggaatctccagcactacattgcggtgcccacatttctctagcaacctctccctctgattgttccccatacatttgcaccacctcgtcctcaaaattaattcataccatcttagtccctccgcttgttcccacacctcctcaacagattgtacgcacgacaaacatcaaaaaaactgatcatcttgcacgtcaccctttttacgcgactacaccacaaaaca

SEQ ID NO: 680509 - DNA, 493 bp, Homo sapiens
  misc_feature (3)..(3): n is a, c, g, or t
  misc_feature (14)..(14): n is a, c, g, or t
  misc_feature (276)..(276): n is a, c, g, or t
  misc_feature (294)..(294): n is a, c, g, or t
  misc_feature (298)..(299): n is a, c, g, or t
  misc_feature (433)..(433): n is a, c, g, or t
  misc_feature (454)..(454): n is a, c, g, or t
agntcggcacaggntgtaatcatcccatcggcctttctggtcttcttcaatctgtatattatcaggaaaagccagtcatttatgttgtaaaatttttttgaagtagtgatgttctctctgctgaacaggtttcaaccaattcttctttatcgttttcaagacagcagtgtctcaaaattggcctaaacaccagaaggattcattactgatcaagtagccgacagaagtatgtccgaacaagagcataccatgtggtggggatgagatggagcaganccacgtgcaggttttttntttnnttttgttctaacaaggtagtcatatggcacctctcaccagggagatgcaataatttgattcaaaaggaactcagacatgaatcacaataaagaagtaaacatgctgaattggaacagaaaatggcatgttgtcnacagagagtggtgcaggggancctctccaggagaggagaaaagagcagaaagggcaagtt

SEQ ID NO: 680510 - DNA, 285 bp, Homo sapiens
ataagtgtattgtattatggctcgaaagactcagtaatagccaaatcggcaatgacactaaagaaatcctctgtgcttaacaatatgcaaatatattacttaccaagagttgccctggtgatgacgatcaagagttcatgttaactatcttttctggaaacttccttttctaagttattgtattcttgaagagcctgggccatgaagagcttgccttagttttgggcagtgaactccttgatgttctggcagtaagtgtttatcttgcctgcaatgagcagcgag

SEQ ID NO: 680511 - DNA, 153 bp, Homo sapiens
ctcccaagaatgaggaacttgagatatacaaggtctaaaacttacagattacttataaattgcaaaatgggaaagttatactttacaatgatagacagagtgacatacaccgacgttaacacgagtgatccaattactacatcctatgggacg

SEQ ID NO: 680512 - DNA, 444 bp, Homo sapiens
  misc_feature (53)..(53): n is a, c, g, or t
  misc_feature (128)..(128): n is a, c, g, or t
  misc_feature (133)..(133): n is a, c, g, or t
tgggatgcagataccgaagttgcttttccaactttcgcctccgctaggattcnagaaagaattcttgtgacttcctgggcagccattgaattcattttccatgagaagatgacagagttagcctgtgntatanggagatcatgtcatccagacctttttgcccatcacattaactttcctggaatattgtgctgcacaggtagacctgaatctgcccaagcttgttgacagctcttgtgtatactgtgttgaagccagacagaaaagtaatggggccacttctgaaacctctcagctgtttgatctcacagcagctaaagggttgtgccaaacattttatttaaagaaaagtaaagcccagattttgaatggggggttttccctaaggccttatagtatagaggcatttgtaatatggagaaaataatttttctcatttaatta

SEQ ID NO: 680513 - DNA, 152 bp, Homo sapiens
gtacgcatcatcctttcttcatcaccaaagtagctatgcccacaggtactaacttctggaatactacactgcagtacttagatacctgtatgaaagtaaactagaatagctacatatttcctgaagcccctagtaggtgtacggggatcctc

SEQ ID NO: 680514 - DNA, 102 bp, Homo sapiens
  misc_feature (21)..(21): n is a, c, g, or t
tgtcatgcagttacggaagtngtaagccttcccatttgtgtagtctgggcaggttaggatttccggggtggcttgaaggtggggcggagcttgggagggact

SEQ ID NO: 680515 - DNA, 112 bp, Homo sapiens
cacgaggcctgatacatctcttaatgttattccccatgcatcaagcaattcttcatcgattccaccacatttagaagccagtccaatactggatactgctcttgtcttcaga

SEQ ID NO: 680516 - DNA, 110 bp, Homo sapiens
agcaccacagcctggccttccgagttggcatgtttgccctggagcacagagaacgtaaagattacactggccatccatgagaggcaacatcaggccgattgtcacagcag

SEQ ID NO: 680517 - DNA, 673 bp, Homo sapiens
tgcgtgcgccgcttgcggatggcttgagcgccgacgcgctggagcggctgctgcggcagccgtgggcggccttcgtggtggcggtgcgggcgggcggtgcagccgcggcccggacgcgtgtgctggccgcctcgccgctgcgcctgtgtcgcgcgcaccagggctccaaagccggggctgcgtgaggctctggcgcagtccacctctgcaggttctggtctacgggcctgaagtttcctgagagccggagaactgtaggacaagtacagtttgacaagcgaacacaagctgagtgtgctgagaactcatggcgttgaccacctgagctatagtgagctatgccaactcttgtacagaacgaccctggctttggccagaaatttgccaacattacaacgaaaggagatggaccccacggtctttgtgcctttcaaaaggcagtgcatcagggctccatatctgcagtactataacagggggaatgcaaggtttggcaatagcctgtaagagatcccattgatttcgctaatctgagaatctggaaaacattggagaagtagggtatacagctcagaacctggtgagaaggctgacgtaccattatagaaatgacatgacgatcagaataagaggctgccccagaagggcaccctatggccagggatctaagagg

SEQ ID NO: 680518 - DNA, 109 bp, Homo sapiens
ccgggtggtgcccaaaaactgggctgggtcacagtttcaacacatacagcaccaggtcatggtcagcagctgtcagcgcctgtggaaggactgattgaggtggccctgt

SEQ ID NO: 680519 - DNA, 216 bp, Homo sapiens
agggcctggggccgtttggctgccctaactttggtagctcagtgtgcatctaaagtgggcctggggaaggaactaaacttgggctgggctgcttggggcttggcataaggtggaaaaggctaccctggggctctgacccccctgtagtatgtgtggagggggcccccccgtttcccccaacttttgctataacaataaactgtaaaggaattttga

SEQ ID NO: 680520 - DNA, 1254 bp, Homo sapiens
agcggggccaaggcccgggcattttgctgcgtcaccagccgccgccggctcaccaccctcgtttgacgcacgcacgttcattctcctgtgctctgcgccacttttcctacacatttcctcttctccccgactggaggagccagtctttcctgtgctggtgcattcttggggcccgaggtcagaagccctgcctgatgacacgcgttcggccctgagaggaaagccggagaaggagggccgggaccggaggagaaaaaaagcgtgaggtcagcgcaccctggaagaacgaaaagtcgaacataccccttaagcaaggacaaggcactggtccggccccaggaaagaagtggcgcccggcggcccagcgacaagatagacagcgcgactggtagcaccccacattggtgcacccaggtgtccaacacaaattgacaaaggccttgagatgtccttggcacaacacgtggagtcacacgactccgaacagcggggaacactaactggtgctttcacactttggacactttaattggtggatgtggaaagaaaccatggtgataggggaatggttgtaaacgtgtgttaacagtttattggagaaaaaagtaatcaaagaagctttatgcatttacagagtttggttcttcagggagggaaacggttgagtaaatatatgtaaacgcccagattttacaattgcaacactttgtgataccattttttacaacttggtcaattggtaatccccaacgaaatgacatctgccccaaaggccaatttcacacacgcaaaaccaggggagcagagcaggtccacaactgtgcaacatgcggatcctgccgtgcaacccgaacacaacagccgcaggaccactcctttgcggcccaagagccaatggggccccaaccagggggtataaaccaaagcagaaggcaaaacaagggaggccaacacagaacatgcattcgtcaaacaaaacacaattgcgggattgggcatgtcaaatcgacgaacgactttgattccgaccatcgtcaaccccacgagcaacactgacgacagttggtgcagcccagacacatgcaactggccagtatcgacacaaacgtcaacaagcctggaatgtgcatgggacgaccaccaccgtggcacccaggcaatacttcgggacagctaaaagagacaccaacagtgtggagcaaatccacgaccctgtggcgattatatgtcagacacaatgaccacgacacatac

SEQ ID NO: 680521 - DNA, 937 bp, Homo sapiens
  misc_feature (744)..(744): n is a, c, g, or t
tggttccagaaaagatttttggtttggttaacttaaaaatgggcagaaagtattcaagaaaaacaatgtgaactgctttagctttctggggatttttaaggatagcttttctgctgaagccaatttcaaggggaaaagttaagcactcccactttcaaaaaaaaaaaaatattaccccacacacacaaagagtgttgaggacttgatcgcttaaaaaaaatattgttttaacaaccctgacttcctgtatttatgatagatatgaccattttgggtgtgagtagatggtggcttgggaaatgacctgaagcagtatggtagatttaacagggaaaacaaaaaaccttttgggtggtactttcaggtttttcgtggtttgtgcccagctgacagtccctccttttggatgtggtctggtccttccctatgcagatgatagttggcaccccgtggatacgcttaaagtttttctccctttgtcctttattcccatttcctctttctggtcctttaattcccattttcttttttctttctcccacttccggttcttattttgtctcccatgtgaggttagtgtctcattctcttagagggagcctgccgattttctttatttcaccctacagacaggaactttcgggggcttcaggggctatagggactcctcccgattatttttggcgtgcggagccttgatccttcttaacgggcttatatttttgtacccgggttctgttagcngcgggcattattttggagtatgacgctcttggggtttgtgcttgtgacccctgttttctcctgtgtgggtaggccacagtctctttggtcttcccaggattggtccattggatatgggtgggctgtcttttcaacgctgctcgctggtggtggttgtctcccccgaagatgtttttctacttttgttgtgtgt

SEQ ID NO: 680522 - DNA, 1171 bp, Homo sapiens
ggcgcagagaaggcgggccccgtctgagtgtctggcagtcagagacatgcctggtgctgcccacggcccgagctgcccacggcagcaccatgccctgcactcctggagcgccccaagctttccaactgccatggccagtggcgctgcacctgtgcacaattatcgattgtgagcgtgggagctgcaatgctggcagtgagcgcaacgacagacggtggataacgcattgatggcacaccagacagcttgacacgcgaacgcaacaggagcagaagcgacagccaccacgcgcagcatcgacagagcagacattgtcatttacgcatgtgcacgaccaacgggaaccccacactttcctgcacacgtctggcagcggacgcacacgcctatctctgcgcctcgtagcactgaaacgcacgaaagtccaccatgcatatattcccctgccacgcctcaacaggcaacctcgtcgttaccacgtgcacgcgcaccgacaactcacccgtcgacggtcctcaaacacgcggccgccacgagcctggacctcttgcagcccacccgccgtttggtacactttccacgatccttggccgtttatcccgccatgctaggtcactgcaccctggaaggtcatgatagtccaacagaccacgggaaatactctcaaattcgcttcccattcaagggccaattctgccaagctgggtgaacgtccacccccgtgcggcatgcgaacagacacacactatatatgcacgccccaaggcgacatacgccgctttcagattgatgacaatcggcattggaaccactacaggtcacaacagaagcatagcactagcattgtatgagggaaccgctacacgcgacagggactggtgcacttgtaccgggcaagctctccggggaccctacgcttacgcgcgtgtgtggggcacttatcccactgaccaacggagcattggccgctcatgttacggcctacagtggtgggaacaccagcgcatacaccgacttgtaacgttggtctacacaagctgtgtcatccactgacgtgttgccatgatccgcctggagcatgcgtgtggtcaccgtttagtttgtgtgacaactcggacattcgtggtagcagcctccaagaccttccaaccttcattggtgttacgccaat

SEQ ID NO: 680523 - DNA, 392 bp, Homo sapiens
ggtgtacggacggggagtgatagcggtcgctggggtgtactacggagcggggagttaaaatgggtgcgggtgtgacataaggtcggcatgagaagcagggtgccattctgttgcatcttcacctgtctggaacctcaacaatggtctggtatctttaacaagtttagaacacagtccagtggcttcgcccaatgccagaagccattctgtcagacttctctagaggaggtagtaaaaccagcctgcagttttttattaccggaactcaccatatgatatatacagatgtgatggtgaggcatgtcacctccacagagacaggagaagacagtcacaaggagcagctctaatcccttaggatctgcatgaagcccaggatgtcggaaagggag

SEQ ID NO: 680524 - DNA, 442 bp, Homo sapiens
cccaaaatacctgcccatttgtcaggacacccagccccccagtgttatattttgcctccccggagggggggttcccgggggcactttccgaccagccccttgggtccccaggtttgaagctttcccctgggcccctaaccatcctggcccggggtgcctgtttgacccccgggcctagttggggctttccattttgtttcccccccgggtccccaatgttttcaggggggggcccccttttgggtcccctcctttgccatcacctgaagaccccccccccaaacactgaaagtcccctgggcctgccgccttggtcccccttgggggccgtgtttgactcaactcaactcctttaacggtaaaatttccggcaaaatcccaaggttgggttttgtttttaaccttggaacgcttgcaatccccataaagccttaaaagtcca

SEQ ID NO: 680525 - DNA, 1556 bp, Homo sapiens
tgtgtccctctgccgttatttccccggggattttctgtcacacacccaccccgccgggtttatattttcagagggcgcccccccccttgttgttgttgtttgtgtctattattatcatgtaaggaaaatgcggctatatttaagaggttcccacaacgatctggtgccccggacctcataaatgttgtgacgctggtgtagtttgggggagcaaaccacccccgcgaaatttgtcgatgagaaaaacgcttatatacccgcgcgtatctcccctacagaagaagcgtgagtgtgtctaataagttagtcgcaggcgttcacaacaaatatgtgggttgggtgttatacctccttccctttataagtcgtgtggcgggggccttattattaaaattgtgtggtggagcactagcagtcgtagataggggaggtccccaaccggaattataagaggaaaacaagcgttttttcttttaatcctcgtctgtacaaccaggtgggtgtccaccaccacatgttgtcactatgaagatatttttgggtgggagaagaaaacaacaaaggtgggtggttgttttaataaaaaagagttaatatttccccctgtgtatacacgcacacgacagaagacaccacaaaagcatgaggggtgttttttgggcgcgcccgccaccactgtttctcgtgctctctagtaagagtagtgtagtataagatctggttaagaacaacattatagaaaaaagctgggtgtgtatagtatatacacgagataatagaggatatacgacgccaccccatttctaacaggggaatatataatataagtgcgcggtataaaaaaggggggggcaacaactttctttaaattatgtcggcacaacacggtgtagtcgcacacttttttttcacaacaaattgggggtgttacacagcggagagagatgaatactttatgctctgcacagtatattatgtcgtctacatatatattaaaacacatttatggagaaataaagggagaatatagttaaaaatcactcccgatagagagagataatatatagagataagcgcgcatatctctccccacatataggataaatatgtgtctcacatgtctccccctctgttatattgacacaccggaaatatagagaaatagtgtgtggcctccacagaagcgccacgtatgtatccccctcgagagcacatgaagagaaggtgtgtgtggtttgtgagagaaaccacacacggcgcttgaggaattttctaatttgcgtcttctccttctctctgtgagagcccacagagaggagagggcacaccacaaaagggggtggtggtttccacaaccccccacgcacctgaaggaaagaaacggggcttttttcactttcaacccctccctctttttccctgcccccacaggagctcgggccacactttctgggtgggggcacatgggtccccagagatgggtccaccctggagagaatagtaagaaacttcccacacccaaattttttatttaaattaatatttgtgtttccaca

SEQ ID NO: 680526 - DNA, 435 bp, Homo sapiens
  misc_feature (5)..(5): n is a, c, g, or t
  misc_feature (26)..(26): n is a, c, g, or t
  misc_feature (37)..(37): n is a, c, g, or t
  misc_feature (79)..(79): n is a, c, g, or t
  misc_feature (209)..(209): n is a, c, g, or t
  misc_feature (220)..(220): n is a, c, g, or t
aaccngctgctctcgaaatcccctgncctcatgtganacttctcgcctcggccctcgcaaacgtgctgggattaacagncgtgaagccagcatcccctggcccactaatttttataatttttaagtaagaagattgggtttcgcccacgttaacccgggcctggtcctcgaaacttctgaacctcccagtgatcccacctgccctcagncctccccaaantgctgggagcccactgtccccggccctcgtctccctactttcctttgctcccaaggtaggattagaagtagaaactggagccaggagctatagtgccagctacccgggaggctgaggtgggataattacttgaacctgagaggcagaggttgcagtgagctgagattgcgccactgtgctcccagcctgagctacagagtcaaacttctgtctca

SEQ ID NO: 680527 - DNA, 640 bp, Homo sapiens
  misc_feature (17)..(17): n is a, c, g, or t
  misc_feature (85)..(85): n is a, c, g, or t
  misc_feature (110)..(110): n is a, c, g, or t
  misc_feature (127)..(127): n is a, c, g, or t
  misc_feature (138)..(138): n is a, c, g, or t
  misc_feature (149)..(149): n is a, c, g, or t
  misc_feature (156)..(156): n is a, c, g, or t
  misc_feature (169)..(170): n is a, c, g, or t
  misc_feature (172)..(172): n is a, c, g, or t
  misc_feature (223)..(223): n is a, c, g, or t
  misc_feature (335)..(335): n is a, c, g, or t
  misc_feature (350)..(350): n is a, c, g, or t
  misc_feature (504)..(504): n is a, c, g, or t
  misc_feature (538)..(538): n is a, c, g, or t
  misc_feature (542)..(542): n is a, c, g, or t
  misc_feature (569)..(569): n is a, c, g, or t
  misc_feature (629)..(629): n is a, c, g, or t
gctcgcaaaagagtgtngctcctctctgctggcaggtggtctctgttgctttcagtggagatggtactcctctctgtagctggtnaccccaccgtctccagctatcagcngagagggtactgctctntgcagctggtnatcctgtcccntcgtttntaccatctttatnntntggttattttctgcgcctgctctggctgagcccagggtttttatggacctnagcggcggaagaagctgctgctgctgcattgcgcgccattggcaggcccagaaaaggctccacgagtttccactctggttagaggcgcctggcagcccagcccccagaattnaggccctccctggcntgagggtggggccttactggcggcccccacccccttcctcctgctgccatttatggctgcaggtcttggctccgcctcccctccaagattagcgcagttgctggcgtggcgagaggccaggcagtggaagcagacacccctgcgcttgcagggntggagggtgaagggggctgtccttcctgggatgnccgntggtgcaggctacagagatgccctcgncctgtgcctgggggggcagccacagctgcacctggcgagctcccaccccgccaacttggnagaggcagggc

SEQ ID NO: 680528 - DNA, 217 bp, Homo sapiens
  misc_feature (2)..(2): n is a, c, g, or t
gntgcctgagagcaggtgaggaagaccttaccccgaagcttggcagtggcttcctcaggccatggcatgggggaggcctctgctcgctggcctagggggcagagctctcaagaggtccggtcagggttgtgattttccattctgaagtcaggaaggcccccactagtcctagcctctggtggctcctcagtgctctgtacagccctgctcacttggg

SEQ ID NO: 680529 - DNA, 932 bp, Homo sapiens
accggcggcgggacaggcttgctgttcctcctcctcggctcaccagacggggtttcactgtgtcagaccaggatggacttgatctctcgacctcgtgatccacccgcctcggctcccaaagtgctgggactacaggcgtgagccaccacaccaggcctactgtttcgattttaagaatgaagaaatttcgctctcagagactgaatccctcaagccaaggcttaacagctaacatcgtgcgcacctggacattcacagtcctacagcctacagctctcgaatacctatctgacaatgaccaagttggtaacgtctgcggctctcccaaagccaggatacatacagaacctgaggccctttcctaagcttcagatgctgctagctagcattccagaccccaaccttgcacacaacatgggttcgaccctcaccccagcgtaactggcctgatgaccgctatccatgcgcttcgcctccctactgccacaagtcattctcttcaccaaactgcatcgctcatgacactactagcacacctgacattactactagcactctgaccacgaaaggcttttctgccaactatcccacaacacctgctcgtaccattttcgccacaacagagcaccactgcccaaggcaagtatcttcgcaaccagatgaccgactacaacgtgtacgcccggcagcaggagaatcttacgcccggacagcagcattcgaaaacctcctgtccttcccttgccgtgccctccactcgcggactcctgaaccactcttaccgtccatgcccgccgccctcccagatcaaaacctacatattgcctcttatttatcaccgcctcacctctccacacactccttttacaccctattatcacactcttcccctcccatccaccctcaaccaccacttcgcccctaatcgactc

SEQ ID NO: 680530 - DNA, 346 bp, Homo sapiens
gctcgacggtcaaatgaatagttaaaaatacaaattgaggccaggcatggtggctcatgcctgtaatcccagccagcactttgggagtctgaggcaggcggatcacttgagctcaggagtttgacaccagtctgggcaacatgacaaaacactgtctctactaaaaatacaaaaattaacctggcctggtggcgtgtgcctgtggtcccagctacttgggaggctgaggtgggaggattgctggagcccccgaggcggaggttgcagtgagccgaggtcgcacctctgcattccagcctggttgacagagtgagaccccatctaaaaaaagaaaaaaaagtcgacg

SEQ ID NO: 680531 - DNA, 1886 bp, Homo sapiens
gcgtgacgcgtgggtctgacccacgcgtctgagctgggcatgatgatggccatggtagcacactgcgaggtggcagctgggtgtgcttgggatgaatgcctgtgggatgtgaatgtgcccatgcatgtgtttttaacccatgctccccatgcccatgtccttcatgaatatggactgatgatgatgtggctgtggatgaatgcaatgcccgtggagaaatgtgtgtggtgatgacacatgggctcacatgacatgatggcctgtggcttgcacctgtggatcctcaacgatgcttacgggggggtgggcccaccaaaaggtggggctggcaaacggctggatttgggcgggggaaagaacccaaaaaaaacccgggctggggacctccccaaaaaaccccaaccccccccggcttttatggccgcgactttataacgcggtcattacacgtggtgcgcgtgcgtgggcaaagtcccacacttgcatctgcccggactttatttttagctggtgagcatatgaggcagcaaaaagactacacactgctgggctggggcgctcgaacaacacctcacgaggtggcaggcgcagacacacctgttctgcgaaaacatgtgtggtggagcgaacaagaagaccagatagaggtgaggcagagactaaaaagaaaaatgcatcccgaaaatggaagatcagtgtcgctgtggggatttattcacatttagggcagacgatggacaaacacaggtagaggaagagaggaatcttgtggggtgaggggtggtgtggaaaaatataacagtcgactgcgatattttaattacctattatctggtgcaggggaaagaagacgtggtatgaggggaggtagatagattatataaaatgaacgacggacgcccacgctaatcgtccacctcccacaatcgtcgccacctctaagacaagagcactttatgaggagtcgcaaaaaaccaatcggaccggagcggagggagacgcgagcaaggatggatgtaaatattgatatataatacgacgacatcctacttagctcagtcacagataacttactgggcagagcactattagggggacatgatgggacacccaccgccgcaccagccacccaccgatgatcaacgatcttttatttccacacgacacaaacaagcatgaatactcaacacgacaacgaaccgaagcacgcacgtggaaccgaagagagtctggacggaacgctcgatcgcgtgtggcagcagaacaggagcgggcggggagggggcacggacgaaccacggaggacgacaacgcaaacacagcaccacacacgaacccccgagacacgacgggcgtcggagacggggggcagcgcaggacacgaagacaggcgcaggagcggctcgagcacgataccggcaggcaagcacgagcagacgaaacaagcacaacagcacgcgaccgcagcacagcacgagacaaccaaaagcagccgcagaggagcagacaagcgacaacaccacacacaacaacaagaccaaaacaaaaaagacagaagcagcacaacacaacgtaatccacctgagatgagtaggagggaggcgaggagggggggcggggtagcggtgaggagaaggatgcggagtcagcagactagcgactgtgaatatttagtacaggatactacgagagaggaagtaagatagaggagagagagtaggcgacagtaagagacagtagtggaggctgcgtaggcgagtcgcacggacgtggaggggtagctctgcccagcagactttttttctcccgttttttttcccaccacaacaccaacacaccaccctcagaccactacagtctgagactcgtgttttgtattcaggccg

SEQ ID NO: 680532 - DNA, 363 bp, Homo sapiens
gaaggggcaggtggctcgctcatcatatggcacaggatgctctcacggggtccaggaccagtgtagtacatgactgagtatcctcaacccagaatcgtatctccccagaaagctatcacatacacaacgacattcaggtacacttaaatcccatttcagtttaagcctagcccctaatttttcttatgatatactatatactattcctttttcgaatatgccttataaatggatatatatattttgggttcaagtgattctcctgcctcagcctcccaagtagctgggactacaggcagatgtcaccacgcctagctaatactcgtatacacagtaaagatgaggtttcaccatgttggccag

SEQ ID NO: 680533 - DNA, 3547 bp, Homo sapiens
gctttcttttctccagaggagccaggaagagagctgtgaccagcagcgtcccttattcgcttggccttggttcctgtttgcactggctacagcagggcactggcccctactgtcaccgccacctacacaaagaccctatctctgagcgctgcagcctactgttcagccccaggtttgaggatggatgccctggacgcttcgaagctactggatgaggagctgtattcaagacagctgtatgtgctgggctcacctgccatgcagaggattcagggagccagggtcctggtgtcaggcctgcagggcctgggggccgaggtggccaagaacttggttctgatgggtgtgggcagcctcactctgcatgatccccaccccacctgctggtccgacctggctgcccagtttctcctctcagagcaggacttggaaaggagcagagccgaggcctctcaagagctcttggctcagctcaacagagctgtccaggtcgtcgtgcacacgggtgacatcactgaggacctgctgttggacttccaggtggtggtgctgactgctgcaaagctggaggagcagctgaaggtgggcaccttgtgtcataagcatggagtttgctttctggcggctgacacccggggcctcgtggggcagttgttctgtgactttggtgaggacttcactgtgcaggaccccacagaggcagaacccctgacagctgccatccagcacatctcccagggctcccctggcattctcactctgaggaaaggggccaatacccactacttccgtgatggagacttggtgactttctcgggaattgagggaatggttgagctcaacgactgtgatccccggtctatccacgtgcgggaggatgggtccctggagattggagacacaacaactttctctcggtacttgcgtggtggggctatcactgaagtcaagagacccaagactgtgagacataagtccctggacacagccctgctccagccccatgtggtggcccagagctcccaggaagttcaccatgcccactgcctgcatcaggccttctgtgcactgcacaagttccagcacctccatggccggccaccccagccctgggatcctgttgatgcagagactgtggtgggcctggcccgggacctggaaccactgaagcggacagaggaagagccactggaagagccactggatgaggccctagtgcggacagtcgccctaagcagtgcaggtgtcttgagccctatggtggccatgctgggtgcagtagctgcccaggaagtgctgaaggcaatctccaggaagttcatgcctctggaccagtggctttactttgatgccctcgattgtcttccggaagatggggagctccttcccagtcctgaggactgtgccctgagaggcagccgctatgatgggcaaattgcagtgtttggggctggttttcaggagaaactgagacgccagcactacctcctggtgggcgctggtgccattggttgtgagctgctcaaagtctttgccctagtgggactgggggccgggaacagcgggggcttgactgttgttgacatggaccacatagagcgctccaatctcagccgtcagttcctcttcaggtcccaggacgttggtagacccaaggcagaggtggctgcagcagctgcccggggcctgaacccagacttacaggtgatcccgctcacctacccactggatcccaccacagagcacatctatggggataactttttctcccgtgtggatggtgtggctgctgccctggacagtttccaggcccggcgctatgtggctgctcgttgcacccactatctgaagccactgctggaggcaggcacatcgggcacctggggcagtgctacagtattcatgccacatgtgactgaggcctacagagcccctgcctcagctgcagcttctgaggatgccccctaccctgtctgtaccgtgcggtacttccctagcacagccgagcacaccctgcagtgggcccggcatgagtttgaagaactcttccgactgtctgcagagaccatcaaccaccaccaacaggcacacacttccctggcagacatggatgagccacagacactcaccttactgaagccagtgcttggggtcctgagagtgcgtccacagaactggcaagactgtgtggcgtgggctcttggccactggaaactctgctttcattatggcatcaaacagctgctgaggcacttcccacctaataaagtgcttgaggatggaactcccttctggtcaggtcccaaacagtgtccccagcccttggagtttgacaccaaccaagacacacacctcctctacgtactggcagctgccaacctgtatgcccagatgcatgggctgcctggctcacaggactggactgcactcagggagctgctgaagctgctgccacagcctgacccccaacagatggcccccatctttgctagtaatctagagctggcttcggcttctgctgagtttggccctgagcagcagaaggaactgaacaaagccctggaagtctggagtgtgggccctcccctgaagcctctgatgtttgagaaggatgatgacagcaacttccatgtggactttgtggtagcggcagctagcctgagatgtcagaactacgggattccaccggtcaaccgtgcccagagcaagcgaattgtgggccagattatcccagccattgccaccactacagcagctgtggcaggcctgttgggcctggagctgtataaggtggtgagtgggccacggcctcgtagtgcctttcgccacagctacctacatctggctgaaaactacctcatccgctatatgccttttgccccagccatccagacgttccatcacctgaagtggacctcttgggaccgtctgaaggtaccagctgggcagcctgagaggaccctggagtcgctgctggctcatcttcaggagcagcacgggttgagggtgaggatcctgctgcacggctcagccctgctctatgcggccggatggtcacctgaaaagcaggcccagcacctgcccctcagggtgacagaactggttcagcagctgacaggccaggcacctgctcctgggcagcgggtgttggtgctagagctgagctgtgagggtgtccccagcccttggagtttgacaccaaccaagacacacacctcctctacgtactggcagctgccaacctgtatgcccagatgcatgggctgcctggctcacaggactggactgcactcagggagctgctgaagctgctgccacagcctgacccccgaggtggccaagaacttggttctgatgggtgtgggcagcctcactctgcatgatccccaccccacctgctggtccgacctggctgcccagtttctcctctcagagcaggacttggaaaggagcagagccgaggcctcccaagagctcttggctcagctcaacagagctgtccaggtcgtcgtgcacacgggtgacatcactgaggacctgctgttgg

SEQ ID NO: 680534 - DNA, 759 bp, Homo sapiens
agctttatcagaggctgcaggggccctgctctgggtttcctcaggaagcaccaccccctcatcccccactctcacaactggcccatgtgatggatcgtctgtttccctgtgcgggccccatagccccatttcctgtgctggccccggcctggacggggagggggctgagactctgggcccagatcccacctcccccccaccccccaccccctggctcctgtttcctgctagtccagctcttcccctaggaaaggctgctggtaactgggatgggggttggggggaggtaagaagtctctgactcctcctctacctcatcccagttccatcacctgaagtggacctcttgggaccgtctgaaggtaccagctgggcagcctgagaggaccctggagtcgctgctggctcatcttcaggagcagcacgggttgagggtgaggatcctgctgcacggctcagccctgctctatgcggccggatggtcacctgaaaagcaggcccagcacctgcccctcagggtgacagaactggttcagcagctgacaggccaggcacctgctcctgggcagcgggtgttggtgctagagctgagctgtgagggtgacgacgaggacactgccttcccacctctgcactatgagctgtgacaaggcagccaccctgtcacctagctcaatggagccccggatcccaagccctgcattgtaagcccacagtaggcactcaataaatgcttgttaaaggaaggcaaaaaaaaaa

SEQ ID NO: 680535 - DNA, 419 bp, Homo sapiens
  misc_feature (148)..(149): n is a, c, g, or t
acagagtctcgctctctcgccaggctggaatgcagtggcgcaatctgcaaaccttccaccttccggattcaagggattctcctgcctcagcctcctgagtagcctggcttttgccttctttttgaaagtacgtatgaggccgggtgcnngtgtcacgcctgtaatcccagcaccttgggaggccaaggtgggcagatcacctgagttcagaagttcaagaccagcctggccaacgtgttgaaaccacatctcttctaggagtacaaaaattagccgggcatggtggcgcatgcctgtagtcccagctgctcgggaggctaaggcaggagaatcacttgaacccaggaggtggaggttgcagtgagcggagattgcgccactgtactccagcctgggtgagagagtgagacgccacctca

SEQ ID NO: 680536 - DNA, 185 bp, Homo sapiens
gggagtacggaatatgttgtagctttgaaggtccactcttggtttttcttcattccttgcaattaaagctgattccattatggaagcatcaatctgtggacaatagcttcttttttttttttcccaaagcagaaaatccagattctgtcgttcaaattcccacgggaaaagtggtggccctcaaa

SEQ ID NO: 680537 - DNA, 131 bp, Homo sapiens
ctgagacttttcctgtacaagaacttctgaatttagaacagtcttttcttgtttaactttatttacttcttcaattacattctacgagatttgctcttgagattttccagactcaatggactacaatcttc

SEQ ID NO: 680538 - DNA, 198 bp, Homo sapiens
taggatgcgaggtgatctagaggatcccacggggaaacaatcacttagcggggacatcacttagcggggaacaatcacttagcggggaacaatcactttggctaggcaacctagcaaaagtgaacaaataggattacatgaagtgaaaaagcttatgtacagcaaaggaaacaatcaacaaagtgatggttccccgcg

SEQ ID NO: 680539 - DNA, 99 bp, Homo sapiens
ctccattaacgttctctgaatctctctgtcagctgaagtaccctcagaaaaccgacgaccaccaatagcatctatttcatccataaacatgatgcatgg

SEQ ID NO: 680540 - DNA, 127 bp, Homo sapiens
cagactttgtagaatcggggttcctctttctctctgccaggccccatcagagtcacagcttttggaggggttcacagatcctggcagcagctccagtcaagatgtcactggttggcatgatattctt

SEQ ID NO: 680541 - DNA, 320 bp, Homo sapiens
  misc_feature (82)..(82): n is a, c, g, or t
  misc_feature (114)..(114): n is a, c, g, or t
  misc_feature (120)..(120): n is a, c, g, or t
  misc_feature (123)..(123): n is a, c, g, or t
  misc_feature (129)..(129): n is a, c, g, or t
  misc_feature (136)..(136): n is a, c, g, or t
  misc_feature (144)..(144): n is a, c, g, or t
  misc_feature (149)..(149): n is a, c, g, or t
  misc_feature (154)..(154): n is a, c, g, or t
  misc_feature (164)..(164): n is a, c, g, or t
  misc_feature (167)..(167): n is a, c, g, or t
  misc_feature (189)..(189): n is a, c, g, or t
  misc_feature (193)..(193): n is a, c, g, or t
  misc_feature (258)..(258): n is a, c, g, or t
  misc_feature (274)..(274): n is a, c, g, or t
  misc_feature (307)..(307): n is a, c, g, or t
  misc_feature (310)..(310): n is a, c, g, or t
  misc_feature (313)..(313): n is a, c, g, or t
ttttgattccttttggggtgaagcagaccaagttccccccaggccccccagttgtgggggagcctgtattttttttaaaaanatccccatccccctggtcctcccccttcccanggtgcnaanttttanccccaanagtgactntgggnttgtntgtttagttntgngtataaatggaatgttgtgganatgncccccccctgtgccgggtggttcctttcccttttcccctggtcccggctactcatggaagcaggnccagtaagggcccttngattaaaaaaaaaaaagacaataataaaaaggntcnttnatgggga

SEQ ID NO: 680542 - DNA, 295 bp, Homo sapiens
gaactcaaggtacactatttccatgagctgctccttaaaaaaaggcaacaggagcaaaggcttcatgtaatatagcccctcgaacaagttccctgtattaacgcatcggggctctgagaagacactgctctacagagatctggatagttgagcttagcacatttccctatcagtgagccgcagaaatacctcttcacgttccagagagtgggggttccaagcaactaacataccttctaggcttccacttgaaatctagcgagagcgctgtaggcgcgaagcggagatgactcta

SEQ ID NO: 680543 - DNA, 969 bp, Homo sapiens
gcgcgatatgctgcggtacctgtcagacggcagactacgccatccgtcgagtgagatcgtcgctgaaccgtggccatccatggtccgagaagtactgacctgtgagactacaagctggtatcgtgtgacaccactcctcaatcgctcatcaggcattgcgtggacgaacatacgtgagatgaggaaggttgtggtatgcgatgatgcgtactagaatcagtcactcaaacgtggatgaacgatctgagggtcatatgtccctggccaaaggaccgctcatttgagcgcgacttccgatggcccactgtcctgatcgacgaatgaacatggttgagaggttgggctggcgtactctctcttgaggcgagtcctgggtaggcctgcctttgctggggactccccgcgacgtccagtccacccacatgtgcaggttcatcccctgcgtccggcttccgagtttccgaatctcgtgtcccgtccgttgcgcgcgaccgccggtgtggcgcgtgcgtcgtcttgtcaccaccctttacaagtgcaccgttttcgaattcacagcacctgcttgtgcgcctcgaatgggacccggaggcgacgcaggcgcatctcacgcggcacgggtcgctggcgtggcccggaggcgtccacgagcctgtcgtcaaattgcttgaacgcttggaggtctgcggagcctaagcgtaggccgatggtagggtaccgtgcaaaccctcagtggttcaggtggcaccatgacaaccgaacgatcccgtgggacccagctgggttgcaatggagaagaggaagaattgccacggcaccccttttgcccccggaaagccggctgacggctctgatcccaagtccccttggcaccaaattgcttggaaaaccggcaaaggtgaaacgggggccacgcgtgggccagagccagagcgccccctggaacgaaatggcctgggaaggggaacc

SEQ ID NO: 680544 - DNA, 255 bp, Homo sapiens
tggagagcatactcactgccaccacccgcaggaagctttcccacagctatggagcagtgcgctacgctcatgcatgtcccagggaacgcccgcgcagatgagcttcttgtgagctcagaggccttcgtgctgctagacggacatgagctgacgcgtcgttggacccaaggcagcccatgtcctgagaaaacccatcttcggccgctacaaaccagacaccttggctgtagccgttgaaaacggaactggcaccga

SEQ ID NO: 680545 - DNA, 901 bp, Homo sapiens
  misc_feature (27)..(27): n is a, c, g, or t
  misc_feature (261)..(261): n is a, c, g, or t
  misc_feature (351)..(351): n is a, c, g, or t
  misc_feature (396)..(396): n is a, c, g, or t
  misc_feature (436)..(436): n is a, c, g, or t
  misc_feature (438)..(438): n is a, c, g, or t
  misc_feature (456)..(456): n is a, c, g, or t
  misc_feature (527)..(527): n is a, c, g, or t
  misc_feature (574)..(574): n is a, c, g, or t
  misc_feature (754)..(754): n is a, c, g, or t
cctggccctctccctgaatggagtagngctcctgcacctcaacaatgtcagcactggctgcatcctgctgggcggactcttaatctacgatgcctgctgggagtgtggcaccaatgtgatggtgacagtggccaagtccttcgaggcaccaataaaattggtgtttcccccaggatctgctggagaaaggcctcgaagcaaacaactttgccatgctgggacttggagatgtcgtcattccagggatcttcattgcctggnctctgcgctttgacatcagcttgaagaagaatacccacacctacttctacaccagctttgcagcctacatcttcggcctgggccttaccntcttcatcatgcacatcttcaagcatgctcagcctgccctcctantacctggtccccgcctgcatcggttttcctgtcctggtgncnctggccaagggagaagtnacagagatgttcagttatgaggagtcaaatcctaaggatccagcggcagtgacagaatccaaagagggaanagaggcatcagcatcgaaggggctggagaagaaagagaaatgatgcngctggtgcccgagcctctcagggccagaccagacagatcgggggctgggcccacacaggcgtgcaccggtagagggcacaggaggccaagggcagctccaggacagggcagggggcagcaggatacctccagccaggcctttgtggcctctgtttccttctcccttttttggccctcctntgctcctccccacaccctgcaggcaaaagaaacccccagcttcccccctccccgggagccaggtgggaaaagtgggtgtgatttttagattttgtattgtggactgattttgcctcccattaaaaactcatcccatggcaaaaaaaa

SEQ ID NO: 680546 - DNA, 1104 bp, Homo sapiens
  misc_feature (27)..(27): n is a, c, g, or t
  misc_feature (261)..(261): n is a, c, g, or t
  misc_feature (351)..(351): n is a, c, g, or t
  misc_feature (396)..(396): n is a, c, g, or t
  misc_feature (436)..(436): n is a, c, g, or t
  misc_feature (438)..(438): n is a, c, g, or t
  misc_feature (456)..(456): n is a, c, g, or t
  misc_feature (730)..(730): n is a, c, g, or t
  misc_feature (777)..(777): n is a, c, g, or t
  misc_feature (957)..(957): n is a, c, g, or t
cctggccctctccctgaatggagtagngctcctgcacctcaacaatgtcagcactggctgcatcctgctgggcggactcttaatctacgatgcctgctgggagtgtggcaccaatgtgatggtgacagtggccaagtccttcgaggcaccaataaaattggtgtttcccccaggatctgctggagaaaggcctcgaagcaaacaactttgccatgctgggacttggagatgtcgtcattccagggatcttcattgcctggnctctgcgctttgacatcagcttgaagaagaatacccacacctacttctacaccagctttgcagcctacatcttcggcctgggccttaccntcttcatcatgcacatcttcaagcatgctcagcctgccctcctantacctggtccccgcctgcatcggttttcctgtcctggtgncnctggccaagggagaagtnacagagatgttcagctacgagtcctcggcggaaatcctgcctcataccccgaggctcacccacttccccacagtctcgggctccccagccagcctggccgactccatgcagcagaagctagctggccctcgccgccggcgcccgcagaatcccagcgccatgtaatgcccagcgggtgcccacctgcccgcttccccccactgccccggggcccaagttatgaggagtcaaatcctaaggatccagcggcagtgacagaatccaaagagggaanagaggcatcagcatcgaaggggctggagaagaaagagaaatgatgcngctggtgcccgagcctctcagggccagaccagacagatcgggggctgggcccacacaggcgtgcaccggtagagggcacaggaggccaagggcagctccaggacagggcagggggcagcaggatacctccagccaggcctttgtggcctctgtttccttctcccttttttggccctcctntgctcctccccacaccctgcaggcaaaagaaacccccagcttcccccctccccgggagccaggtgggaaaagtgggtgtgatttttagattttgtattgtggactgattttgcctcccattaaaaactcatcccatggcaaaaaaaa

SEQ ID NO: 680547 - DNA, 771 bp, Homo sapiens
aggaccgtacacccggttctaccgacgaagcggctgggtggcagaccttcggaccgcggggctgttcatcccctcgccctccccgcggaccttgcccttttctccctccctgccccctctcacgtcaccctccgggccttctgcccctgctcgcttggttttccttgacgtcgcctgctgctgtcgtcggacggcccactgcctggacgggctgacttttcgacgacgccgacctgacgacggttcaccgacccccttccccaccactacgggtgctgacttacaacttccacccacgacggaccgacccggacgacgtcttcggcacgacactgacacctgactgacaccgcttctgcggttacgactctgtagcctttggactgcacccaccgtactgtagacttacgtcccggacttaccttacgtaccacggacctaccttttcacacggttcacttccccacacacgtacttcgggttttccgcccgttcaccccgtaccacaacgcttttacttaaccctttgacgcttgtactcacctgggcgactaccctgtattagctcggaccacacctcttacctataccttgttggacacaccccgctgctggccccacacgaacggaccccacttttcaacgacggcaacccaccccttttgggacacaccacttttccacccccaccttatggcgacggacccgctttttaccagacctccacgggacccacacggcacccgaccccgacctgcttttcaccccacc

SEQ ID NO: 680548 - DNA, 281 bp, Homo sapiens
caggatccttactcgagtccgctgatccagcaagggcactcgaatggtgtcactcagggtgtaccagagaaaatgaagactgactcccagcaccttcattcataacagcccaacactaggaactacccaaatgtcctgtaatggtgaatggttaaagaacctatgggacatccataccatggaatacgatccagccataaaatggaacaaaccttcactcaggcaacaacttggaagaacctcaaggaaattatgctgagtgaaaaaaaaaaaaggccagt

SEQ ID NO: 680549 - DNA, 494 bp, Homo sapiens
agcaggagcagctagtggtggcagcagccacagagaggagggagccaccaaaggcggatggatcaccaggaaggaccgttgacctcttcagcacgtggggaaggtgtaatccgtctccccagacaagggcccggctccgttggtccccgttgatgatagaatggggtactgatgcaacagttgggtagccaatctgcagacagacactggcaacattgcggacacccctcccaggaagcgagaatgcagagtttcctctgtgatatcaagcacttcaagggttgtagatgctgccattgtcgaacacctgctggatgacccgccccaaggagacagggggagatgttgagcatgttcagcagcgtggcttcgctggctcccactattgtctcccagtcttgatcagctgcacatcactcaggatttaaatggtgcccctggggattttagtggtgatacctaaagcctgcaaaaaggaggcttctcgggcccga

SEQ ID NO: 680550 - DNA, 865 bp, Homo sapiens
cgtgagcattggccacaggtgcagccatatgtcgaacttgattgcaatgccttcttcgaagacatcatggatcggctccgtcgaacccccactttaaacatccagcagctcatggagctggtgagacgctgtgactgtgcatgagaaacccagttcatggtgtaggagcctgctgttgcgcagcctctgtctagatgggggcactccgtgtggggtctgtgctctgggtgcctgagacttggactggtgcccatatcgacatgagaagatcgacgcataaagacacgagggtttggagtctcctcaacagtgctataagaggaagtgacctcacagaccagctcagagatgttaccaagaatatcacagcccccagaggtacgggatgacaagcagcatgtcttgttctgtctcagctcctgtcaaggatctgcggggtgggccctctgctatagctgctctctgtcactggccccttggagtgggagcagcgtccttagtcactgcaggcccaggcgggcaggtggtcccaggacagaggtggggaagttgtcctgaggaagcagaagctaggctgtgctcccgcccgaacccaagggcctccagtggaccagcattcaagatgtgagtgcccgtggtgtgtaaggcactcccatggcaccagtatttattgactgatctgatgaaggcttacctgaccctgcccaggaagagttcactggtcgctctgttgtgccccacagcactttgttatacctctgccacacacttacgcagcgcgttgtaactcatgtgtttacatgtctggtccccccagactgtgagctccttgagggcaggataactacattgtccagctctgtgt

SEQ ID NO: 680551 - DNA, 87 bp, Homo sapiens
aagacagcagcatatatctctgcagctccacctacccccttcatccggatacgcagtattttggcccaggcacccggctgacagtgc

SEQ ID NO: 680552 - DNA, 426 bp, Homo sapiens
tccgtgtgttatcacccaatgcatcaactgacaccaccgcgtacgcgaccagccgctcccacatttttgatcggcgtatcccctgatcaggcgtgttgtttgcggtactcacccggcgcaatgccgaaccgtgacttgaacgccgtcgaaaaataactcgaatccgaaaacccccacgagtaccccaacaccgaaagcttctcctccaccctggattggcgcagggattcagcacacaaatccagacgccggttcttgatgtaccgcgccaccaccaggcccttgcggccaaaggatccggtacagcccgcgcaccgacattcccacctcccgcgccacacatctcggggcacagatccttacgaagcgaaataatgctggtcaatgcactccaggcgtcttgcggaaacactcgctcatgggcgt

SEQ ID NO: 680553 - DNA, 100 bp, Homo sapiens
ctgagctcagtgatctcgattggatcttaactattttaaaaaatgcactgagttgggttaaaaacaaacaacaaaatggatttcaacacagctctaaagc

SEQ ID NO: 680554 - DNA, 126 bp, Homo sapiens
tccttctttattgatgggggttggttctaggacccagtagataaaaaaatccttaaatgttcaagtctctcatataaaatggcatattatttgcacataacccatatgtatcactcatataccacc

SEQ ID NO: 680555 - DNA, 575 bp, Homo sapiens
aactggtctattcttaatcttgaactacactggaattaacccccactgaataagatgagactgcgctgccgtgcgaaccatgtgactttgtcacagcccagaatattgagtgggttcgagacatgtaatcatgatgatggaggtttgaagacccctcattaggattgaatgaattccaaattttgtttggttgcttttgaatattggaacggccatgcacttacacttgtggcgccatgtgggtgtgtgatgatggcaacatgggcattgtgggggtggtgtgagcgggcgggggaggggggggggatggggggcgggtgcgggctgggggcgtggacaagttgtcttgatacggttcgcgcttgacacctgggcggttcacaacgttccttttatccctaccttctccgtgcggtcaggcattctgcctctttttctatctaactttttcatctagttatgccccgcattcgaaccgcttctagtctttctcatctatactattgttttacttcaccttacttattgaggtgctccgcattattgaggcccgccgcgctttttcggatagcacg

SEQ ID NO: 680556 - DNA, 859 bp, Homo sapiens
gggcagtccccgggggccgtgcgcccggcccaggctcggaggtccatgcccagcggcggctcaggctgccgcgccgtggctcccagacctcagttgtccccgattggtaagagcgattgacggtggttgcggacggcgttctgcgagagcagagccattgaggctccagacgtcgtgccgcgggtaccggcagcactcgcacctaccgccgaagggagggctgggacgctggatctcgcgaccgttgccccagaggtcgagtggaccagtgtcgagggctggtggcgtgcaagcgcaggcaaggaagcggccagcacgatggtgcatgctgatggtcctgggtgccgttcgaatcatctgtactgttgacacaagatgtttattttggaaacgtgcttcggagattgtcatcttgtgtgcacgaattgcaagaacgacgataagcggctgctgccagggacgagccgggccgaggcggatgggcgtcatcgcgttgccatggggtaagttccgcgtggggaccaggacgccctcggcgttgacggggctctcaccggggcaaggcaaacgggtacccgggcgagctctgcgctcgcccgggcgcaccactaggggcgcacggaagggggcccaacaggggtgggaggaaaccggcgccctgggggcgggggctaagcgccagaggcgtacgccgtacggacaacacgagcaaaggcgccccggttgccataggaacaaatgcccagtgcagaagcaaacgcccgtggcggcccctggggagaagcttggaccttaggcctcaatccgggccattccgaaagaggttcacaaggggacccatggaaggccaggttaccaa

SEQ ID NO: 680557 - DNA, 123 bp, Homo sapiens
caaagttccccgcgtgctgcaacagaaggcgggctcaagccgctgaccaccaacgcctggggcatggcctatggggcggcgatgctggcgacctattgcgcactacgtgttattcccttcgag

SEQ ID NO: 680558 - DNA, 268 bp, Homo sapiens
taaaatatctcatgaggaaggaaaagatgaacaggttgctaaaacatgagggaggttcagatgaagcttcttcatggagtaaaaaaggtatttaaaagaaaatggagagaaaggactacagagccccgcaattaataccaagtagaagggcaaggcttttagcattaaaatggaaggtgacttacaccagcttaaacgtttacgtttaaaacgtggtacggtgattaaacataacttggacacggcgactctctttaaacaacgacga

SEQ ID NO: 680559 - DNA, 423 bp, Homo sapiens
  misc_feature (423)..(423): n is a, c, g, or t
aatggtataatatctatggagtgtgcgctatatgcagagtgaacgtggagccccagctgccaagtgaaagttgccaccatgggtgataactctcgctcttattctcatttccatactttgtggaactgcagtcaaccaaagatggcatgatttagctgcgcagatttggatgcatatgagcttatagtgctggatatgttatatggtacaactaatgctagacatacagtttatgtatacagatgattctgatgtaaccatgaaagctggcatgactagattagacatgtttcagggtcattatactgtataatggcatggttcctgtgatggcatgtatttgcacatattatgggattgtgaccttcttggaagtaaggaatagactgtttaagcacgttccttttgcggccctattcgtcn

SEQ ID NO: 680560 - DNA, 151 bp, Homo sapiens
tcacttaaaagccagagtgcccgtcatgatttgcgggccggctcttgaaccacttctggctgccccacaattctgtactttgagtatcccagtcattgtttttcgagacaaacatttcaataattctaatttgggcacctccagggttggc

SEQ ID NO: 680561 - DNA, 689 bp, Homo sapiens
gattcgagacagaatttatgtattgaagcacagctaaaggacgctggatgcctacacaaatcaatgataggtatactgggcggtggcttcacaccaactagaaaggagaaacatgtgtagaagcgacttagatcgtaatcggacaacataatattctaatggttgagatgagatgctataaaaggtgatgtacctagcctaacgcgatttgacagagctccagaacttttgttccctcctagtcagagcaggaatgcgtatcgataacggggcagagctattatgcacaggctgttcaatgatccatataagctttccgctgatctttttgtgtgttgcgcttttgatgcacgagctaaacgagtgcgggggggttgttgaagttcactgccttctcaaaaagagagcctatatccgacctgcaaggtgatgtttggcatataactaccatggggacgttgcctcatcggcttacaattttttatattattgtagggacgggagcaaagtatttgggcccggtttgggtacaactgcacggtttgagcggatttttctggataagaaaaaaaaggtccggggccaaagcttgttagcctttgtaacaaggaattttttttgggtgtgggatgctacaaaaaaattccggcaaattttccttagggttggggggaacctttacaaaaagt

SEQ ID NO: 680562 - DNA, 462 bp, Homo sapiens
  misc_feature (281)..(281): n is a, c, g, or t
  misc_feature (300)..(300): n is a, c, g, or t
  misc_feature (417)..(417): n is a, c, g, or t
ctctctccctctcccacacctcacacacacatactcccacttgcaactattctgtttctctcctgggctcccccactttcccttccccaccccacttgtatgctctggaatctgtggagacgccagccctgcccaatcagagatgccaaaaatggggacatgacttctggacagaggacatgggccacgccccatggcatccccacccccgcccctccggacggcttacttaccttcataacggcagcttcatctttaaaccaataggaatcgcttcggtnggacggagagtgtcttgantcaggattattttacctcgggaggggagttttctggttacttttaggggaatttatttgaattggggttttgggggtttggaaatttttttttttttttaaagggaaaggaaaaagnaaaccctggggattcccatctgtttttttttttgtttggttgttt

SEQ ID NO: 680563 - DNA, 213 bp, Homo sapiens
atatgtctaatggataatgaaagtgtctgtatttagctatttaacttggttcggggttctctcttgcttacttaaggtgactgcatttccctgagatgaatgctgtgggttttggcagtctctccccaacttggcccctcccctcttagatgaaggtgcatcactaagagaacctgcaccactgtgtctcctaacacggtgtcacggtagaca

SEQ ID NO: 680564 - DNA, 651 bp, Homo sapiens
  misc_feature (167)..(167): n is a, c, g, or t
  misc_feature (170)..(170): n is a, c, g, or t
  misc_feature (249)..(249): n is a, c, g, or t
  misc_feature (273)..(273): n is a, c, g, or t
  misc_feature (311)..(312): n is a, c, g, or t
  misc_feature (315)..(315): n is a, c, g, or t
  misc_feature (374)..(375): n is a, c, g, or t
  misc_feature (378)..(378): n is a, c, g, or t
  misc_feature (386)..(386): n is a, c, g, or t
  misc_feature (466)..(466): n is a, c, g, or t
  misc_feature (506)..(506): n is a, c, g, or t
  misc_feature (569)..(569): n is a, c, g, or t
  misc_feature (648)..(648): n is a, c, g, or t
caccaagggcaggtgggcaggcctccgccctcctcccctactccagggcccactgcgagcctcagccgcaggagccaccagatctcccaacaccatggtccgataccgcgtgaggagcctgagcgaacgctcgcacgaggtgtacaggcagcagttgcatgggcaanagnaaggacaccacggccaagaggagcaagggctgagcccggagcacgttgaaggtctacgagaaggacccatggcgcagtntcactataggcgcaaacactgctntcgaaggaggctgcaacgagtatctttctttgttgtgnngcntcgcatactctagcgagaaggcgcaaaagacgtctcctggcaggtcaccgggaggaggnncancgcagagngctgcaagaatccagtgaagaagaacatgccagaaaggccactaaagcttccctgtggccccctcaccccccagtctggnaaaattaaagaaaaaagtcgcccgaaaacaccaaagtgangagccatagccaatttcccctactatccaaatggctcaaagcccccccagactgagaaagttnaagcagaaaagtcaacctgccacaaagaaaacatccgcagtgtaggcccatatgcaaactccccctaacatcaaaatgnctc

SEQ ID NO: 680565 - DNA, 427 bp, Homo sapiens
  misc_feature (6)..(6): n is a, c, g, or t
  misc_feature (380)..(380): n is a, c, g, or t
cattcnggatctcatatgcccatagttcaaaatatttttttactttatatatcatcagatacatacgtgcacacacatgtaaatatgcatccatccatgggatgtgatctcagggagataagtaccaactcatatattccttttaaacccactcaccattgccccaatttttgttccttctaactgcattcaactcttcaattcataatcatacagattcatgcaaataacagtaacgtgtttacctggttttacattctaatgttctatttctagaactgcttaaaatgttaagtagcacgcattcctgtggtcttagttactcatgagtctgagttgggaggatcgcttgaggttgaggctgcagtgagctgtgaatngccactgcacactagcctgggtgacaaagtgagaccctgtttcaaaa

SEQ ID NO: 680566 - DNA, 180 bp, Homo sapiens
acagtggacgggaaacgggcgagttccttgcgtgggcaaggagacacagtgggacaccggtgactggggaataacatggtagaacccaggtccggggatatcatgcttctatgaggaaatctctgggctggaatatggaatccttttttttctgattctgggatggccgaagcttgagca

SEQ ID NO: 680567 - DNA, 412 bp, Homo sapiens
ccttttgttgtttcaagtgcctttttcattgaaaagtaacgtgttagtgatctcctatatatatcttttaggaaccacagtgttcagataagacatttgtctatggattagtctgtgctatgcatattatgatataaaacagtgaagagaataaaatgctaccaaacaagaccctgatttttttttccatttttttcctaaatgaaagtttgtgactgtgggaaaatgagtctggatccttctgggcttgattttgcagctgaaatgtaccatttatagtaggatcttaattgttccagaaaagttttgtaaacatcaagctaggttagaagtttggattatgtaacagattaggctttttgccaactgttattatatgtaactatggagaccggcttacttaagttcttaa

SEQ ID NO: 680568 - DNA, 273 bp, Homo sapiens
tgaaagccacccttttttgtttggtacctgggggctgtgatgtgttatacagacaagtgctttgatatattatctagtgttgcaaacagcttctgtcactccgcggtgtcgccttccactccaatggattgtgtttgctgatgaacagaaagtacaagcttactttataattagggcttttgcgtcctggctgtgtgtgtggcctctttctggactgatctgtcccctttgttttttgcccccatgtcgtactgttctgggaggtggttccaa

SEQ ID NO: 680569 - DNA, 271 bp, Homo sapiens
attaacaattcctttaaccttgggggggggggaaaaaaacccacccaagggggggattttattcccccttttaaaagccgaaccccaaaaccaagggtttttcataagccccaccaccccccaaagaaaaaccgggggttttcccctttttaattccccttgggaaaaaaaaaaccggccccccctggggggatcaaattaattcaaacccttttttccgaaacccaagatgaatccccccagaaaaaccccccggcaaagggttttctta

SEQ ID NO: 680570 - DNA, 620 bp, Homo sapiens
  misc_feature (39)..(39): n is a, c, g, or t
  misc_feature (53)..(53): n is a, c, g, or t
  misc_feature (58)..(58): n is a, c, g, or t
  misc_feature (74)..(74): n is a, c, g, or t
  misc_feature (80)..(80): n is a, c, g, or t
  misc_feature (83)..(83): n is a, c, g, or t
  misc_feature (86)..(86): n is a, c, g, or t
  misc_feature (89)..(89): n is a, c, g, or t
  misc_feature (309)..(309): n is a, c, g, or t
  misc_feature (433)..(433): n is a, c, g, or t
  misc_feature (467)..(467): n is a, c, g, or t
  misc_feature (481)..(481): n is a, c, g, or t
  misc_feature (501)..(501): n is a, c, g, or t
  misc_feature (517)..(517): n is a, c, g, or t
  misc_feature (620)..(620): n is a, c, g, or t
cgatcctcgggctgcaggaattcggcacgagtcctgagnccgccagccccggngccgncgcgctgcgcctaccncaccgncgncgncgncatgaacattttccggctgactggggacctgtcccacctggcggccatcgtcatcctgctgctgaagatctggaagacgcgctcctgcgccggtatttctgggacttcatttatttcattgtataacacatctatgaaggttatctaccttgcctgctcctatgccacagtgtacctgatctacctgaaatttaaggcaacctacgatggaaatcatgantaccttcgagtggagtttctggtggtccctgtgggaggcctctcatttttagttaatcacgatttctcttctcttgagatcctctggaccttctccatctacctggagtccgtggctatccttncgcagctatttatgatcagcaagacttgggaggnccgagaccattatncacccactacccctgtcttncttgggcctctatcgngctcttgatcctggtcacttgatcttgcgcttttactttgaggcttctttgacctcattgctttggtggccgcgtagtccaaaccaatctttactgtgacttn

SEQ ID NO: 680571 - DNA, 290 bp, Homo sapiens
  misc_feature (252)..(252): n is a, c, g, or t
ccccccctttttttttgggggggttttttttattttttggggggggggggccccctccccttttttttgggccccccgggggtttaattcccctttttttggggggttccccccccctttttaaaaaaaaaaaaaattttttttttttgggggggggggggggggcttaaaaaggggccccccccccccggggggggggggtttttttttttttgttttttaaaaattttttcggcgcgcgttttttgaaanggggcccaaaaaaaaagggggggggttttcccccccca

SEQ ID NO: 680572 - DNA, 162 bp, Homo sapiens
gatcttactgcgcggttggggggcggcgggcttgtcatgtcgtgctcagatacaggtcttccagtggcaggatgccattctgaccagatggagccgacctgattgtctccgaggcagattccaccatcatgtcgctctagcggtacctgcccagcccgtggt

SEQ ID NO: 680573 - DNA, 839 bp, Homo sapiens
aaatatgaagaatgtggcaaagtctttagccagtcctcacgaccttactacacaaaagatagcttcacactggagagaacctctacaagtgtaaagaatgtggaaaagcttttaacctattctcaaatcttactaaccataagagaattcatgctggggagaaacctacaaatgtaaagaatgtggcagagctttaacatatactcaaaccttaataaacaggagaaaattcatactggagggaaactcaacaaatgtgaaggaatgtgacaaagcttttaaccgatccttaaaacttactgcacataagaaccattctaatggaagagaaaccctacaaatgtgaagaatgtggcaaagtctttaaccagttctcaactcttactagacataagatacattcatcactggacgagaaaaccctacaaatgtcaacagaatgtggccaagccttttaaccagatgcttcaaaaccttactgaccataagaaagatcccatcactgcagagacactcctatccactgtgacgacatgtggcaaaggcttttaaccaagacgtcaaaactaattaaccataggaccaatttattctgcgagcagaacacccagaccaacggtgacgaatcgggggaaaacacaaacaatcagacacgacacgacccatactaacaccatacagacgaaccatcggggagcacaaaccctagcactgtgaaagacacgcgacaaagcacacagacacgaacgcgcaacaacaacacaaatacgagactcccacaacggccagaaaccaaaacaggcgaacgaaacgaccacaccaaacgagcccaagcgcac

SEQ ID NO: 680574 - DNA, 697 bp, Homo sapiens
gaactgttccgggagcgccggtgttagctgtcgggggctttgggcatggcgacttgttctggccctggtggcacattctcgtgtcgcttaatccgcagaaagatgtcgcagttccaaaaaggaggttgcgcagggttcggcaaagcggatttaaaccagtgaaaaatacaccaggagccaatttactcccttggagataggcctaaggtgacgccaatttaacttaaaatcttaattttggacaggaaacccgcatgaattctttacgcatattttcatcccacagttttgggcacctgggtgaccaccgtgggatccaggggcttgggtccaagaatcggtaacacaaggggacctgggacaacttagggcaaagatggggttaatcgccattcggggagagacggtttagggacgctcctcggagggatttggtttgccaaaaaattgaggtttggttggaaacacccactttggagaccaaatcttaacaccgtgttgggggcggacaaacgaccttccttggggcacggtgcgctacattttgatatggccacaccctggaaaaaggctgttcccattcaacgaaacttctttaaacgaaacgtggcatattatccccaattttagagccaggcccatccaataattccactccaggtgcacaaccggacatacactccgggaacatcgggac

SEQ ID NO: 680575 - DNA, 940 bp, Homo sapiens
catggtggcacacctgtaatcctagctactcaggaggctgaggtgggaggattgcttgagcctgggagtttcaggctgcagtgagctatgattgtgtcactgtgctccagcctagatgacagagcgggaccctgtctcaaaaaaagtatatatatatatatatatatatatatggcgcgcgcaatagttcactcatattactcacacaaacatctgttgagaggcggcagaagggcgggacgatactcatggctgagtgtgcagggagttacgaagtaatgacgccgctgcgccccaagctagtgatgaaaaagcgtggttctactatactaaaatatacaaaacacatactatggtggtgtgtgggtggtatcagtgttgtgtatctccgcaagactaatgtagaggagggtgcatgagggcgcaaagaaaaaagcgtgggccgttgacacctgcttgaagaggggcggagtggtcggcagatgacggccggagtagtaggcgaccagggcgcatctactacgccgctgggcaaaacgagatgatgagatctctgctctccagaagaaaacaaaaaacacaccacagaagaccaagacacaactcatttctgtgcggggcccggtacggggcccccggaagaggagaggcagtgtttttgcacaaacaccaagttggggtgtgcggcgcgcgcggggcccacacgtggggtgtaaccgcgcaaaggcgggcgcacaaagcgcgtgccaccgacgaacaacaaactcgggcacaaaaacaagacggcgtagtgaaactccaccaaaacaataaaaaaccgccggggagcaaacccaaaagttgtcgacgaaaaacaacaaaaaggaatatcgagagacccaagacgaggagcaaaacgacaagagggacccagagcgagcgtcgaaaaacaaaatccgcg

SEQ ID NO: 680576 - DNA, 411 bp, Homo sapiens
  misc_feature (137)..(137): n is a, c, g, or t
  misc_feature (160)..(160): n is a, c, g, or t
  misc_feature (197)..(197): n is a, c, g, or t
ccctgcccctttactttgtatccaatcataacagtgcagcaggcattcggggccacactggttcccgcacttggggaaggggtcccccgggccccagcattttttcttttactcttttgtctgggggttttaatttngcaatttcttggtctccacacangggaagaaaacccacccaaccccgtggggctggaccntacaagcaaacactaagagaattcatcaccactggactaatactatagtagaggctcaaaggagtcccagacatggaaacaaaaggttgatatttgccatcataaaaacacatgaaagtataaaattaataagtctcataaaacaattacacgaagaagagaaaggaatcaaatggcaccatgatagaactccatgaaaccacaaagacagaag

SEQ ID NO: 680577 - DNA, 156 bp, Homo sapiens
  misc_feature (4)..(4): n is a, c, g, or t
  misc_feature (44)..(44): n is a, c, g, or t
acangactgggaagcagtgtgatctgccagacttcagatacatncacttcgagctctatgcttggagggtgtggagagagggtctgaggaagtgcccgcggagctcgagctgcactgctgtcagtgcttcacgacgtcattcctttcttcaagtgt

SEQ ID NO: 680578 - DNA, 959 bp, Homo sapiens
  misc_feature (142)..(142): n is a, c, g, or t
gtatcagcaccgtccgagcgtcctcttcaggattgcccctggagtttcttacacccagtctcctcctgccaagttgcaccatcctactagttacagacccgtcatcgcatgctagtgagctgagaagccgtagtccgccagnttgatgtttgcaggactttatcgcagatattcataccatgttccctaacaaaggttgataagttcagaggggctgacactcctacgccacacagtctacgcgtgcgtacctactggccatctcacgcgtggacgatatgcgtaggctatacagtacgactctagtcacgagattactatgccatcttgacatcatgcctcacactcttggagactagcaatccaatctaccattactagctgaccacgaggtcgcgcattagtttcctaattgtatgcctacccgatctacgcatctcgtacacaaatgcttaataccgtagcttgtcttgaggctccaaaatgtctgctcaatcgccagtcagaatctcgtaacgctagtaaatacaagtagacttgccaagggagttgctgctggacttagcgaaagcgcaatgtacgagacaaagggtaattccaagtcttacgtcacagagtcaccacacaggacgcggtcgaaacgaggagaagcatatagcgaatgaagccagcattggatacacggagtgttgccaaacgagatcgtgtactctgggataatttgctcggttgaactattcgtgtagttacggcaatgatcgtattcatgatatctatgatggaagatggcattgtgtgtggtagtatgcgaaactgtggcatctgattcaataattacaaacatttgagtgcacatttgtctcggtaagatgggagctttgtgacttgaaaatgtttgggcattctagttgtatagctttattttacggtataatgaattgactctgagtctccaatat

SEQ ID NO: 680579 - DNA, 918 bp, Homo sapiens
tcaggcacccttgagactcatatatcagagggaccccctgaagctggtggtcactattcatgacaaatacttcaaggagatgaaagaaagctgttatggaacagttccgccacttgccaatgcctttccactgtgaatgcagtgaatgaactcaagttgttataatgacatggcttgctggatgtgcttgcacgcacctgaggtagtgtggacgatccatccttcgtcctgagaatgccactgcagaatgggtggctgatgtgcttggccaatgtgtctctgcacatgcttgatatgaaactcctgctaattgtggacttggtgccaatgtgatgtgccctgtgtccatttgctacttgcatgtgaagaaccatcttggactgatgtctactatcgtgcaatgcacaaaagaagccctatagttgtcttgaacgatgtgacttccatcgactgttgtgcaatactgagcatgcatgcatgctgtgcatgtggacagttggtctgcatccctgtactctgatgtggactactgccttgtgccccccaacattcacagtgcataaatgtggttgtatgaaaatgtcctgagattgtgaccagttttgatttaccacacagcctaaacaaggcgatgtgcaggtagagtgagcagggcatagggttggtgtggatgcatctgatgaccccataagaccacctgttggaccactcctgtcatttgatactatggacctgggccttgggcactagaaaagtccacttgcattaaaccccatacgttctaccaaggtttgatgttcccttgtcattgcgacgaatgccatgcctcatcctccaacaggtaacattagaatgaatttcaataaacccaatagtacaccattgcttgggaagtttccgaaataccctatgtcaggg

SEQ ID NO: 680580 - DNA, 424 bp, Homo sapiens
gatccgctctcgaggtcgtttgtatcgataagcttgatatgtggggggattcgattccattacattccattgctttgattccattccatctcattccattcaatcccattcaagtccattccattcctttccattccattaaattccaatccattccattccattccattagagtccattctgttccattctattggaggcctttcaattccattccattacaatcatgtcctttcaaatccattccattcctttccattcgaatccattccattgcattccattgcattccatttgagtcaattgcattccattcaattccagtccactccattcctctacattcctttcgagtgcattcaattctattccattcaaatccattccattccattcctttccattccattccattcgagtccat

SEQ ID NO: 680581 - DNA, 373 bp, Homo sapiens
ttttttttttttgagactgaatctccctctgttgcccaggctgttagggcagtggcatgatctaggcttactgcagcctctgcctccagtgttcaagcaattctcatgcctcagcctcccaagcggctggggttacagacgtgcaccaccgcacctggctaatttttgtatttttagtagagacggggtttcaccgcgttgcccaggctggtcttgaactcctgacctcaggcgatctgccatcttggcctcccaaagtgctgggattacaggcatgagcaccgccccagccagaaacttttttaatagattgataggttgacaacactggagcaattagtcagtttcactaataaaagataatcacagtcga

SEQ ID NO: 680582 - DNA, 152 bp, Homo sapiens
ctgagacttgatagtctagagacactgatgcagaactatcttcatgcagtcgttcagtagcgaatgcttactggtaggacatctttatttacacatttgagactactatccatgagtcagtcaggatataagctttgattcaagcacacatg

SEQ ID NO: 680583 - DNA, 114 bp, Homo sapiens
attgtctcactctgcgcatggtgggcagttgctcaggatcgagcacactgcgggtgcagcagcgtcgtcacccaggatcagcagccgtttagcatccccggggtggaaatcgat

SEQ ID NO: 680584 - DNA, 370 bp, Homo sapiens
atatagaaatgcatataagtatatatagttcatacaataacataacttatattctgtgttataaaagtatacacgtttagatactaatacctctcatgcctgcatttctccagtttgtagaagcacgtggtcttgttcatttgttttacacagttctttttcactcatgaaacctattattatgggacagacacatttacatgtttcttacccaaataagccactttattttgtgaaatttggaaatattctttgtttaacgttgttcatccagcctgatttttccttccagttcacagggtttcttgtcatattttcaggagaaaactttataaaggaaacttgagcaaataaaggaaatgactacccc

SEQ ID NO: 680585 - DNA, 151 bp, Homo sapiens
tgagatcattatgagagtagaaaacaatctaactgagtttcttggcaaatgagtgaggagtgtattgagttgtagtcttgtttgggtgtaatagcaaacagatgatttttttgcctagcactgtcattaagatactgagtgggttgatgat

SEQ ID NO: 680586 - DNA, 300 bp, Homo sapiens
  misc_feature (28)..(28): n is a, c, g, or t
  misc_feature (43)..(43): n is a, c, g, or t
  misc_feature (161)..(161): n is a, c, g, or t
  misc_feature (167)..(167): n is a, c, g, or t
catgcaactccgcctcccgggcaagcgnttctctgcctcagcntcccgatagctgggatcacaggctgcaccaccagcccgctaagtattttagtagagacagggtttcaccagttggctaggctggtctcaaactcctgatctcatgtgatccacccacntcagcntcccaaagtgctgggattacaggcatgagccaccctgcatgccaaaagctatcatttttaaaaatatcttagggtaattagttttttgttcttttgtggaattttttttttttttttcccgagactccgtctc

SEQ ID NO: 680587 - DNA, 198 bp, Homo sapiens
tccagcatggggattgtttctgcccacctaactcttcaatgtactttgtaatctccccgcacccttaagaaggtactttgtaatctccccaacccttaagaaggttccttgtaattctccccacccttgagaatgtactttgtgagatccacccctgcctgcaaaacatggctcttcaccccctatctgttttaactc

SEQ ID NO: 680588 - DNA, 957 bp, Homo sapiens
  misc_feature (1)..(1): n is a, c, g, or t
naggccactatctatgttactcctaagataatgacacggctggtccacatacaggacgccgtcctgcccgagttttttgggggataaaagtgccaagggcggtgttcacgaggccattggccatcctgggcaaccgtagtggcgccacacctggctgcagattgaactcttaaccgccctccctgaccgatctgctatgtcgggccaggagtcctccccgtgcaacgtctgtcggtcagcccacgtttgacttggggccaagtatctggcagcccgcaaaagtgtgtcgtgggcccagtggtgaggcccgcgggtctcctgtgggcaccgcccccagaagctcgccctctcctagccttcgccccgaatcttcccccgttcagtgaaggcagaacccgtgcttaagttcccccttctaacccctcctattcccttagaatggcgtgccattttggcgcccttcacatccctcctctttgtgctccccccccttaattctctctaaaataataaggggggcgtaatttatatcccccaactttctcccgtcatccaaagaaatttctcttccatagctttgccggtgaaaccccccgccccgagatcgcccccatgttaaaaaagccggctaattttcttcgttgtagaacaatgaacgcctcctgcccagtcgcacgggaccaatatttccgagtatgtctgctaattgggccttggacccctgtgaaaagcctccaatataaaacttagtgatgagtcgggagaggcaccatgaaagttctttgatgaatcaacgaggtgaagatacaactgtaatctcccccaccaccggtttgtttctagccgttgcttttaattaccgagcccccaggtatttaattgggtgcaaaaataatgtgcccccctttgaaaaattgtcccccaaattacattccaaaaaaaacgccaatcataaca

SEQ ID NO: 680589 - DNA, 115 bp, Homo sapiens
ggatttgctggtgcagtacaactaggcttaatagggattaaggctgcataaagacaagactgctggttaaaaaatgaaaaaaaaaaacgttagaagcttgaattcgagcagtagt

SEQ ID NO: 680590 - DNA, 354 bp, Homo sapiens
acagaatttaggccagtggaaatgcacctgatagtcccagctacttgtggaaaatcaggaagatcattcgagcccaggagttcaaggctgcagtgagctattggtcgtgccattgcattccagcctgggtgtcagagcaagattctgtctcaaaaaaaaaaaaagaaaaaagaaattaggatggtttacagttggatggaggagggcagatgcaaagtaggtgttaagtaatgccaggctggcaagaaaccatgagtgggtctggagggcaagattgaccctgagtataaggagcctcgcaaggaaagtgtgagagtagccggtcacaaggggtaagttgcccgccaaatcgaa

SEQ ID NO: 680591 - DNA, 248 bp, Homo sapiens
ctggccctacagaagaagtctgtgaacttctgattgaggcctttatcactttactctcaccttgtagttgactcctaactggtcctcaagcctctcatctttctcccattctgatctctctctactctgaggccagtggtttccttgctatacatttactataagtgtactgccgaacgacagctatacagttacagtcaagctatcttagtggtggtgccacagcagcgccacgagcccggaccatc

SEQ ID NO: 680592 - DNA, 455 bp, Homo sapiens
cttgggaacacgcgttaatttgcttggggaaaacctgggggctgttatatatccggggatccccgtcttttgtccttccacgaggaaatcactcgttggttttgatggtataatgagcctctaaatcttagtgtggcgtgagaggatttagcatctttttctttgatgcccctgtgcgtgcaacaatattaacatcaatacaagctgtagacctcttcccctgttaatgtcttttgttagtttaattcacagatcccagcaatagagcctaagtgggtggaggaaaagttttcctcccctacattccaaacaagctagccattatgcatttacattaagatgaaaatcgatgcaattaaatcacaaaatatggtacctaacgtaaagtaaatttaaacagttttgtattcactagctctcttgaaaaacaaacaaaaaaatactgtgtatctcga

SEQ ID NO: 680593 - DNA, 740 bp, Homo sapiens
agatgcgctggcccaccccggctggcggcggagcctatcgccgtggagctgctggagcgcggataaatgtagcgccgcggcgcgggccagcagctctgcgaggggccggagctgcggcaggagccatgcagtacccagcaccccggagccaggctgtgctgggcagccgtggtgggttgccgctgtactgcgcccacagccagctgctgcaaaccgcacgaccacgaagcgccacttttacgatcgaaggaacactcctgtggccagctgtgggccacgccgcgcagcccaaaggcaacgaaccatacagagacatagacacggaacaaccaagaatcagtcactctcaaacaagaactcagtgatacaccgcataacagggaaagcgcacgagatagtaacgaagaaccaacagccgcggaaatcgacaaccaaaagggcgtaaatcgacgagacaaagtcaagacacaagacacggggacaaggaagaggagtagagaaacagaggaacccaagggggaaacacagcgaggcagcacgccacaatgagaagacgaccgcgtatcccacgagagagaaagacagctgcgagagcagaaagcatacaccaacaaaaccgccgcccccacgcaacagccagtacagcaccgaacgccacggcagtgaggacagcagagaacccacgatcactacggggaagacacagcactaagcgtatgagccagcagacgacgcgactc

SEQ ID NO: 680594 - DNA, 284 bp, Homo sapiens
cgatctagaggactcccctcctttatcaagcagtcgcaaggcatttgttgctatcgggactacaatggccacgtcggtctgggtgttaagtgctccaaggaggtggccaccgccatccgtggggccatctatccctgcgacaagctctccatcgtccccgtgcgcagaggctactgggggaacaagatcggcaagccccctacacttgtcccttgcaaggtgacaggccgctgcggctctgtgcttggtacgccatcatccctgcacccagggcactggcatca

SEQ ID NO: 680595 - DNA, 293 bp, Homo sapiens
  misc_feature (11)..(11): n is a, c, g, or t
ctttggggggnccgggggggggtctatataccctgggcgttttttttgacccgccctttttcccggagccgccttctccccttttttgccccccctgggggccccggcgcccgttcctccccccgggttcggccctgggcccggggtcggcttccgttttccccccggatccccttttgccccttgggccttttttggcccccttttttgtttggttggtcctttaaggcgggttggtcccggtcgggggtttcgggcctttctttaccccccgggttctgggcgggggggga

SEQ ID NO: 680596 - DNA, 151 bp, Homo sapiens
tttcatgatccccacggctcccaaatgtcttcacgaagccagaaaccacaaaccaacacatcaaaccaaccatccagcttcatccagctccagctctgcttctcaaaggggtctcttgctctgccgtctctgtctctcatctctcatgtct

SEQ ID NO: 680597 - DNA, 250 bp, Homo sapiens
taggcagtgttcagaaagcttgtttgaatctcagactcctttgagaattattggaaaatggacccactaaaaaaaaaaaaaaaaaaaaaaaaaaaaaaaaaaaaaaaaaaaaaaaaaaaaaaaaaaaaaaaaaaaaaaaaaccaaaaaccccccagggggacgaaaacctcttttgcacaggaaagtgggggactggcccttgccacaaaaaactcccccccttttgtaccccagtccgtggtcaacccc

SEQ ID NO: 680598 - DNA, 164 bp, Homo sapiens
cactattcatagaggccacggacaccgtactccataatgtggtctgaccagctcagagagagtacagtgggactgttaccttcctgatatggacagtattcttctattggtgcagattaagattgcattagtttttttcttaacacactgcatcatactagttg

SEQ ID NO: 680599 - DNA, 248 bp, Homo sapiens
  misc_feature (27)..(28): n is a, c, g, or t
  misc_feature (96)..(97): n is a, c, g, or t
  misc_feature (118)..(118): n is a, c, g, or t
  misc_feature (155)..(155): n is a, c, g, or t
  misc_feature (192)..(192): n is a, c, g, or t
tcggtaccgatgtgaataggtaggttnnttctactgactagaggtgtcgatctggaagcagcatttttcatttaagactcccaggtccccctcctnnggctgtaaggacatctagggnctgtctattctgtattactactgaggctaaagagttnatggtaccgtacattactgccagccaccatgaatatngtacggtaccataaatacttgaccacctgtagtacataaaaacctattcacaatcg

SEQ ID NO: 680600 - DNA, 306 bp, Homo sapiens
  misc_feature (84)..(84): n is a, c, g, or t
atttcatctcacgccatgggtgtccctaacagtcttcctttaaacatcctgtgtccagcactttgggaggccgaggtgggcggntcacctgaggttgggagttgagaccagcctaacatgggagaaacctcatctctactaaaaatacaaaattagccggtcatggtggtgtgtgcctgtaaatcccagcttcttggggggctgaggcaggagaatcgcttgaacctgggaggcagaggttgtggtgagctgagatcgtgccattgcacttccagcctgggcaacaagggcaaaatttttgtcttc

SEQ ID NO: 680601 - DNA, 426 bp, Homo sapiens
  misc_feature (377)..(377): n is a, c, g, or t
gggtcactcaccacattcttcattgattgcatggccgcctcggtctggcctatgaccggaagaaagtctccaaggccgccatcttggacaggattaaaagaaccggagatggaaactacaagagtggctgagtttggggtccctccaggttccttttttcaaagaaccacgccaggcagcaggttttaatagtcttgtttattcaactactgtaataactgctaccagcgatgctaaacgatgatgatgttaacccaattccatgtacatgtatatcttttaacaattcaaacagtatttgaaagccagacaactctagcctttatgaatgctaagctgtatattatttcttctctatatcctctctctacttctangtgcccattgtcctcctatttcactattatatgatcgcccagcagggga

SEQ ID NO: 680602 - DNA, 992 bp, Homo sapiens
  misc_feature (463)..(463): n is a, c, g, or t
tgcagaaatcaagatgattctccaagcacgcatactgctcagaaggtacaaagaagagtgtctggttccatctgttcggacgctatgccattcatgtagggccccaggggatcctctgcgaactcgatttcatgtacggctcgctttatactgctacctatcttgtggcgaagacacaagcaaggctccaggagagtagtctaagtgggctggtagtccattggatggagaatctgatgcaacgatatcgcggtacatatatagattagttggtgataaaacgaaatatgaagtcaggacgggatgtaaaaaggtcgttgaattctcactggatgcatcgaagtggggtcttgagtctctgtggtcgatgccacgggatggattcgtacgattatatcagggtcgaaatgaggtgtcattcgctagccatatcagacaagtaaatcctatgtggatggaaaanaactaacatgcagttagtcgtctactgtgaaaagtggcagcaagagagggtcggttgtgactaaagatttctaatcagagcccttgaatgcgtatagaaatctcctccacatgtaaattgggggatagttggatgggggattgttatctcaaaatatcaagtaagagcagctgatttatggacagaccacaaagagctaatatcactagtggtatggaagaaaatacttggaagtgagttactcctattgtacatacctcctggcaacggagacctgggcatgccctctgcttcacctctgatatatcaagatagtggtgggacgttctggccatgcctattgggcctgagaacctacttgctgggtatccagttgagggcactgaggaagtctaaaggtccctggtatgcagatgaccatgatgtgtatctagaaaatcccatttgtctcagaccaaaaatctccttagctcataaggcacttcagcaaagtctcacggataccgcccatccatgttccaccatcccg

SEQ ID NO: 680603 - DNA, 1191 bp, Homo sapiens
  misc_feature (203)..(203): n is a, c, g, or t
  misc_feature (222)..(222): n is a, c, g, or t
cagtcaggcgcatcttctttggcgtcgccagccgagccatatcgctcagacaccatggggaaggtgaaggtcgggagtcaaacgggatttggatcgtatagggacgtcctgggtcaccagcgggctggcttgtagactcgtggctgaaagctggcatagttagtgtggccatcgaagtgtacccctgtcattgcacctgcaanatagcatgggttgacatgntgcgcaatatgattccacaccatggcaagattccatggtcaccgtcaaggctgagaagcgggaagcgtgtcagtcaagtggaagatcccatcaccgatgcttccagggagcgagatccctccaagaatcaacggtggggcgattgctggcgcaggagtacgtcgtaggaagtccaactgggcgtctatcacacaccatggagaaggctggggctacatgttgctaggggggagccgaaatggggtcatcatctctagagcccctctgctgatgcccgcatgtgcgtcagtgggtgtgaaccatgagaagtatgacaacagcctctagatcatcgagcaatgcctcctggagcaccaagatgcttagcacccctggggcaaggtcatccatgacaactatggtatcgtggaaggagtcatgaccagagtccatgccatgactgcacccagaagacgtgtggatggcccgtcgggaaacttgtgggtgatggccgggggggtctccagaacatcatgcctgctctactggtgcaggcagggtgtgggcaggcattcctggagtgcacggaacgtcaagggcagggctaccgggaccaatgccaggtgtcactgttggacagaaccggcggcaagaaactggcaaatgatcacaccacaaagggcgtacagagtgaaggggcccccaaagggcacggggaaaaacggtaaacccaagggcggtctccctgataatcaacgaggaaacacactcacgacaatgtgaccagagggggattgcgcaacaaacactgtcacgaaatcgaggtagtgcaatgcgatccaaacgcggagcaaacaacacagataagacgagacaacgagaacacagaagagaaagcacatggggtcactaaacaaccacaggaccacgtgatgaacactaatagcgacctactgacttctaccagcatcctatcaaacacacaacaaa

SEQ ID NO: 680604 - DNA, 133 bp, Homo sapiens
aaaatgcaggtcgagcgcggtggctcacgcctgtaatcttagcactttgggaggccgaggcgggcggatcatgaggtcaggtgatcgagcccatcttatgctaccacggtgaaccttctctctcctaaaatcc

SEQ ID NO: 680605 - DNA, 516 bp, Homo sapiens
acctagcaaagcaaggagctgcaaatcgctccactaatggactccactgggatttcagaggcaaactcccattgtaagatttctgtgtcagaaacttccaccaaactcctgcgtattcctcttgctgtcaagcaggaaaggccaagattctagaatgtgcagttttcaagttcatgtctgcctccacaaggcactcttggagactgtaatgtgctcactgattgggcacattttcagtataagttgatttgcaggtggctgggactgcagcatcaggcagagccctccccagaatccttgacacagggggctgaggttgggcctctgggttcaaaatcctctaaaagctgttggcaaaatgtgtgtatttgctcacctgcgttgttctgaggaatagttttgtagatttccacaactcctcaaagtggcctaggaccctatattatttgcaaactatgcatccgacaaatgtccaatgtctagaatccgtaaggaactcacacaaattcacaagcg

SEQ ID NO: 680606 - DNA, 784 bp, Homo sapiens
  misc_feature (384)..(384): n is a, c, g, or t
aagcggaatacaaggcaaaacccaaaaacccagggggtggggcccggaccctccgtgggagtcaaacggggggcacccgggcgaaaaatggggtcattaagcccgaataaagcaactcatacaaggcgccctcaattgaccacgaaagataacaggaatcttctccgcgcgcgaatcccccctcgataaggccccccctcgtgtgcccgcctccctctgggagacagaaaccttgtgagaacacaatttctacagggccctcccaccggtgcacctcgatcacaaacacagcggggagatggtgacccccgcaacgtggcgcgggaaacccgcccgcggcaggaatcatgacgaagcgccgcatgtgccccaacgagtcaccanagaacaagtttgttccccacacgcacacaaagtgatgcgcgccgcggggctcctgcttaagagcccacacgactccgcgcgggggcaccccccacacgaggagaccacaaactcctctgtagcggtatttgttagcaccatcagacataacacccagagagctcacgaacagtacccagccgcgtatatgcggggttctctgcacagaagcacgaggccctttcctccacacagggtgtgttggaaggacccgccccagtcgtgcccctgggtaggggcattggcctctgatagagcatcctttgggacacgaggcattccggcgttcttcaaggtagtcatgtaattgagccaacccccccttaatcttcttgttacaattggaataaaacggcaccac

SEQ ID NO: 680607 - DNA, 460 bp, Homo sapiens
tctttttgcaaggccctctgaatctgtctgtgtccccctgttagcacaatgtgaggagggtagagaaacaagtccaacctctgtgtcctacccatgacccccttccctcacactgaccctgtgttcccttccctgttctcttttctattaaaaataagaaccctgggcagagtgcggcagctcatgcctgtaatcccagcacttagggaggccgaggagggcagatcacgaggtcaggagatcgaaaccatcctggctaacacggtgaaaccccgtctctactaaaaaatacaaaaaattagctgggcgcagaggcacgggcctgtagtcccagctactcaggaggcggaggcaggagaatggcgtcaacccgggaggcggaggttgcagtgagccaggatttgcgactgcactccagcctgggtgacagggtgaaacgccatctcaaaaaataaaaatt

SEQ ID NO: 680608 - DNA, 430 bp, Homo sapiens
  misc_feature (262)..(262): n is a, c, g, or t
  misc_feature (278)..(278): n is a, c, g, or t
  misc_feature (314)..(314): n is a, c, g, or t
gaaatctcgttccgtatcgcgtcgaactgattagccgcatcgggcaggaagcagtagacgaaatcgaatcaaaccataaccgccatcgctggactatcgaagagtgcaaggcgatcaaggcagagtaccaacagaaactcaaagacctgcgaaatagcagaagtgaggccgcatgacgttctcagtaaaaaccattccagacatgctcgttgaagcatacggaaatcagacagaagtagcacgcagactgaaatgtagtcgnggtacggtcagaaaanacgttgatgataaagacgggaaaatgcacgccatcntcaacgacgttctcatggttcatcgcggatggagtgaaagagatgcgctattacgaaaaaattgatggcagcaaataccgaaatatttgggtagttggcgatctgcacggatgcta

SEQ ID NO: 680609 - DNA, 258 bp, Homo sapiens
tctcgtgtacagtaaaactgtagtatacacaataagtgcagggggggcaaatgtaataaaataagtagtagatgtgggaggttcttatatccttggtagggtatgctgatagtgtttagatttctgtgcccattataccagtagtgtgttaaattatttaagataaataattactgtaatgtaagagataccatgagttatgtgaaagattataaacccgagtttccatagagaaggggaacattaatgttagagata

SEQ ID NO: 680610 - DNA, 352 bp, Homo sapiens
gggattttacactacatttcctgtgctgagaatggatgcttgtatattcgtacatggtctatgttacacagaatttgtgttgcaggtgtttgccatgtggtacctacatagaatctccatacaacacacaggtaacaggttatacaagtggattcagactgaacccccagtacaaggacattgttttgaactaggtggacatgccatccctggtctccttagactgacatgattctcatgttaaccaagttttaaaagttcaaattccccaaaaaggcttgtccaaggctggccccagatgtgtgggtctgacccacaccagccctgtgtcctgtcctttcagtcatttgtc

SEQ ID NO: 680611 - DNA, 284 bp, Homo sapiens
  misc_feature (147)..(147): n is a, c, g, or t
agtaactgagtggtgtcatcaactgctgcacatgcttaacaattccattgcaaaacaaggtaaaaagactcagataataaaaacaaggcaagaaccgcatcttcatctaccaggaaaaatgtttaaaacaacaaatgaatcttcccngtcaatggccactcctccaaaacactaaagattctcatttttttttgttttcttttttttgggaaacccggtttccgcctcttgtggccccgggctggtagtgtgacaaggggcgtgtgaatctcccaggcctcagt

SEQ ID NO: 680612 - DNA, 315 bp, Homo sapiens
gacctagaggatcccttatgacggaagcatgcttttgataaggtctctataggtgataggctggaattgcggcattcaccactgctttactgggcaatatgtgatcaataatagcagaactgtttgccttccattcttgagatctgactgtatgtttcagttttcattcccttgagaaccattttccagtaaaaatgattctaaggttccacagatcaacagctgaggtacattctgtatcattctgcaggccagcctgggccaagcaatttggcaatcctgcttccgggtcgaacggggtcaccggagcttcga

SEQ ID NO: 680613 - DNA, 682 bp, Homo sapiens
  misc_feature (206)..(206): n is a, c, g, or t
  misc_feature (236)..(236): n is a, c, g, or t
  misc_feature (269)..(269): n is a, c, g, or t
  misc_feature (272)..(272): n is a, c, g, or t
  misc_feature (292)..(292): n is a, c, g, or t
  misc_feature (294)..(294): n is a, c, g, or t
  misc_feature (323)..(324): n is a, c, g, or t
  misc_feature (336)..(336): n is a, c, g, or t
  misc_feature (360)..(360): n is a, c, g, or t
  misc_feature (372)..(372): n is a, c, g, or t
  misc_feature (378)..(378): n is a, c, g, or t
  misc_feature (380)..(380): n is a, c, g, or t
  misc_feature (390)..(390): n is a, c, g, or t
  misc_feature (409)..(409): n is a, c, g, or t
  misc_feature (414)..(414): n is a, c, g, or t
  misc_feature (425)..(425): n is a, c, g, or t
  misc_feature (443)..(443): n is a, c, g, or t
  misc_feature (448)..(448): n is a, c, g, or t
  misc_feature (455)..(456): n is a, c, g, or t
  misc_feature (458)..(458): n is a, c, g, or t
  misc_feature (461)..(461): n is a, c, g, or t
  misc_feature (464)..(464): n is a, c, g, or t
  misc_feature (473)..(473): n is a, c, g, or t
  misc_feature (480)..(480): n is a, c, g, or t
  misc_feature (487)..(488): n is a, c, g, or t
  misc_feature (495)..(495): n is a, c, g, or t
  misc_feature (506)..(506): n is a, c, g, or t
  misc_feature (520)..(521): n is a, c, g, or t
  misc_feature (552)..(552): n is a, c, g, or t
agcgggactagctaccgtggcaggtcttctacctgcgacgcttcttcaagggccacagaaatggattgagtaatgaatgaggcatattctcctcccaccttgtacctcagccagcagaacatcgctgggacgtgcctggcctaaggcatcctaccaacagcaccatcaaggcacgtggagctttcttgccagaactgatctctttnggtgtgggaggacatggggtaccacctaanccaacaagtcaatgagggacttctttttaattnggnaggattttgactggttttgnancaataggtctattattagagtcactatgnnaaaaataggggntacctagataatgccaaagtcagnatttgcctgggntccctngngtgatctgtntggactatgttctttcttntccanttgctcagcanttgggcttccatctagtntttancaagatnntnggngancatgttganttcattnggattgnnctctttnaatttcttggnaaaacacccttaanntttctctttacccttagctgaaagttttacnatagcttctggtgatatcgttggcatgatgtgatatctcttagaatggtgatggatgtgacacctcattaaaagtgagctagaactgtagataatattaaaagaaatgtcaatataagacaaataacata

SEQ ID NO: 680614 - DNA, 1373 bp, Homo sapiens
gagtgggaaagggcggtggcatgatcctcgatatatacagactcaggaagtcgagcctcacgggagtgacggggctatctccgcaggctccgcgaagaaagcaaggctgggaggacccagacgaacggacacaacagacctcagcggccacgacagcctcagccgccaactcatgtcagccggcagagagtgcaggtaagcgggcagcgtacagcatccgcatggggcgtggacattctgacagcacacgacacggtatccctctgtggactgaccatatggctaccctcttacacgaccatttaccagagggcaaagggaagctagatagcggagccggaagatgaggcacccatcgggactcgagacagacggcgacgatataaagctgagcgagccagatgccacatggagaccggatacagcattctccactcaggctaccatccagcaccgagaccagaaaggacccccatacccccagaattctagggagagccgatggacgggagaccgagtcagatcgcgaggtaaccagagaccggacagaacggagcgaacaaggggaaggataggccaagacaggaccaccgacacacataagagatggatacggaaaagaccatcacccagtcacaggagatgagagaacaccgagagggggaccagacacgtacggagaacggcagacccgaacgaaccaatgggcatacgaccacataggatgggggaggataacacggacgcagcaatcataacggacaatagacacagcacagacggactaaaccatggggcagaggattgaagacgcaggaaaaggccagaagaagagacaacacataacaccggacgacgaaaacatggaagataaaccatgcgaaagcacgagaaacagaactgatagacaccatgagatatgtggatcagcaaccaggacaccaaagaaacgccacattggacatggggcacaaaaaacgcaacaacgagactgaaagaaacgaaaagagaaaccaagaacaagcacaggaccttgacgcacccaaggaactacaaagagccgaacatcaacaataaacagagaatgcgaaaacaatacagagggaaaacaaggaaaaacaaacaaggcaagaggaagcaaggatggagcaagggacaacaagacagcagaacgatacacgaaagtatgaagagaacctgaaatgaagcgcacaaaagacaaaaacaacaaagggcacacaggtgcgggcaaagacaagaacgactgaagcaaaacgagataagaacagagaagacgacaagtgaagagatacacgaacggacagagaggtgacagcagacagaaatacagacaaaccatgactacagaagca

SEQ ID NO: 680615 - DNA, 919 bp, Homo sapiens
accaaaaaaaaaaaaaaagggaggtgtattgtcgccccccaaaaaaggcaaatcagtgtggtacgcctaaggtacaattccaagggtcttaaccaaccggcagggttttttaatccttaaaaacctttagtgcctacattatcattggccagtttccatattggggggttggggcaactcttataccagggaactcagtgggaatgttgtctgtccaggccatgtgaattggccacttatttacttctaaaaggttttctaagagtgaccggcttatcacatatgttgtgggttgatattctccatggtggctgacatttgggaagcgaggggtactagttaatcccttctaagacaagaatggttatagttttcccgggtgggatactcttcaaccacacggtctgtgtacttagagggaaagtacagcttaggccctaagtcagaaatcaattagctggccggcattttttggtaccacgtgccgtgtgcatttgcggcttccacaggtgcattgcgttgacacggtgtgagacagacacttctgggccattttccctgtggtggaattaggaacgacccctttccttgtgcttaaggggttaaggggaggagatacctaagaatacgggagggcttatcctaatctaagtggggggggcggtacttagcacgggcagacaggggcgggcctgggctttcacgggttttttccccctaagagtggtatggcggcggttcctatcacgttgcaccctaatagtggctgtgaaccttatttcctaggtacccgaatcccttgctcttcccaggtatggcacacctcgcttttattaagccccaaaggtacggtcgttcacgtgcgttggtgtacaattggcgcccgcgcacgcgattttggtcgcctttcaagtggtta

SEQ ID NO: 680616 - DNA, 115 bp, Homo sapiens
gcggccgcctactactactactgctcgaattcaagcttctaacgatgtacggggacatgtgtacctgtaatataattccatcatatctcaaagtaaagtcattaacagcaaaaaa

SEQ ID NO: 680617 - DNA, 223 bp, Homo sapiens
tcatcaaaccctaccaagtgttctattatatctagacttaataggttaggtgctagtcctttgtatagatacattatgttaggcaaatattttccccagtccatagcttatctatttcatatatctataacaacagaattattgcagagtcaaaacgtttttatatgacagtccaatagtaatagtattactttagtataagttactttatgctatattggta

SEQ ID NO: 680618 - DNA, 764 bp, Homo sapiens
tgggaacgcagaaatctgaggtaccttcaagaccgtgagtctaaggggcccggtgaccccatggggttaacagcatccttgttcggggcgtcaaatggagcatctcgatgcccaagtcattgctgcgtccatcttttaggcacggtggaaattcctggcgacaaggtactgatacaatttggctgcacggaaataggcagcgtagatggcgagcgtggctttctgatactttcccgatgcacatgcgctgcgcctatccaggacaggccgtatgtcttgttggtcaaggtgacaccatccatccctgtgctgcacacttagaatcacactgggctagcgtttatcacaacttacctcgggtccaattgaaaacgagtaatctctgagtaggcggagaccacaggcatacggtgcgtttctctactccagaaactgcctcataaccggttccaatgtgtagcccagattagagaaccagctgtttaatgggcagaacctcacttgcaggctgctgacgaagtttctgtctaaactgcaataatcttgggacttctcgtgggtctcttaaaaatggagctaactagcatgagcatatttattcgttctgtggtcactgctcagagtagtcactttttcaagataaggacctgggttaagtgagcataaaaacagtgacataaaaattaaaagtaaattacctaagtgagaaataaaagcctatgaataatgtaacaaggggaagagctggaagaactaggcagata

SEQ ID NO: 680619 - DNA, 109 bp, Homo sapiens
ttgcagttaggcaatgctcataagttaaaccctggtcggtgaaagcccagagtttacgaaagctacaacaagagtactcctcctcagggatggagatcttctcattaaa

SEQ ID NO: 680620 - DNA, 134 bp, Homo sapiens
tcagcaggatcctaagctatggtcagtataaacaattccatatacctcctcccttttttttttttgagaaaggtgattctctctctgtgcgcccaggtggaattcgcatggttgcaatctcgagctcacttttg

SEQ ID NO: 680621 - DNA, 169 bp, Homo sapiens
actctagacggatccccctggtgtctacatatccgccatgcttgacgatatggactaaaaggaacgagacgtgataatagagggagttcgtagctggctctaacagagttttgattaccattgacctgctggccagaggcattgatgtgcagcaggtttctttagtcat

SEQ ID NO: 680622 - DNA, 699 bp, Homo sapiens
  misc_feature (414)..(414): n is a, c, g, or t
  misc_feature (452)..(452): n is a, c, g, or t
tcctaaggcaaatggttaaaaaaataaagagagccggccaacaaaaaacaaaacgtccaatcttgtaaaatgtgggcaaggtccatgaagattttttttgcatataaaatgtggcaagaaaagattgttggactttgggaagttcccatccctcaagcgcttgtgcaaaaaggaggtgttggttacatcacaagggttttaataggagaacataggttattcttagttgacctaaaaaatttggtatttgtacgcaactaaaaaatttcagttccttataaacccccactacaactgattcggtgttgcttatacagcgcaggctttcctggagccatagattttaacattcgcaaaaggatgtagaccgtctagacaagcataaatcttaggttcgtagaatattatcagtanagagcctatgggctgcctgtgtagaatggacgactcanagggttctaaagaatcagaagtttttcaaacaggagcatgggcatgtgcttcagtagaacaaataattactttcaactgtgtagtcacccacctcacaaagtttccaatgttgggcacaattagtcacgcgttgtaatcccgccctcttgggaggattagctggtagggcctcttacgctcaggtagtagcgggtacagtgaaccgcggttgcatttaagcactcaagcctgggtcaaataggaagc

SEQ ID NO: 680623 - DNA, 234 bp, Homo sapiens
  misc_feature (27)..(27): n is a, c, g, or t
  misc_feature (80)..(80): n is a, c, g, or t
  misc_feature (163)..(163): n is a, c, g, or t
  misc_feature (171)..(171): n is a, c, g, or t
  misc_feature (194)..(194): n is a, c, g, or t
  misc_feature (211)..(211): n is a, c, g, or t
ccaccatacccagccaattttttgcanagatgaggtcacaccatgttgcccaggctggtcttgaactatttgcctcaggnaatcctcttgcatcagcctcccaaagtgctggtattataggcgtgagtcaccacacctggctaaaaactactttatggtgatnaaagatanagcggttacctagaaagggggtngggtgggattgactagnaaaggccacctagagctcgtgcc

SEQ ID NO: 680624 - DNA, 588 bp, Homo sapiens
taagaggcccgtgtaacgacgcagtgcaaacggacgggaatgtatacatcgccagtgtaaacgaccgacatgtaactcgatcggactctgtaaaatgacgagtattgtaatccgactgcctgtgttaaaccgaccgtgatgtagcagatcgcgggtatgtatggtgcgggcctcttgagtcaccgggtgaggtaatccttttgagcccggaaacatcttgctcacttagaacaactggtacctggctcgtaagtcgcaagtagcatctggagcgggtaggaactccaaagcattggatgcttggataaattgggcggcgtgtttgctcctcgtgcatgcaccggtccccacaaggtgagagagtgtctcaccctcaacattctccagaggaacagatttaactatgccccgaacggagattaagtaaagaagatttgcatgcagcggttcattaaaatcgatggcgaagtccgaactgataaaacctacccggctggattcatggatatcatcagcatagacatgacgggagagaagtcccgtctgatctatgacaccgacggtcggttagctgcacatcgtaataca

SEQ ID NO: 680625 - DNA, 244 bp, Homo sapiens
agcaaaaaacataatctcgtatcgtttacaaaaaaagctgccgcatacctttttattattattattattattcattattatctttgagatggagttttactcttattgcccaggctggagtgcaatggcaccatctcagctcactgcaacctccttctcccgggttcaagtgattatcatgcctcaacctcccgagtagctgggattacagacatgcaccaccatgcccagcaaatgttgtgta

SEQ ID NO: 680626 - DNA, 123 bp, Homo sapiens
  misc_feature (108)..(108): n is a, c, g, or t
tgaaaattttttttagggccaggccctgaacaaatcattgaaaggtaattttctttgcgttttaaaaaatttgggttatgaagaaaaagtgatgaaaataaattaaanctgggttccctttta

SEQ ID NO: 680627 - DNA, 839 bp, Homo sapiens
  misc_feature (11)..(11): n is a, c, g, or t
  misc_feature (114)..(114): n is a, c, g, or t
  misc_feature (117)..(117): n is a, c, g, or t
  misc_feature (367)..(367): n is a, c, g, or t
  misc_feature (382)..(382): n is a, c, g, or t
  misc_feature (410)..(410): n is a, c, g, or t
  misc_feature (416)..(416): n is a, c, g, or t
  misc_feature (433)..(433): n is a, c, g, or t
  misc_feature (454)..(454): n is a, c, g, or t
  misc_feature (458)..(458): n is a, c, g, or t
  misc_feature (555)..(555): n is a, c, g, or t
  misc_feature (572)..(572): n is a, c, g, or t
  misc_feature (620)..(620): n is a, c, g, or t
  misc_feature (683)..(683): n is a, c, g, or t
gcgaaggaagncgccgctttttgcttaacagtgcttccccacggttgtcttaggagccaagtccccgaaggcttggcaaacgcgggagccctccggtggcagcgcttgggtgtnggnctccgaggctccggcctgacctctccacggggtccacaggaacgtctccggctgccaggagtcgcaaggggccgagcaggatgaggaaaccacaggcggagtccgggggaagcagcgtggcatcccagcctcaggcctgccaggacggtgttcgggatcaagaggaccacactccagcccaggacaaaagccccacggtagcacattgtccggcaggagaggagcagacccacgtccaagaagatggttntacctttccacgccncttctctgcgaaatgaagccacaccacnacacantcttgaagaggaagccnggaatgggagacggcaacaancccngtccctggaacgctggcctctctggacaagccacccgcttcgcacccctcctcttatgcccgtggcggtggcacggcgctgtatcctgcctgggctntggcctctgctctgtcntccctcttgctctgtctcccctgtttctgagcggcctagatgcctctnggtctggctgaatatcttctacgaagatcacttccccgtccatcagggagacacttcctgganatccgtgtcatgactgtttctctctccaaacctgtttctgctgggttggtcacggtctggtgaccctggagctcttgtcttccatacgtgtctcagccagggaagcttcctcggtctccatgtttcacctcatgcgtggcgtggacttgctagaac

SEQ ID NO: 680628 - DNA, 357 bp, Homo sapiens
caatcattagataagtcatgaaacaacacgatgctatacgacgatgcggagaaaatgtggagaaataggaatgcttttacactgttggtgggagtgtaaattagttcaagcattgtgtgaatgacagtgtggtgattcctcaaggatctagaactagaaataccatttgagccagtaatataattactggtgcatatacccaaaggattctaattcattctactataaagacacatgcacacgcttgtttattgcagcactattaacaatagctaagacttggaaccaatcaaaatgcccatcaatgttttactgtataacaatgttgtgacacttatacaccatgatatactatgc

SEQ ID NO: 680629 - DNA, 384 bp, Homo sapiens
  misc_feature (11)..(11): n is a, c, g, or t
  misc_feature (114)..(114): n is a, c, g, or t
  misc_feature (117)..(117): n is a, c, g, or t
  misc_feature (328)..(328): n is a, c, g, or t
  misc_feature (372)..(372): n is a, c, g, or t
  misc_feature (379)..(379): n is a, c, g, or t
gcgaaggaagncgccgctttttgcttaacagtgcttccccacggttgtcttaggagccaagtccccgaaggcttggcaaacgcgggagccctccggtggcagcgcttgggtgtnggnctccgaggctccggcctgacctctccacggggtccacaggaacgtctccggctgccaggagtcgcaaggggccgagcaggatgaggaaaccacaggcggagtccgggggaagcagcgtggcatcccagcctcaggcctgccaggacggtgttcgggtgagtctcccgagaagtcgtgcccccgtgatctcgaggacaggtccgcctgcgtnccgagggctgttctctcagccgagggttgttcccctcctcttantcccgcncacga

SEQ ID NO: 680630 - DNA, 262 bp, Homo sapiens
accattatgtatgagcttcctccccatctccccattttgcagatgaggaaactgaggcccagacacattcacaaaagtgcaggagagctcatctgactgcagactcagtgtgtaacctgcaccctgtgcaccacctaatggattcagtctggggcacttggcacgggccttcagtttgcatcggaggcgagaggttcgggtggatattccacctgagaatgcttgggttgtggcgacagttggggtccctgcgggggtagtg

SEQ ID NO: 680631 - DNA, 611 bp, Homo sapiens
  misc_feature (283)..(283): n is a, c, g, or t
  misc_feature (288)..(289): n is a, c, g, or t
  misc_feature (307)..(307): n is a, c, g, or t
  misc_feature (316)..(316): n is a, c, g, or t
  misc_feature (320)..(320): n is a, c, g, or t
  misc_feature (322)..(322): n is a, c, g, or t
  misc_feature (326)..(326): n is a, c, g, or t
  misc_feature (335)..(335): n is a, c, g, or t
  misc_feature (339)..(340): n is a, c, g, or t
  misc_feature (345)..(345): n is a, c, g, or t
  misc_feature (347)..(347): n is a, c, g, or t
  misc_feature (366)..(366): n is a, c, g, or t
  misc_feature (368)..(368): n is a, c, g, or t
  misc_feature (370)..(370): n is a, c, g, or t
  misc_feature (402)..(402): n is a, c, g, or t
  misc_feature (411)..(411): n is a, c, g, or t
  misc_feature (417)..(417): n is a, c, g, or t
  misc_feature (420)..(421): n is a, c, g, or t
  misc_feature (423)..(423): n is a, c, g, or t
  misc_feature (430)..(430): n is a, c, g, or t
  misc_feature (435)..(435): n is a, c, g, or t
  misc_feature (445)..(445): n is a, c, g, or t
  misc_feature (465)..(465): n is a, c, g, or t
  misc_feature (470)..(470): n is a, c, g, or t
  misc_feature (515)..(515): n is a, c, g, or t
ccggttctaggtgccatttccctggattaccgccctcactggaagggccatactcacagtctccttatcccccagtttatctttaacctcctcttttatcttggactgacatttagcgtagctaagtgaaaaggtcatagctgagattcctggttcgggtgttacgcacacgtacttaaatgaaagcatgtggcatgttcatcgtataacacaatatgaatacagggcatgcattttgcagcagtgagtctcttcagaaaacccttttctacagttagggttnagttnnttcctatcaagccagtangtgctaacnggcncnatantcctgaatnaaanntcagncnagtgacaagctcctggtcntnanatgtcttctcgttaaggagatgggccttttgnggtaaaggntaaaanganngngttctgncatgnttcactattntagaactgcatgacctttantgtgntagctctttgaatgttcttgaaattttagactttctttgtaaacnaatgatatgtccttatcattgtataaaagctgttatgtgcaacagtgtggagattccttgtctgatttaataaaatacttaaacactgaaaaaaaa

SEQ ID NO: 680632 - DNA, 118 bp, Homo sapiens
ggttgagcggtagtacttttgggagacctgtatatcccaaattcgccgttgccactttatcacccgcctgaatcctgggattctagtatgcaataagagatgccctgtgtgcaaagta

SEQ ID NO: 680633 - DNA, 455 bp, Homo sapiens
ggcaggagacccttgggagctactgcaggcctccagggcatacacataggatgcgatcttcgacgcagggcagggagaggatccttcggggccaagagggaccttggaggtgtaaactgagtgaagtacctatgtattggacacaggcaacggaggacgggtatttggggttagtgtctactgctgactctgttactaattcaccacgggccctaggctcaatcgctccctgtctcaggttctcaggctctagtgggtaaaaggaaggcttggactaagctcccacagtgagagtcgagagagttcagtgcaggccccgcgaaccctctggctggaagtgctgtttgcccgggaagcatgatgatgcccaccgccgcgggcgcccgagtggctgcccagtccggtctgcaggcctcgtcgcctgcggagggggcggcgtggggaccaagcggccg

SEQ ID NO: 680634 - DNA, 282 bp, Homo sapiens
  misc_feature (21)..(21): n is a, c, g, or t
  misc_feature (104)..(104): n is a, c, g, or t
  misc_feature (133)..(133): n is a, c, g, or t
  misc_feature (178)..(178): n is a, c, g, or t
  misc_feature (239)..(239): n is a, c, g, or t
  misc_feature (248)..(248): n is a, c, g, or t
cctcaggctccgtgtccaccntccagcctcttctcctccgacaacgaggactcgtcctacagctcagacgacgaggacccggctttctgctgcagacctgcctnacccaccccgtgcccaccctcctgcccanccgagccctgcgctccaagcagcgccctcaacggcatgcccacgntgcttcctgtccagggccacggtggctggcaccggtgcgctcaggccccagcagcagcagnaaatccaantcaagcgcaaagaggccctgagcttctccaaagc

SEQ ID NO: 680635 - DNA, 197 bp, Homo sapiens
ttccatgcttattattctatactctttgttgttcctttcgcgctctccttcacatcctctctgtctgccttctatctccttcaccgtactgtctgtcaaatgacagtagtcaccctgctactcatccgatcttgcatttaggattaggtccagacttccaggtttggctttcaaagccctgcacaactctaaagcac

SEQ ID NO: 680636 - DNA, 421 bp, Homo sapiens
gatccattgttattgcgatccgatgatgttacagtgattttcgattgtctcgaggtttcatccccgtgaatcaactgaacggtagtaatgatggcgtcctcacaggcattagggagtctcggtattgagggtcatctcgtagtcattttaaacagctgtgaactgctttgttagcattcttcagggtgcctttcggagaaataatacaccttgtacacttcaaataagagggaaagaacttgtccacttgctcattgaaagctgtagctcggatttcaccactttcgtcaaccagttctagggagaaaagcttcccttcccctcggaagttgtccaggtacggatctgacttctgttggtaacacgagcacaaatggtccacttggactgctaggagtgaggctggcaatgggcaagtaga

SEQ ID NO: 680637 - DNA, 322 bp, Homo sapiens
tagtctggccagaatagtgaggccccatctctactgaaagtacagaaaaattggctgggcgtggtggcgcacgtctgtggtcccgggtacttgggagtctgaggcgggagaatcgtttgggcccgggaggcggaggttgtggtgagtcgggattgtcccattgcactccaacctgggcgacaagagcagagctctgtctcaaaagaaaaaaaaaattccatcataaaagaaaaaaaattcaattgtaaattccagttttttcagtgtcaacatccagttgtttatgtccagaaaataaaaatacaattgatttttgtaaaaa

SEQ ID NO: 680638 - DNA, 550 bp, Homo sapiens
  misc_feature (24)..(24): n is a, c, g, or t
  misc_feature (57)..(57): n is a, c, g, or t
  misc_feature (59)..(59): n is a, c, g, or t
  misc_feature (62)..(62): n is a, c, g, or t
  misc_feature (145)..(145): n is a, c, g, or t
  misc_feature (181)..(182): n is a, c, g, or t
  misc_feature (192)..(192): n is a, c, g, or t
  misc_feature (228)..(228): n is a, c, g, or t
  misc_feature (247)..(247): n is a, c, g, or t
  misc_feature (284)..(284): n is a, c, g, or t
  misc_feature (396)..(396): n is a, c, g, or t
  misc_feature (479)..(479): n is a, c, g, or t
  misc_feature (488)..(488): n is a, c, g, or t
  misc_feature (499)..(499): n is a, c, g, or t
cccccgggagtcccccgaggggtnccccccaaaatggagggcctgccacatgccccngnccngccctccgaagtattcccaataccccgcctcagtattttaaaatggaaggtgatcccctaagatttggtttgggaccaatagnaaagcatatgcagccacccaagatgcaaatgttttnnaatgatatcnccaaaattttaagtaggaaagtcacccaaacacttntgctttcacttaagtgtcnggccccgcaatactgtaggaacaagcatgatcttgtnactgtgatattttaaatacccacagtactcactttttccaaatgatcctagtaattgcctagaaatatctttctcttacctgttatttatcaatttttcccagtatttttanacggaaaaaattgtattgaaaacacttagtatgcagttgataagaggaatttggtataattatggtgggtgattattttttanactgtatgngccaaagcttnactactgtggaaagacaactgttttaataaaagatttacattccacaaaaa

SEQ ID NO: 680639 - DNA, 120 bp, Homo sapiens
atacaatataaatctgtcagacactacagccatcaaaagagagcatctggaattacagccagcttggaagtatacagcaataatgttgcagatggaatattatttagtagttaaggtcat

SEQ ID NO: 680640 - DNA, 640 bp, Homo sapiens
  misc_feature (40)..(40): n is a, c, g, or t
  misc_feature (122)..(122): n is a, c, g, or t
  misc_feature (168)..(168): n is a, c, g, or t
  misc_feature (171)..(171): n is a, c, g, or t
  misc_feature (174)..(174): n is a, c, g, or t
  misc_feature (191)..(192): n is a, c, g, or t
  misc_feature (195)..(195): n is a, c, g, or t
  misc_feature (225)..(225): n is a, c, g, or t
  misc_feature (240)..(240): n is a, c, g, or t
  misc_feature (249)..(249): n is a, c, g, or t
  misc_feature (260)..(261): n is a, c, g, or t
  misc_feature (272)..(272): n is a, c, g, or t
  misc_feature (282)..(282): n is a, c, g, or t
  misc_feature (290)..(291): n is a, c, g, or t
  misc_feature (300)..(300): n is a, c, g, or t
  misc_feature (315)..(315): n is a, c, g, or t
  misc_feature (321)..(321): n is a, c, g, or t
  misc_feature (339)..(339): n is a, c, g, or t
  misc_feature (374)..(374): n is a, c, g, or t
  misc_feature (486)..(486): n is a, c, g, or t
  misc_feature (569)..(569): n is a, c, g, or t
  misc_feature (578)..(578): n is a, c, g, or t
  misc_feature (589)..(589): n is a, c, g, or t
ctggagtgatgctagcagacccagcttagagctcctctcnctctccaaagcccttcgccccggaggaagctccccagcttcagctcaactcacagcctccccaagcaccaccccgggagtcnccggagggctctcccataaatgagggccgcacatgcccgtcctgcnccnaanaacccaataccgcccannatnaaaaatgaagagaatctaagatttggtttnggaacaataggaaancatatgcanccaaccaaganncaaaagttcanaaatgaaatnaccaaaanncaaagtagnaaacccacccaaacncccccncccccacccaagtccctngcccgcaatactgtaggaacaagcatgatcttgtnactgtgatattttaaatacccacagtactcactttttccaaatgatcctagtaattgcctagaaatatctttctcttacctgttatttatcaatttttcccagtatttttanacggaaaaaattgtattgaaaacacttagtatgcagttgataagaggaatttggtataattatggtgggtgattattttttanactgtatgngccaaagcttnactactgtggaaagacaactgttttaataaaagatttacattccacaaaaa

SEQ ID NO: 680641 - DNA, 752 bp, Homo sapiens
accgatgaggtccaccgacctctaccccagaccctcccatacgccaataggctccctctgcccagttgaagtccccttcgcccacagcattcctgtcatccaggcatcatcccaagggtggccccgtgtcctgcaggtggtcaggagaagtgcagcgctctcctcagacaccagtctgatatgtcaccaggagagagcgggcggtccgtcagctgtatgctcttttcattgtctctgtgggacgtcgtgtctggctcctcaatgaagaccttggaaaaagcacatggttgtagaggcggcattcgccgggcagaaccatgtcccaaggacaactggttagctgaggccaggcgtgacaattcataatacgcgacgcgaccaacttgtcgcaactggctataggcaaagggggcgcgaaggcgacagctaaggtcaccaaactattagtatgtcgacgacttgggacaccgtttctccgtaaatagtgtcaagcagcagtcctttgccacgccgccgttggactcttatgcgttatgaagaggggggtctatgccgctctacaatccattctagaacctcttggatacgggtgatcttgataggctctttccaatagcaacgtgtacttgcttccgttaattctgtctctcgtatgaaccggttgacgtcccagaggacctcgtggtcctcaacttatccgttgcttctctgtgggctgtgccaatggggctgaagtgtgaagtaggccccaa

SEQ ID NO: 680642 - DNA, 116 bp, Homo sapiens
  misc_feature (71)..(71): n is a, c, g, or t
  misc_feature (80)..(80): n is a, c, g, or t
  misc_feature (107)..(107): n is a, c, g, or t
catagaacaggtgccacaggaatatctgctggtttctggagacagatgtagatctgtgataatccaccagnagatattcntgcgggacatagaacaggtgtcacagnagccgtcat

SEQ ID NO: 680643 - DNA, 956 bp, Homo sapiens
gcgcggtacaggtgatctgactctctgaggctcatcttgcaattgttgaaatggtgcccggagttgacaatcatgtctgataccagtcagaatccttgtgactggagcagctggtcccataatagtccagtattcactgctgtactagtgatttgcgcaaatcgtgagtcttgtctttggtcaaggatctacgatcttataattgcattgtgcattgtgggatatcaggcccccgatgaatgggtgtcctggcacggtgtgctaatggagatcctgctagatgagatgttgtcccttggccctgcctgtagatagagtgtcatcgccaaggagcataagaggcaagactgtggccttcacatgacctggagtgtgggcattctggtgcgtgctccatgccactgaatggggtaaggccatggagaggagtcacggatttactgaaagtcgaatggtgatcatctttcaagagtcccagagtgcgaggccttagataaatttacggccacgaagtcagttgaaggttgatctgtgggtcgggtaatccagcccaataccaactgtctgactgcttgccaagtcagctccatgacatccccaaggagaacttcagttgcttgactcgtttggaatcacaacgagcttaaagctcaaatggttcttaaaacttggtgtgacggtaatgatgtacagaatgtcatcatctggggacagcattcctcgagtcaatatccagatgtcagccatgcaggtgcactcgcaggaaggcaagggggtacgaggctctgaaaaaagacggggtccggagactggcgcgacggcaccgagtgcggcggtgcaaaggtcaaccatcacggccattttgggaaccccttggcgtcggcggtggcccagggaggggagggggactggacccagggggcgagcacccggaaaaacggggcccaaagaaaaca

SEQ ID NO: 680644 - DNA, 220 bp, Homo sapiens
gccacataacacaacttctccttaatggcacccaccaattcccgctccgccctggtggtgaaactggaacccggcctcgggaagaatcttattaaggaatcaagcaggtcccggccagccaggtccagacccaggatggcatgggggaaggcctacccctcgtaaatgggcacaatgtgggtgaccccgtcaccggagtccatcacgggcactggttgga

SEQ ID NO: 680645 - DNA, 105 bp, Homo sapiens
tgccctttttttatcaggtaagtttgtgtgtattctaactgattgtattgaacaaatatcctagttatttcagtaaaaatgcctgtggtgagatgaacctcctgt

SEQ ID NO: 680646 - DNA, 244 bp, Homo sapiens
tcccggcacgccgtacgattgcgtgatcattgcggtgcgctcggtcatggccgagatgaagcccgatctcgtgctctccggcgtcaatcgcgggcagaacgtcgctgaggacgtgacctattccggcaccatcgccgcggcaatggaaggcacgctgctcggcattccctcgatcgcggtgagccaggcctatatggcgggcgaccgcaccaagatcatctgggactgcgccctgcagcatgcg

SEQ ID NO: 680647 - DNA, 107 bp, Homo sapiens
tcaaggggttagccttctttgtccttgtcctcgctgtccagttatgatgtccagtttctctatcagttttcgctgtcacctaccattatatgataaacgaggggtat

SEQ ID NO: 680648 - DNA, 264 bp, Homo sapiens
gtagatatgagaagctagactttaaagtgtatgtgcaaaggccaggaatagccaaatcacttgggcaaagaggcacaatagtggagagaatgtatattctacaaattttaagatttattatactatagtcaatttactatggtagggcataagcagacatagatcagtagagccgaataagaagttccagaagtagattcatatatataggatatattaattatttgacagagatgctaatttagttgaagaaatgggctttgg

SEQ ID NO: 680649 - DNA, 216 bp, Homo sapiens
ttattcgtgttgcacttattttctaatccctctgtcttccaaagtactcaacctgggcctctaatttggctctgttctcaactcccaattgcaggaacttgaaatcctcaccaaaagcatcattaaagggatagccaaaacggttttggctgccagcattcgagaaatctttcctttgtgtttgggacttgtctgggccccacgagttgaagcatg

SEQ ID NO: 680650 - DNA, 144 bp, Homo sapiens
tgacagcacagaggaggtatagtttggaatccctttatgggaggtcagcaacaaagaagagaaagaacaacaacacacaaaaagagcaagttcaaatccaaggtgggagatggctcctctgtgtgggtaccgatgctcgcaatt

SEQ ID NO: 680651 - DNA, 151 bp, Homo sapiens
gtagatactatgatgtctatgatgtctatgatgtctcatgatgtctcatgatgtctcatgatgtctcatgatgtctcatggatgtctcatggatgtctcatggatgtctcatgatgtctcatgatgtctcatgcatgtctcatggatcatg

SEQ ID NO: 680652 - DNA, 1491 bp, Homo sapiens
gcagcggcggcttgaggacccggggagacctcacgaatcgacccatcaggacgccagaggctgctatcagatggtgaccaccttctccctctaacacattcttcccgttcttcacaaactggcccatgtcagacgaagtgctcaaggtggtgagcctgactgcccctggctgctgccccctgtgactcccagggtttgctctatcagtggtggctggctggatgtgcggcggtggatggcatccttcgtgcttggaggagctacggagacaaactctccctgtgccccccaatgcaatactaccaatggacttggctagcatgattggacatacaacacgctgggcatctgaaggagccaagacccctcactccaggaacactgattgacgtgacggagaatgtgcggtcagatgtgctggcaggaagtgccatgtcagggactggccattccggaagagccaagatgtggagagaaggtaggcagcaagaatgaaggaagctggccatccggagtggctaggtcgacatggccccaattggcccacacacaagttggcttggtagagacgtagccctgcacgccacagggcagagaccaggagccaatgccaaatggacagcagacgccatggagcagagcccccttggcgacggcttggcatagagaccggaaacctaggatgatagcaaggacaaccaatttgggactcaaattgacactaagcaaagaaccattatccatgggacacaaggaataggatcactggggacattttgggaaaccccttgagcagttggagaaaggagggacccagaaggtaaaccatagggtgcaagggagctgtagctagacgccttgagcgaggagaaccatatggacgaagtatggacggagggtctgggacaaacgagagaacatcaaaaatccaagagaaaaccaggagttggccgaacggacccagcgaaacaacccgtctgaggaccgaagaccaacatacaccaaaggaggcaacgccaagaacggcacggcataagcgggacacccatgaggaggtcacaccccaatggaagataacaaacgaataggatatggacgagactgtgacaatgaggaaccccaggcgcaccggccagcgggcggacacacacgagggtagccggcagatccaaaacggcccccctatcatattcagtcgaccaaatccttacacgtgtgtagcaatgaagataccggaaggatcaaccacagaaaagagcctatgtgtacaactgtgaagtatatgaattcatttcccagcaagcagtgaggagacgaggagtataacagagacgaataaagaaagtagaaggagacacctgtgatgaaacaacaaagtagttgtacaaaaaagagtcatggttagaacaaaatcaaaaagaatcaaattacgtagaaaaaaaacaaatggctgagttagtggacaatagatagaaaaacaatgggtgcgca

SEQ ID NO: 680653 - DNA, 801 bp, Homo sapiens
  misc_feature (1)..(1): n is a, c, g, or t
ncatttgtactggcctgaaagttgttgtcagacgagtgtgaagggaagtgatgtggaccacttctggagctggcccgcaaaatctcctaaaagatcatccacgctctctccctcatttaccaaatgcatagagaacatcaaaagacttcctacaatgttgggttagtcaatgaaaagctactggggtcctaaaccactgtgaatcagaccacctcactcatccttctgtcgcaaatgaaccttgcgtgaatacaaaattaaattttatttctttcttatctcttatttttttctgtctttttttttctttttttttagacagggtctcattctgttacctaggctggagtgcagtgcctcattaaagccttgacctccccagcctaagtgatcctcccacctcagcctcaaccggaggttgggaccacaggtgtgcaccaccaaacttggctaatttttttttttgagagataaagtctccctatgttgcccaggctggtctcaaactcctgggttcaagggaatcttccctcctctgcctctcaaagcactgagattacaggcatgagccccgacattcacttaagttttcttttccacaactggaatttgggattagtgccttacaccacttaacttatatggaccacatcattcattcccgtcctcacttcgtgccttttcaaactctaaagaaacccccttctgccaaccaaacgccaaaacatccataaccactcctgatatggcttacagaaggctatatagttaacaaacaggcgttatacatgctggatcgat

SEQ ID NO: 680654 - DNA, 428 bp, Homo sapiens
gcagcagcaggctggaagtaggagggagagcaggtgccggccctgccaccaagtggagagcgggaggggaggtggggagacgaacatcacagagcagccagccctggttcactccgggcagtttcttctcaagctccttccctaggagcatggtggcacgtgcctggtggtctcagctactggggaggctgaggcgggaggatcgccagagcccaggagttggaggctgcagtgagctatgcgggtgcctctgtgctccatcctaggcaacagagtgagaggctgtaaaaaaggaaaaattccttccctagagctagtatcctaaagcggcagagctagcccagacctcatgggtttccttgtcctgggggtgctttacctgaatctgggggggtgcagggagtgtcgctcccagtccagaggcctga

SEQ ID NO: 680655 - DNA, 1770 bp, Homo sapiens
  misc_feature (1255)..(1255): n is a, c, g, or t
ggtggtaggaggcattgagagggagtcggggtggacgcgaggagccgggggcttagaacagaggtgtagcacagcgtggtagattgatgggaggtctgtagtggtgccagtgagtgttgtctgtcccgggtggagagcaccagggctgaatgaatcggagacatccgagtccatgactatgctgaaatgatcactctcatgcacaacggagctgatcgattgtggtgagtcaaggatctatcgaaggtggtcttggactgcgtcgaggaagacagtcataggatcacaggcagtgtgtatggatagcaataacgtcatcaagagagtagcaatgaatgttctgagggcacagaaaagaagaatgtgtagctccagggagcctcggaacagcgatccgcaatagggcatcatagaggcaagcgtcgggggcaaggcagtcagcaacacagggaggaccgcgacaatcggaccgacagtagtagcgagaaggcgcaggtgggaagttagcgtaaggcgggcagagtggtagggatggcctggtcaagatcatacgagcagagagggagtggcttgaaccgagaatggggtgacaaggggggagtggctatagggctatgggtggaggctaagaatggatggggcaatatatggggcagacgaaaggaaaaagatctatgaagaatatatcaggttaatatatgcaattgtcaataacaaggggagagaaaagtgtttgagcaaaagcaaacaggccaagccgaagggaattcattcccaaagcgacgaacacagcaactagagaagcgttcggtacacgaattacgagacagatgtgatgagagttgaggccccgggggggaacccgaggcgtgggttctagaacggaacaccgggggagttacaccacttgggggggcacccaacaataggacaatagaccattgcgatgcagcgaaacttagatgggacgctaacacaaccattcggtgcggaacagagagaacagcagcacagaaacatcgacaggaaggaacaggtccgcgccccaagaacggaaagacaattgaacttagcacacgaaccaggggggcgactaaacaaggccagaggggcaccataggatacaatggggggcaaccgctccgcccaaacacagaggggcaaccctagcaaggactggaggaataaaactgaacagcacaagaccgggagacgagagacatacacgacagtcagaaaagcacatgagcagagnagaacccacagaacagccgaagcaagcgaagagacaatcagaggaaacgagcacaggaacagcagaccacacacaggaacagagcagggacgaacacaagccggagaggcccgcaggggacgactgagacaggaggcgaaaacataggacgaacaagagggacagagaaggacgaaccgaaggaaacgccgagaggaaacacggcggagaagagcaagacacagtggcggacacggtacagcagaaacagagagagacagaggacgagaaagaagaaaagcagagaagagagacgagggacggcgcaagagcacagaacacgacaaacggcgcagaggcccgaagaaagacacagaagagaggaacaaggacatagagaacaaagagagaagaaagagtaaagagaagaacacgaccaacaatagaaacaagacgcaagagacaagcacaagaaaaagcagaaaagagaacgactaaagacgcgaacaaagaggaagcagcgtcgcgaagacgaa

SEQ ID NO: 680656 - DNA, 846 bp, Homo sapiens
  misc_feature (12)..(12): n is a, c, g, or t
  misc_feature (125)..(125): n is a, c, g, or t
  misc_feature (128)..(128): n is a, c, g, or t
  misc_feature (138)..(139): n is a, c, g, or t
  misc_feature (145)..(145): n is a, c, g, or t
  misc_feature (154)..(156): n is a, c, g, or t
  misc_feature (176)..(176): n is a, c, g, or t
  misc_feature (181)..(181): n is a, c, g, or t
  misc_feature (204)..(204): n is a, c, g, or t
  misc_feature (219)..(219): n is a, c, g, or t
  misc_feature (405)..(405): n is a, c, g, or t
  misc_feature (422)..(422): n is a, c, g, or t
  misc_feature (462)..(462): n is a, c, g, or t
  misc_feature (502)..(502): n is a, c, g, or t
  misc_feature (509)..(509): n is a, c, g, or t
  misc_feature (518)..(518): n is a, c, g, or t
  misc_feature (553)..(553): n is a, c, g, or t
  misc_feature (560)..(561): n is a, c, g, or t
  misc_feature (572)..(573): n is a, c, g, or t
  misc_feature (575)..(575): n is a, c, g, or t
  misc_feature (582)..(582): n is a, c, g, or t
  misc_feature (588)..(588): n is a, c, g, or t
  misc_feature (653)..(653): n is a, c, g, or t
  misc_feature (655)..(655): n is a, c, g, or t
  misc_feature (664)..(664): n is a, c, g, or t
  misc_feature (671)..(671): n is a, c, g, or t
  misc_feature (676)..(676): n is a, c, g, or t
  misc_feature (696)..(696): n is a, c, g, or t
  misc_feature (708)..(708): n is a, c, g, or t
  misc_feature (716)..(716): n is a, c, g, or t
  misc_feature (720)..(720): n is a, c, g, or t
  misc_feature (727)..(727): n is a, c, g, or t
  misc_feature (730)..(731): n is a, c, g, or t
  misc_feature (770)..(770): n is a, c, g, or t
cagagctgctgntaatgtccagcaggcctcacggatgtggagtcagccccaaggtgaatccgtgtgtccctcttgaatgccccagggccaaacctgaagctggtgcggcccaaagccctgctggnccnctgcttcctnntcattnctgttgttnnntgctcctgctgtaaacaaanctccntcctaaactggcaggactgtgangtgccaagtcctcantcttgcagcccagagccctcattgcagtatgcggccacccagctgtaccctccgcccccgtggtcccccagctccccgcctcactccacgggctcggtgaggccggtcagggcacagggcgagggcctcttgccctgagcaccctggatggtgactgcggataggggcagccagaccagctccaanaggagttcaactgggtntgagacatcaaggggtggtggtgggagccccccttggganaggacccctgggaagggtgtttttcctttgagggggattntgtgccncagcagggntcagcttcctgccttccatagctgtcatggcctcncctggannggaggggaccnngngaccttnaggtgnatggggacacagctcctggcttctcctggtgctgccctcactgtccccccgcctaaagggggtantnagcctcctntggcccncaacngttagggcccaactgtgggntgcaggggaganagccagcncggngtggccnttnnatgaccccccagcctggcagactggggagctgggggcanagggcggtgccaagtgccccatcttgccatagtggatgctcttccagttttttttttttatttaaccccccccttc

SEQ ID NO: 680657 - DNA, 1094 bp, Homo sapiens
atctccaagaaatgggcagacccgagagcatgcccttctggcttacacacatgggtgtgaaaacaactcaattgtcaggtgattcacaaaatggattccactgcagccacccatacagccagcaagagatatgatgtacatagattaaggaagtcagcacttcacattaagaaacatatggcctacaatacaccgaacaccagtagacaatatgatgcccattatcatggattggaatggtgacaacaatgcatgagagacaaagatgctaacacatgcactatggaatatcacaggagactggaaaagtaaaacgataaggattggcaacggccaggaggaaaccacagcatgcaagaaggaatccagaaaaatgcatcctacacaaacaaactcgatccaaactgaacaaaccatagacgccggaacacaaccaggaaagacatacaaaaaggagagaaaaagagaaaatgtaaccatgataggaccgaagaagagaaaacagagagataccacaaaacacaaaaacagcgagagtcacccaaaagacacccaagaaaaacaaaaacaccaggaaacaataaaaaccgaacaaaaagagaaccaggcaacacataacgacagatggacgccccccacacaggagagaacaaaggagcgaaaacacaaaagacaaacagagaggctccgcaaaacagaatagctccaacagggagaccaaaagacggagaccagcacaacagacgcaacaccgaccccaccacgacaaaaagacagaaggcacaatccagaaccaacacaggacaaacacacccgaagaaaaacaagaaaaagatgccaacaggacaacagcaagcaaacgcaaaaaagaagccacacaccgagcacacagacggaacaaacagcgacaaatacaaaacgagcagcacaggagaagacgagagcaaaacgagacgaccccaaaacacacgcgaagagaagaaaacaaaaaggaacaacgaacaaggagaaacgccggaacacacgaacaaccgcagagagcaacaagcaagacacaaaaaaaggaggaggacgagcaaaaagaagaagagaag

SEQ ID NO: 680658 - DNA, 529 bp, Homo sapiens
tcagtaaagagggggtttcaccatgtgggccaggcgggtctcaaactcctgacctcgtgattcgcctgtctcagcctcccaaagtgctgggattacggggtgagccaccacgcccggcccaaagaaagatttataactaaatatatagaaaagaataattcccatgatttggttttggtaaaaagaagtagggatggtttcctatatattttcaattatgaagtcctgaacatattgggggattttaaagggcctcaaggctaattttaaatatactggcaaatacattataataaaataatacaaccaaatcaaaaagcagccatcttaaaaactggaaattcacaaaaggagctggttctgggctacatacagagggccaacatttaacctggaaatgatatttaaccggtttactaccatagggtaatattcacgcacttcctggggtccaatagagggtggtggaatcaatggtgatcctttaaaaacaaaggtcattacaatctccagaattccccctcaaacc

SEQ ID NO: 680659 - DNA, 94 bp, Homo sapiens
gacaggtaataaaaatgtgggttttattagtccactacagtcacaatacaatcgtcatagatttccccttctgtcgtcttctcgcaacagtata

SEQ ID NO: 680660 - DNA, 225 bp, Homo sapiens
atcactcaccagaaaaggcagaagcatcatctgacttcattattagcagtaatattattcccagaattattattcttaccggctgccagtttatgcacaatcctattgtagctctattatgtgtcatcatttactatctcaaacttgccccatgggaggcagagaatgacggatgcagcagagactgcacgattacattacatgtacgcactttttactgtgaga

SEQ ID NO: 680661 - DNA, 827 bp, Homo sapiens
  misc_feature (35)..(35): n is a, c, g, or t
  misc_feature (105)..(105): n is a, c, g, or t
  misc_feature (113)..(113): n is a, c, g, or t
  misc_feature (141)..(141): n is a, c, g, or t
  misc_feature (147)..(147): n is a, c, g, or t
  misc_feature (154)..(154): n is a, c, g, or t
  misc_feature (228)..(228): n is a, c, g, or t
  misc_feature (271)..(271): n is a, c, g, or t
  misc_feature (280)..(280): n is a, c, g, or t
  misc_feature (300)..(300): n is a, c, g, or t
  misc_feature (565)..(565): n is a, c, g, or t
  misc_feature (568)..(568): n is a, c, g, or t
  misc_feature (572)..(572): n is a, c, g, or t
  misc_feature (588)..(588): n is a, c, g, or t
  misc_feature (605)..(605): n is a, c, g, or t
  misc_feature (631)..(631): n is a, c, g, or t
  misc_feature (637)..(637): n is a, c, g, or t
  misc_feature (655)..(655): n is a, c, g, or t
  misc_feature (667)..(667): n is a, c, g, or t
  misc_feature (679)..(679): n is a, c, g, or t
  misc_feature (727)..(727): n is a, c, g, or t
  misc_feature (759)..(759): n is a, c, g, or t
  misc_feature (800)..(800): n is a, c, g, or t
agaactttattggaaaaatgtccaacaagttatancactagcagctgatggggctgccaggtgagagggggagcacctgaggctccatgagaagacattggagtngtgcagtncagcatctgcctctggggtcagacaatncctttnatttgcnggggtaagaggagtccccacagaaacacccctctctgagggccagaggcaagaggtggggcagccggggatgcncagagtcctgaaacaggtgaaagggggcccccatttgggaccnaatggagtngggtacaactagtgactttnccctggaccggggaatggaaggagaaaccccacctgaaacccactccccaggcccaggggcacagactctgaacagacctacctcctggctctgctcacagtggaaagaggatgggtaccaggcctgagattgtgggagttgcaatcccctctgggagtctcgggcagaccaccaccttgggctccccctgaccccatccctatccccagttgttagtgcatctctcttctgggtgtgtttcttcactcaaacgtcgatggtgtnganaganggggactttttctgtnttgtccccactggcctnccctgaggactctgttccggcccctntccctnctccttgggattgttgtnggagtaattgtncttgaagaagtnatactgacggcagaacagcccaattacagcagcccacatgagctacancaccacaatgatgaacacttccccagtttgcngtggccgctctccatccagaacttccactgtgaagtaaccngggcttgaactgtttgaagggagcggg

SEQ ID NO: 680662 - DNA, 131 bp, Homo sapiens
agtaaagactagcaagcagcggaggctgtagtattcagtgaacactatatatcctttacggtcctccatcttcaagaaaagtagaacggactacaggtcttgtagacacacacacctcaccaagctcagac

SEQ ID NO: 680663 - DNA, 223 bp, Homo sapiens
  misc_feature (24)..(24): n is a, c, g, or t
  misc_feature (47)..(47): n is a, c, g, or t
  misc_feature (78)..(78): n is a, c, g, or t
  misc_feature (82)..(82): n is a, c, g, or t
  misc_feature (192)..(192): n is a, c, g, or t
tcgtgaagcccattttcagtcggnacatgaacgtggccaagcggagngtgcgcgagttctagcgcggctggtatcganaggngccgaacactgtgcaccaattccagctggacataacattgtgaaaatgggacgggataaagtccgagaaatgtttatgaagaatgcccatgtcacagaccccagggtggntgatcttctggtcattaagggaaagatcgaa

SEQ ID NO: 680664 - DNA, 157 bp, Homo sapiens
tgtgtaacattttttttaaattagccatgcatagtagcatgtacctgtaatcccagtacacaggaactgaggcagaagaatcactcgagtccaggaatacgaggctacagtgagctgtgatcatgccactgcactcccagcctgggcaaacagagtg

SEQ ID NO: 680665 - DNA, 1068 bp, Homo sapiens
  misc_feature (937)..(937): n is a, c, g, or t
gtgtcccccagtagccttcatgtttatcctagaccctgcaaagcaggtgggcttccacgagagagtgcaatctccctccatagagttgcgcgtgctcctatgccgctaccaatgttgtgtgaactcgttcgctcaggcagattcgaatgctatgacgtcttagcaacaagggaggacgtcagaagagacctagagccgtgaaactggaagtggttcaggtttgcggtcgagagacttgcatcctggaggaggcatctggctggacaagtggtgaagcaggtcagaaaacatctcactattgagcccacgtaaggccacccacatggggcctgagacaatctccagatagcctcgaagaagtcgtctgaccaggatggaggggtatcacgagaagggtcccgtatgggaatacccccaagtatagaagcgaaggcaagcatatggtctgggggaatcgtgggacgacaagtcttaaaagggcaacatccaggagggtgagattgcgcgtgaatcttattgacatactgcgaggcaattgttgggtgggaaattgattattccctctaaagtttcgggccacttgaaagggtggaggagaggcactttaattttgggagtttagacggatgaattaggctgtgggttggagggattgagggaatttgggtggattgggagagaaggatcgtttggaggagataacccccaaaggggtggaagattaaacgctggattagggggtttagagagaaagggggggtttcaatcccggaaggggaacgattctccccctttaagggggccttaagtttctcaagaatcgtattcatgtaggggggaatagctcatgtgataaaaagtacgctggaattttttcacttacaattgtaccccatgtagtatgaaggtttgtcttttgggaaataattacaatggncagattatcggggtggatggatttacggagaaagagagagaatttaatgaaaccatatggtgtgattagaccccctgggtgagtctatttgaaatggggatttttacaggagttggtaaaggctccccttg

SEQ ID NO: 680666 - DNA, 276 bp, Homo sapiens
  misc_feature (142)..(142): n is a, c, g, or t
  misc_feature (246)..(246): n is a, c, g, or t
cgctcggggtggggcctcgcgccctagtgccggccggcctcagcccggctctgcctgttgctccctgcagtgccttcggcatggccctgctctccccgcgtgtgcgccaggcctggcgtccccggagacaacttgccctcgncatagggacgtggggtgcaggcgccaacatcagtggcagcagccagggccgtggtccagtcccacttcgggatggagtgggccggcgccaaaccagtcactcgnggaggaatgcggaggagcgctcattccatt

SEQ ID NO: 680667 - DNA, 276 bp, Homo sapiens
agacgacgttatctggagccactgtaagaggagcatacaaaggaggcgtccaggaacttggcagagcaacagcgccggcaccgcgagcgactcctacagtcaacgagcctggcagacaagcccatctgaaggactagaggcaggagctggatggacatgaccacaacaggattaaccccaagagcttcttcatactgcatgacatcaacagagatgcggacctggatgagcaggagctgctggcactcttcagccaagagtggagaaagtgtacga

SEQ ID NO: 680668 - DNA, 1047 bp, Homo sapiens
tggcaccgcgcgggacggagcttggctgttggtcggtgggttccctgtgcggtggtgtgccatggaggatggagacacatgttggatgcagctccgtgggctgactggggcgatggcctcagcagcgcgagcttgagtgcggccgagcctgctggctgccttcaccatgctgtggtgggtgacgagacgtggcccctgctggcagtcatctggatgtgtgaggagccagcactgtgcctctggcctagcattgtcgtgaagctgggctgaagtgacgcagcaccatgtgaagactggactggtgctgccacctagagaacggacatagagagccagtacccactgaatgtgcgagatcagacggccagggtgtgacttggcaacgtgtgcgccagcaagaatgtgtgtgcttggaggccagctgagcccggaggagcgcacccaccataagcacgtggaaactcaagaaaacttggctgtccgcatctggacgacccatgcatcaaaccgaccaaaacaaagacactgaaaggtattgaacgctgtggcacacatacaatgcttcagtatggagtaggcacctgcactcttgagcacatacctaaacaaacaaccaaagaatttcacacacacacgtatactctaccttaaactcttggcacgacgagtcagtttcgaccttggtacaaataaaaaaaaatttggactccacaaacaacatcgactgagtccaacgaagcgggcaccggcggcttatcccattgtctccacacgacttgcatgtccacgttggtggcacacactgtccttacacccatacatagccaccagcgctggcttggcgcgctgtccttcgacccttccaatctggccttcggcctaatgcaccgaccccggttcaagacacaccttccatcggcgctcttgactcccttgagcccatgagcgaaagccgggagctcttagccagcttgcgaggtagcctctgcattccctgcccacttcgcaagcagcaggtctcgttcccttccacacacccctgcatgc

SEQ ID NO: 680669 - DNA, 251 bp, Homo sapiens
  misc_feature (133)..(133): n is a, c, g, or t
tcacactggttgttgatataatccgtcacactggttgttgatataatccctcacactggttgttgatataatccctcacactggttgttgatataatccctggtcctggacttttatttgtatggagtgtttntaggacatattcaatttaatgtctagtgatcagtcttcaagattttgcacagaaaaggaaaccaaaaagaaaataaaaagacaacttacagagtgggagaaaatagtttcaaatgatg

SEQ ID NO: 680670 - DNA, 154 bp, Homo sapiens
cgatcctctccgaccctaaagccaaaccatcagccatcagcactcaccatccatcaccatccaccattatcaccaaccatcatcaacgtcatcaccatcaccaacaccagagcatcaccaacatcaccaccatcatccccaccatcatagccac

SEQ ID NO: 680671 - DNA, 440 bp, Homo sapiens
agaatccctcaaatatgcaagtggtagatggtaggctctgcctcacgggctatctaggggagcaacagtcggtccagagtggacgagagggggacagtagcttcgtcagagctttgtcacaaaaggagatggaggggaagattcaccggacagctggtgaggatcatgttcctgggaacgaaggccacgaggagcccaatcattggagattctgagctggggccacgatcaagagtctcacagaaagcatgtccttcaccaattgcctgtgacatctactgtgcctactgaggccacaggaccctttggtcctgccctggcatgacctccctggcggtgttcctacagacgagaagaggctctgtgcccagatgccaggttgggcctggctgtcttctcctagagcaggtggagcaagaggctggttatcctaacagtgt

SEQ ID NO: 680672 - DNA, 672 bp, Homo sapiens
tccgcaccccgggtagtgtagtgtagagtgagagagagagagagagagagagagtgagagagagagagacccactgaccgccttttagacttactgtctttttttcagagccccatttcgtgtgtcacccctagtcaacccctctctcttcttaccttgctcgttaacttcaccatgttttttacaaccgttccccaccctgtctttttacttaagagattcctgtttttctctttctttcggaaattcttggaccccgtcgattctttccctaagctttctcccttcccttgtgtgaactttttttctgctttttaattgtcccgttccgctttctaataaccctcccctattacttttctttccctcccagaaacccttcattccccccttttttttaccagaaaattgatttttctccctatttgaccttttgtctcttttttttaaatgctcgaactttcaatcttctacccttttttgcacatccacctccaaaaccccttgtttttgtggtcttcctctttttgtttaacttttctgttggggttcaccttttttttttttccccccttgttgattctttttctttctttgttttttaaggtttttaacccttttggccctgtcccctctccttcccctcttttttccccgttttacattcttgcg

SEQ ID NO: 680673 - DNA, 682 bp, Homo sapiens
tgggacccgcggttgtttaaaaccctgagggaccctggaggggggcccccactctctaccttcttccctccgcagtttgtgacctccgagatggcacaaagtgtgtcgctgtttttgggagggcctcccgaggctattggcagagctgtgcgcccagttaatgcgcccggaaaggctcaccgactggcggctcattggccagaacacctggaagggcgccaaacgccgccgcccggtgccccctcggcgggagaactcacttggcgcatttttacgctgctgactgcttcgcttaaacagaccctgtggactgttccacaaccactaccattttgacagcacgcacgtggacgcaacacctttctagcgctccgagttaaacaccttctcctgtgcgccaacatctgccgagctgtgcgttcttaaccagcggcaagtgcgcccctctcttacgctaacagacccacacaacccttgaacagactaagtgcgtcactccctcaagcctctcatatactataaccctctttgcggctccccagtgcgtgcaccgtgttaaaaagctggccattgaaggcactcatgcatctcaacacacccgggcaggcctcttatgcgctccagtgtcgcgaacgcattgccggcgctcaaaaaggccaccctctggccagtcccgttcacg

SEQ ID NO: 680674 - DNA, 302 bp, Homo sapiens
tgctcgactgtggccgtgtatcatacccatcatgtggtactgatatactctggtagatcaacaccctcgtccattcagcgtatatttcttctattgtgcttctttgcgggactcgaatacgataacttatgtactgttccatgtcatgtctgtatcatacagttagtgttgccagtgaaacgttcccagatacaaagaattgtgcttttaattccatttcacaatctgtttttttttttttgtgtcttgtgtctgaccaaaatttctttcgtgcacatgaggccagtataggcaacgttcac

SEQ ID NO: 680675 - DNA, 1715 bp, Homo sapiens
caattataccctagtccatccccttaacacccttccctcacatcagcccgaactgatatttcgctattcgccttacacatgtctctccggatccgctccctagcccaaccctacgcgcacgcgcgctccctctgccaccctccctctcaccctcactcgccacctcacctccactcactagcgctacactcaccacctcccccatcatcaccatcacacctactacctcgctacacctccccaccccacacaccccccctacccctactccctccgccacccaccctacaccccccacaccatcacccactcacctcccgcacccacacactacccccccgccaacaccaccatccatccaactcaccatacaccacctagcacaaactccaccgccacccgcacccacacccccaacccacaacacaccctaactccgccctctctcaaccccccaactccactatcgcccaccacacccctaacccccactcccccgcctcccctctacatcccactctccacccacacccacaccttccccataaacctcccccaaaccacctacacccccaaaacaataacatacctctccccccataaacctctagcacaatacaacccaaacaccacccacacctaccaaaacaatctgccgacccccacttaacaccacacaccactacaacaccacacacaaccacaacacaaaccacaccaccacaaacaccacaaacactacaccactctcccccccgcatcacacctacgctcatactcatacatcacactttctaccactcacggcgccgccgtacgcgcccgctcccatcctctgctccttccgcagcctcacatcccccaacttcaaccatacatctgtcgctacctcagcggctcctcgctccacccctatcatcccgctccctcccagcagccggtcgcagacacacagcacgccatcgaggtctcttccatcctcatccaccctctcagcgacaaaacaccacaccacgccccggcgtgctcacgctccaccactcatcgcactctcgcagcaccccgctcgcacgccgctcgccacctctaccgctcctcccacctccactccaaccccctccaactcgcagccaccagccactcactcccgacccctcgcccaccctcgtccatcgccgacgactctcctcgtacactcatcccagctcaagacacaccacagagatcaaccgcgccggcccagcgccacacagaacaaccacggcagactactaactactccctctactcatgctcaccataccacactaatgataccagcaacgagccacacccactccccagaccacccaccacacatacccaccacactaacaccaacaacgatcaaacataacaacaccaccacccaacacccacaccaccacactaccaccacaacccccaccctcccaccccccccccccccctccacacacccacacacccacccgccaccaccacgccagacacacacccagcaccaccccacaccctcccccccacccgcccaccactaccccaaccacaaccccacccaccccacccccctcacacaacccccgacacctgtcccccaccccaacaaccacctaccccccacccccacccacctacttcacccagaccccggacgcacaaaccacataaaaccaagaaacgaccaaccaacacaa

SEQ ID NO: 680676 - DNA, 1171 bp, Homo sapiens
  misc_feature (584)..(584): n is a, c, g, or t
  misc_feature (770)..(770): n is a, c, g, or t
  misc_feature (781)..(781): n is a, c, g, or t
  misc_feature (836)..(836): n is a, c, g, or t
  misc_feature (888)..(888): n is a, c, g, or t
  misc_feature (985)..(985): n is a, c, g, or t
  misc_feature (990)..(990): n is a, c, g, or t
  misc_feature (1005)..(1005): n is a, c, g, or t
  misc_feature (1033)..(1033): n is a, c, g, or t
  misc_feature (1073)..(1073): n is a, c, g, or t
  misc_feature (1076)..(1076): n is a, c, g, or t
  misc_feature (1104)..(1104): n is a, c, g, or t
  misc_feature (1171)..(1171): n is a, c, g, or t
gagaatgcttgaacccgggaggcggaggttgcactaagccgagattgcgccattgcactccagcctggtgacaagagcaaaaatacatctcaaaaaaaaaaaaaaaaaaaaatgggggttttccaattttttgccaaaaggccccattaaaaaaatttccaattccagtggcgagcaccatacttttgtgtcaaccggcacattcaccattggttgtcacgtttcgtggccggcccaggggccacatattttcttccaacatataattaaaaccgactatatttggaaaaccccaagacgccaaacttttcccttggacaagtgtgaaaacgattcctctttaagaaatgtggaaccaccggaaggttcgcccatttttccaccaattctaaatccatatatgcgtcttcggcacattacttaacgttgtgtccaattaaggacagagagaaagagaattaaagcagcggtcgtctggattggggcacacagcgcagcaccgtccgaattaactcttctgggtgcgcgcgagataacaattggacatcttattatttagaggaacttccttaaaagagatctcnctcctcaaaagagggtgtggctcgatgctttttgcgaccgaacgcgacttttccaggacaaggggctgccaacgagtgtgtacactctctactttactacaaacttctgtcgtcgtttctttctaatacccaattaaatcaattcaggggcgggagcggagaattaaggacttccaattaccattntaaaaattacngtctcgcacaacaacaacacacaaaaaaaagaaattgtgtgcgcggggccgcccngagcccagaagaagagtatttacaacacccatctctgctgtgggcgccgggngcgccaaatagggatgagtgagcaactgtggcgcacagcttctcgccccaaaggagagccccgtgcgctcgagagtcgcgtggcgtgtccgcccccnaaaanagaacccggcagcgnggcgctgcgttctcgagaacttccctgngtgctttcgggcttttccgttcgcaacggtcccagtctcnccncgctgctccgctgcggtgcctcggcggnaacacacaacagaaaggcgccaatcgaatcacgctgccccatcatagcaagctagacagaacaagan

SEQ ID NO: 680677 - DNA, 162 bp, Homo sapiens
ctggtccccgccagcgcgctttcctgtactgcaacgggctaaggcacactgctggcggaagtgatggcgcagggtgctggcatttgagaaaccgcaaagctcggcaatctgctcaacgctcagccggctgtgggtcaagtgctgcgtggcgcgctgaaggcg

SEQ ID NO: 680678 - DNA, 725 bp, Homo sapiens
  misc_feature (11)..(11): n is a, c, g, or t
  misc_feature (24)..(24): n is a, c, g, or t
  misc_feature (38)..(38): n is a, c, g, or t
  misc_feature (50)..(50): n is a, c, g, or t
  misc_feature (67)..(67): n is a, c, g, or t
  misc_feature (86)..(86): n is a, c, g, or t
  misc_feature (88)..(88): n is a, c, g, or t
  misc_feature (94)..(94): n is a, c, g, or t
  misc_feature (98)..(98): n is a, c, g, or t
  misc_feature (109)..(109): n is a, c, g, or t
  misc_feature (120)..(120): n is a, c, g, or t
  misc_feature (144)..(144): n is a, c, g, or t
  misc_feature (146)..(146): n is a, c, g, or t
  misc_feature (149)..(149): n is a, c, g, or t
  misc_feature (179)..(179): n is a, c, g, or t
  misc_feature (205)..(205): n is a, c, g, or t
  misc_feature (217)..(217): n is a, c, g, or t
  misc_feature (226)..(226): n is a, c, g, or t
  misc_feature (234)..(234): n is a, c, g, or t
  misc_feature (250)..(250): n is a, c, g, or t
  misc_feature (269)..(269): n is a, c, g, or t
  misc_feature (272)..(272): n is a, c, g, or t
  misc_feature (330)..(330): n is a, c, g, or t
  misc_feature (381)..(381): n is a, c, g, or t
  misc_feature (402)..(402): n is a, c, g, or t
  misc_feature (424)..(424): n is a, c, g, or t
  misc_feature (437)..(437): n is a, c, g, or t
  misc_feature (443)..(443): n is a, c, g, or t
  misc_feature (460)..(460): n is a, c, g, or t
  misc_feature (482)..(482): n is a, c, g, or t
  misc_feature (489)..(489): n is a, c, g, or t
  misc_feature (514)..(514): n is a, c, g, or t
  misc_feature (521)..(521): n is a, c, g, or t
  misc_feature (525)..(525): n is a, c, g, or t
  misc_feature (530)..(530): n is a, c, g, or t
  misc_feature (556)..(556): n is a, c, g, or t
  misc_feature (558)..(559): n is a, c, g, or t
  misc_feature (561)..(561): n is a, c, g, or t
  misc_feature (564)..(564): n is a, c, g, or t
  misc_feature (572)..(572): n is a, c, g, or t
  misc_feature (578)..(578): n is a, c, g, or t
  misc_feature (581)..(581): n is a, c, g, or t
  misc_feature (583)..(583): n is a, c, g, or t
  misc_feature (597)..(597): n is a, c, g, or t
  misc_feature (619)..(619): n is a, c, g, or t
  misc_feature (634)..(634): n is a, c, g, or t
  misc_feature (643)..(643): n is a, c, g, or t
  misc_feature (649)..(649): n is a, c, g, or t
  misc_feature (686)..(686): n is a, c, g, or t
taactttaaanaaatttttattanaaaaaggttgtaanaaaattggatanttctctactttgtacanaattattctcactctccananaaaggntgcntaacttctcanctggggggggnaagcactaaaatcctgattttaananaanagtagtaaaaatgccttagttatttaagtngaaagcagttcactggtacatggctnttgtacccagtntcaggaatntacaaatnttttttattcaaaaanacaaaaaaaattatctgtnggnatggacaatgaaagcagtaaaccattatatattttgtcaactgaaaccagtaactganggttatagtgattttcagccagcctttttcttcattttctccaactgactnctctgaagttattggggaggnacactgccttgggcttcctgtnaaagttcattaanaaaggnaaagcactagtttaggngttagaacatgccaccccccanaccaccncccattccacccattgcacccattncagggtncttnttttntttaggaatttctgttaatacaactncnncngtngttaaaanaaaggncanancagccgcctccaanaaagcagttctcaaaacctttnttgggttaattattnctttttccnccaaantcacaaaatctccagccatagcatcataaccaacttntgagggactttgcataattttctcaactattaaagatcc

SEQ ID NO: 680679 - DNA, 1122 bp, Homo sapiens
gcgtgagtgtgtgtgtgcctgtgtgtgtgccctgtgttactctatatgtgtgtgtgcctgggggtactgagggctacgtgggggcgaagcagaacttgccatggcagcagcggaggaagaagacgggggccccgaagggccaaatcgcgagcggggcggggcgagcgcgaccttcgaatgtaatatatgtctggagacagctcgcgaagctgtggtcagcgtgtgtggccacctgtattgttggccctgtcttcaccagtggctggagacccggccagaccggcaagaatgcccggtgtgtaaagctggcatcagcagggagaaggtcgtccctctttatgggcgagggagccagaagccacaggatcccagattgaaaactccaccccgccctcagggccagcgaccagctccagagagcagaggggggttccagccatttggtgatgccgggggattccacttctcctttggtgtcggtgccttccccttttggctttttcaccaccgtgttcaatgcccatgaacctttcagaagaggcgcaggtgtggatctgggacagggtcacccagcctccagctggcaagattccctattcctgttcctcgccatctttttctttttctggctgctcagtatttgagctctgtctcctccctgcccacctccagctagaggagaatcagtattgggagtcctgtgctggcctttccttgcttttggaccacccccttacttccatgacccatctctgtctgctgaggcctctctcttgggagggcatggcgaggagtgaccagtctgcttaagatgggagtgcctgctgctgtgtactgctggcccagtagcacagacactgtcagcctggaggacggacagacagacaggtgtccagttctaccaatcctttgctttcccccagatttcttgatttggtgtttaaaggtgggctctccccaactcctctacttgacttaatttaatttttctctacccactgtctaatatgaattttgactcttgaagtgtctctttccatccctcactacctcctttaattacaaattcaaataataataataataataaaaataaaaataaaggtgaaacacgttgctggg

SEQ ID NO: 680680 - DNA, 364 bp, Homo sapiens
gaaaaaatctcacgttgaactgtaatccccagtgttggaggaggggcctgctgggaggtgattggaggggtggacttcccgcttgccgttctgtgtgatagtgagtgagtcctcacgagatctggttgtttaaagtgtgtagcacctcacccttggctctcttcctctttcttcggccagtaagatatgcctgcttccccagtcgcctccaccatgattgcaagtttcctgaggcctccccagccatgcttcctgtacagactgcggaactgttgagtcagttaaacctcttttttataacaaattaatcagtctcagggagatctttgtagcattgtacgaagggacgattaaagatcattaa

SEQ ID NO: 680681 - DNA, 791 bp, Homo sapiens
gggattcggacggagagcgcgaggactcggcggcgtgagcgcgcccgacaggagctagaggcgctgctcaacaagactatgctgcattcgcatgacagatggacggacgctggtcggctgcttcctctgcactgaccgtgactgctgatgtcatcctggagctcggcgcaggagttcctctaagccgtcgggtcagtgcccggggaatgcacacccgcgtgattccttctctgccggggagccccgttgtgctgggcctggccatggtaccctggacagacacatcgatttccattaggagtgtgcacgagggagagtctgaccgggtctccgtatctctgaccacgatggcgcttacctttcagcacttcgaattaaaacgtttattgacctgataagggaccaatagaagattggtcccaagactacattgcctgaggcagacttatggccagcggtggggggaaaacggggttcgtcggacattggtggtcgagggagcagatgccggggtccccccttgggacccaagatctcctgttgtgtgatgcccagtggtggggttaagacatgttgcgccgggatgccacccaggtgaggggcggcgggtcactcgaatttctagagaagacccctggggtgccccgcggctgtgaagagaccatggcggggaaaaagggccccaggagagtcacatccgtgggacccagtgagttcgccatcgtgtcagccacgctcttggggtccaaaagcgaccatgactgtatatagcattgagtcatgaaggatct

SEQ ID NO: 680682 - DNA, 175 bp, Homo sapiens
agaaacaaagagggcaacagaaccaagaatttaagcagttatccaatgaggacaagaccagatcttagcacctgatttccaatcactcaaactccctacaaatagttttttgtttaaaacaatcaacaacaatcaggacaatacacctctactagagaaaatatttcgtcgacgc

SEQ ID NO: 680683 - DNA, 234 bp, Homo sapiens
tccagtacccgagcatgcatgaatgcatgcaggacgacgtgtatacacactactgcggtgcatgcatccctgaacaagttccgagcgacacgtgagcaccgtgctgacctccaaatatcgttaagctggagcctggtcgacgtgtattcaccaatgcggtgcatgcctccctgtacaagttccgtcgacacgtgagcaccgtgctgacctccaaatatcgttaagctggagcct

SEQ ID NO: 680684 - DNA, 706 bp, Homo sapiens
tgcattgcagtgtgcgtgtagttcagaaagttatggaaagtttcatcgataagctaagactcttcaccaggtgaggatccggtggaatgggttatcctcgtttaggtggagaacggtggaacatggtggtgatgtctgggttgtagcccagaacagcaatgactttaaaacagcttatggacaggtatcctcggaaacggttgtggctggagtaggagcaaacagctaaaattagtgcactgaaaggctccagaggcataagactgtgaaatccctgtgcctgtgggtatttcagtagacgtgatgaaacatggtaaaattataggagaactcaataaagagaaatgacagaattgtggtagctcaaggaggtcttggtggtaagaattgacttacaagatttgcttaccattgaaaggccagagacgagtaattcaccttgatctaaaagttatagctgatgtaggcctagtaggattcccaaatgctggaaaagtcctctttcctaagttgtgttgctcatgctaaacctggaattgcagattacgcatttacaacattaaagcctgaactttggacagataatgtacagtgatttcaaacagatatcagtagctgatcttccgggtaaatagaaggagccatatgaacaagggatggggccaattctccagctattgaagaataacagtacttgggggaattc

SEQ ID NO: 680685 - DNA, 757 bp, Homo sapiens
  misc_feature (556)..(556): n is a, c, g, or t
  misc_feature (558)..(558): n is a, c, g, or t
  misc_feature (562)..(563): n is a, c, g, or t
  misc_feature (572)..(572): n is a, c, g, or t
  misc_feature (578)..(578): n is a, c, g, or t
  misc_feature (592)..(592): n is a, c, g, or t
  misc_feature (601)..(602): n is a, c, g, or t
  misc_feature (606)..(606): n is a, c, g, or t
  misc_feature (608)..(608): n is a, c, g, or t
  misc_feature (614)..(614): n is a, c, g, or t
  misc_feature (618)..(619): n is a, c, g, or t
  misc_feature (627)..(627): n is a, c, g, or t
  misc_feature (633)..(633): n is a, c, g, or t
  misc_feature (639)..(639): n is a, c, g, or t
  misc_feature (641)..(641): n is a, c, g, or t
  misc_feature (654)..(654): n is a, c, g, or t
  misc_feature (657)..(657): n is a, c, g, or t
  misc_feature (659)..(659): n is a, c, g, or t
  misc_feature (661)..(661): n is a, c, g, or t
attaaattgtgctcagcaacaaacagaacaaagaaagtgaaattttatttgtgtctttcccagatgtggggattttgaggtacaaacagtaacttatttgagaagatccttcttttatcttgcttgtgccataatccaaacacatttactttaatttggaattgttttacgtggctacttttttgaaatgtgaaggtaaatctttaagtttgaaactgcctgagaaacctctaatagcacactttattgagcaaggaaagcagatagagtgcacacaatacttgtgccagtttttattattgacaggccagttattcatgaaatacacaggccaatagagaagccccaatgaaactattttcatgtgcgtgtgtgtgtgtgtgtgtgtgtgtgtgtgtgtgtgaaatatatatcattcactgagagccaactgtatctctaccacatgtcacatgctcatatatgtcatctgaaagcctcactattatatgtgtcatcactacttaatatctgcagatattcatatacattcccagaaatccttactaggaactgnanggtnnatgtgaaanggatgntggggttaaagctntagaagacnnactncnccaatnaagnntataagcnttgatnggtctngncttacatggtaanttntnangattttttattgtttactcttgttcatataactcaaacaaatgcccttatcacatgaagacagttaccaatataatgtattagtgagagcgtataa

SEQ ID NO: 680686 - DNA, 512 bp, Homo sapiens
  misc_feature (11)..(11): n is a, c, g, or t
  misc_feature (165)..(165): n is a, c, g, or t
  misc_feature (172)..(172): n is a, c, g, or t
  misc_feature (180)..(180): n is a, c, g, or t
  misc_feature (208)..(208): n is a, c, g, or t
  misc_feature (275)..(275): n is a, c, g, or t
  misc_feature (307)..(307): n is a, c, g, or t
  misc_feature (340)..(340): n is a, c, g, or t
  misc_feature (344)..(344): n is a, c, g, or t
  misc_feature (396)..(396): n is a, c, g, or t
  misc_feature (419)..(419): n is a, c, g, or t
  misc_feature (430)..(430): n is a, c, g, or t
  misc_feature (507)..(507): n is a, c, g, or t
ggtggactccngggggatatgcccacccacccactgtcaggcccttacccctcccccaccgcccacttcctgtgcctggggggacactggggcgggggggtggactatgggggagcgggggtggggaggatctggttaaactccagaggaaggaggtgggaaccngggagtntgggggcnaagaggaacagatagaaaaaagaaatanggagggggctactgtctttgcctcctccatcacgaaagctttgccctgagatgtctcccttgaagcncagataggaagtccggcggtgggtcacatccngtgacttggcaatggcgcccgtctttgggtgcnggtnggggaacggtcatgcccctgcgacggggggctggggcagtgcacgccccgcngtgccaggccctccatctcggcnggctgcaggcnggctgttggcatgggcctgagccgggagggcggcccgggccctgcgggtctgggcacatactgaggcatagagctcnggctc

SEQ ID NO: 680687 - DNA, 212 bp, Homo sapiens
tcaggccctgacccgccagaccacgcgctcttaccctgctcctcccggcgtcctggctccgggccccttcttggttcttcactctcgggactccaggcgtgtccccgccgcgccggagcctctgccgggttctcagacgcccggcgcgctgactgcggagcgcgctgggctgctggagtccgccaggcccgttcacagccccgaggacgccg

SEQ ID NO: 680688 - DNA, 681 bp, Homo sapiens
attaaattgtgctcagcaacaaacagaacaaagaaagtgaaattttatttgtgtctttcccagatgtggggattttgaggtacaaacagtaacttatttgagaagatccttcttttatcttgcttgtgccataatccaaacacatttactttaatttggaattgttttacgtggctacttttttgaaatgtgaaggtaaatctttaagtttgaaactgcctgagaaacctctaatagcacactttattgagcaaggaaagcagatagagtgcacacaatacttgtgccagtttttattattgacaggccagttattcatgaaatacacaggccaatagagaagccccaatgaaactattttcatgtgcgtgtgtgtgtgtgtgtgtgtgtgtgtgtgtgtgtgaaatatatatcattcactgagagccaactgtatctctaccacatgtcacatgctcatatatgtcatctgaaagcctcactattatatgtgtcatcactacttaatatctgcagatattcatatacattcccagaaatcctactaggaaactgagggtagatgtgaaaggattgtgggggttaaggctttagagacaactggccccataaggctttacgcattgatggtctggcttaccatggaatttaatgccttattcttttactctgttcattact

SEQ ID NO: 680689 - DNA, 408 bp, Homo sapiens
gggggattcacccgcggaagcccgtctggaagactctgtcccatgccttcctcgttagtaactggtgttgctggcattctccttgacttgcagatgttcactctgatccacctccacggtcacacagcattattcctgtgtgtctgtgtcttctcttctttataagaaaccagccattggattaagagcccacccttcttggccgggcgcggcggctcacgcctgtaatcccagcactttggagggccgaggcaggtggatcatctgaggtcaggagttcaataccagcctggccaacatggtgaaaccctgtatctaccaaaatacatgcaaaaaaattagccaggtgtggtggcgcatgcctgtaatcccagctactcgggaggctgaggcaggagaatcacttga

SEQ ID NO: 680690 - DNA, 217 bp, Homo sapiens
taaggttccatgtccagctctcgagaaaattcaaaataatcattgaacttgattgcacacttctctttcccagtcatagtctaatcgctttagttgtatagcaagaacaggaggtaatttcataatcagcaagcgctacacgtgtatcaacctatattatagcatatcttcacagtatatctcacatattccggcgcgaatgtagcatcatctgtgt

SEQ ID NO: 680691 - DNA, 93 bp, Homo sapiens
gaggctggggctgaaagcaaaagcatgcccagggaggggctgagggcctgtcccagacaataaaggtgccctcagcggatgtgggccatgtca

SEQ ID NO: 680692 - DNA, 341 bp, Homo sapiens
aataacagtgcgcagcatacagcagataaacagaccagttgtgtgacacggtatctgcttggcatcgagatgaacacaagcgtcctgagacatgaacacaacacagaagaatctccagaaacatgacgctaagcggagagacgccttacacaaggacatgtacccatatgatccatatagtatgaacctcttagaacagtgcggaagcatagatggagaaatcagcacaggtggcatggtagcagtggacatagaatggaaaggggcataagagaattttctggggtgagggacgtgttctatttgtcttgatggcatcttcggttacactactgtatttg

SEQ ID NO: 680693 - DNA, 468 bp, Homo sapiens
tctggtatgttctctagtagccccagctactcaggaggctggggctgagaagggaggatcgcttgagcccaggagttggtagctgcagtgagttatgatcatgccactgcactccagccttggtgacagagtaagaccctgtttctaaacaaaaaagaaagcaagcaagaaaagaagaggatacaggtcgggtgccgtggctcatgcctgtaatctcagcactttgggaggccgaggcgggtggatcacctgaggttaggaattcgagagcagcctggccaacatggtaaaaccttgtctctaccaaaaatacaaaaattagccaggcatggtggtgggcacctgtaatcccagctatccaggaggctgaggcaggagaatcacttgaacccgggcgaaggaggttgcagtgagctgagatggcgccatagcactgggcgacaagaacaaaatccgtctcaaaaaaaa

SEQ ID NO: 680694 - DNA, 194 bp, Homo sapiens
ggctgagtccttccaccggtcccggccagtcgtccctgtggaggggttgtggaggagggacgcctctgtgtggtcaggaagtgaaggggccatgtggtcgcatgccaatgtgccacctgcggttgttgtctcacctgtcatctggactcatcgcccaggctgctcgtctgacaccttgagaggcgagagagtgg

SEQ ID NO: 680695 - DNA, 841 bp, Homo sapiens
catcatgccatccaaacctgatgaacgacccggaaacttaggggccacgtgagtccacggccacgggcgcatatgcaaggtctccggaaggctccccaggtgcctggcgctgagttaatatgctggctggatctagcatgtaccagccggatcttaaacttcgagcggaactaccatccaggctacatgtagggacaacgttgtatcactagaatgcaattaccactatagagaggaactcggagcttctggcccactggtcgagcccttgtacaaatagtgggaaaactttggtgtcagggtgaacagacacgaggatgcatgcatgctaaaaaccaagtagtgtgaagcgtgttcccatcattagatgtgtgtgctgatacgcgctactagcacaatgttctggcgaaagtggaaagctccccaattattcctagacgtgtcatcgtgtagaggtccatgttcttcagcacaagagctgaggagatgattaagagtgtcggggagcgccctgatgtcctggatgcgacttggaagccacgatgcaagtggagatatcattacaatgcttatttacgtattaaaggaggaaaacgtccctttggtgtaatcatttgtgtcgcattggttggataagcacttatggataacatgtctattcgggagtgacctagtggaaattacacaggggatgggaagggcggtgcatggaaactagtgagaacaagtgtgggattgctacaaaaaaaaatcccggaggaaacagggttttagataaaacccggatgggtgtagagtatacagggaccaagaggaggcaggaagcgaaaataacccgggg

SEQ ID NO: 680696 - DNA, 685 bp, Homo sapiens
  misc_feature (157)..(157): n is a, c, g, or t
  misc_feature (405)..(405): n is a, c, g, or t
tggattagtaaggtcttgccgtgtgctagaggaattacatctgtaccactgtagggtgcactaattacgtgttgctacacatgggacgacaagcataccttcacgctcttgtcaccacactagcgtaagtcagttactctgataatacagtcgatcntcactatcgtacgaatgtgtacactgcacaattaggccccttcgtcatctggaccgtccttaaactctgtttgagagcattgtaaccttgcgcagggctctagccgcaaggtgcactgtcgactcgtgaagaccggtacatgctggccgagtcacatatgcgaacaatcaaaaatcaattgaaaccttttgcctcgatcataaaagcgaatagtctagtattgatcacctaaatttatctgaataatntcgtcactgtggatcataagtctcgtagatacatctctacgagtaatgtagcgaacgctataaatcgctataccgcgcgtgatcgggatttaatactagggaactatcactaacgctagaacgctctttcattagttcgatggcgagggggaacccccaacaactatgtagattatgtatcctccaactcaatattacatcgaagtggcactagaaggttgcacctaagtattggtattagaagcacctacaatcccccaatggtgatcacacccaatgt

SEQ ID NO: 680697 - DNA, 115 bp, Homo sapiens
cgctcacaacagtcacaggggaaggaaataacattgcactttataaacactgtatggtaagtggaaaatgcaatgtcttaaataaaactatttaaaatgggcagggtaccgagct

SEQ ID NO: 680698 - DNA, 887 bp, Homo sapiens
  misc_feature (1)..(1): n is a, c, g, or t
  misc_feature (111)..(111): n is a, c, g, or t
ncccgttaatatttttccaagggtgtatccccttcaaggcccacactgttttacaaaaagggacgccttctttatataccccgcaaacgctgtatttccctgggccgtctnataatttactggaaagaaccacacagttgtggtcgtgcaacgagtatttacgccgcctgggaataaaaatttgttgcccccccacaacaattaatgtgaatggaggtaggctctcctttttcagaaagacacaccacaatactgctagtgggggcagttaattctctcaagggattcacactcacttatcacctcataagcgtgatgttaggttacacacagcgcattctttttattctgtgcgacctcaccaaccccccgtgcggttaataacatctaaacttttgggggaaatgggcccccctccccttttttcgaaaaacaaatagtcctcctcactctcccttttcgcccctcccacaacattcgtgcacattgttgctcttcttgtctcactcattcataagtacaggttttcttgtatatgccgtatacacttaaccctactataaccaccgtggtgtgccccaccagcaccatgaataatctctccgaggcttcttcaaaataggggccccagtctcgtctcttttgggccccccggggcattctccacaattgtgtagtacaactccctgcctcacgggttgatggagtagttcttttcatccacccccttgcagagggcgcttcctttcagacgccatctcccctgagtcactaattaagatctactgccgcgttgtaccacccacggaggattatgtgttttttcttctcctgacgacaaccacgagacaccctcgtcttaaccaacatttctgtcccacaaaaca

SEQ ID NO: 680699 - DNA, 939 bp, Homo sapiens
  misc_feature (26)..(26): n is a, c, g, or t
  misc_feature (28)..(28): n is a, c, g, or t
  misc_feature (122)..(123): n is a, c, g, or t
  misc_feature (133)..(133): n is a, c, g, or t
  misc_feature (179)..(179): n is a, c, g, or t
  misc_feature (216)..(217): n is a, c, g, or t
  misc_feature (225)..(226): n is a, c, g, or t
  misc_feature (253)..(254): n is a, c, g, or t
gctggcagcgctgctgtgcgtccccncnggggccctgacctgctacggggactccgggcagcctgtagactggttcgtggtctacaatgctgccagctcttagaggtgtcctgtggagtgcnngcgcagagangtgctgcagtacaagtatcttggacgagagctccggaggctggcgnggacggcagggcactcatcaacatgccctggagtggnngcctgtgnngcctgaagcctgcagcctgctgtaccnngagcaacaccagccagctcgccttcctgctctacaatgaccaaccgcctcaacccagcaaggctcaggactcttccatgcgtgggcacacgaagggtgtcctgctccttgaccacgatgggggcttctggctggtccacagtgtacctaacttccctccaccggcctcctctgctgcatacagttggcctcatagcgcctgtacctacgggcagaccctgctctgtgtgtcttttcccttcgctcagttctcgaagatgggcaagcagctgacctacacctacccctgggtctataactaccagctggaagggatctttgcccaggaattccccgacttggagaatgtggtcaagggccaccacgttagccaagaaccctggaacagcagcatcacactcacataccaggccggggctgttttccagagctttgccaagttcagcaaatttggagatgactgtactccggctggttggcagcagccttggtaccaactgcaggtcagtcatgcacaaatgtaggcatcctgcctctagctggtcggatactgggcagggtctggttgtgaccgatagctttccaggaccagcggccaagcttcacagtccggtgccgtccgagggggtgttccaaaggccggacttctgtgtgctttcgaccgggagggacgggtgggcgcgtcc

SEQ ID NO: 680700 - DNA, 201 bp, Homo sapiens
  misc_feature (153)..(153): n is a, c, g, or t
taacatgggctcagtacatctgccacagcacaaagatggcatgggtctctagcgtgatattcgtgctggcagggtcagcagccctgagcgcatccaagccatggtcagaggaaagtgttggcaggctccgcacagccaaagaagtcaggaccncacgagacgggggaagccttccatgagccttcacctctcacgagggtc

SEQ ID NO: 680701 - DNA, 203 bp, Homo sapiens
accgacggcgtgcttattttgtgccccctggcgcgaccagagctgcggcatccgcgggaggaggacaggtaatacggtaagtcagtgctcaagcacatgaacggccacctggagtagtaccaccacgccatctggtggagcatggacccgcaacgccggtacatgctgatggacgaaataataaccaacaacagcggcggccg

SEQ ID NO: 680702 - DNA, 113 bp, Homo sapiens
tccttactaaaattaagtttttttttatctgtcttcatagtcttctgtttccttattaatattctactcttgtttttattacatgaaagtggagtattagaaatatacctact

SEQ ID NO: 680703 - DNA, 303 bp, Homo sapiens
  misc_feature (261)..(261): n is a, c, g, or t
aggtctctgtgttgtcacctggaaatggactttcccctcctcgggatgttatgatgatagatgtaacaagctcagcacagtgcctgtacaggtggaggcaatgcccagagctgtggcagccaccttgcagccgtgaagcaccagtgggaatgacagtcaagagaaccacggagatgccagcccctggacccacagcagcagcacctgcttccagactcagagtgtgagaaaaaaataaattctgatgcgggccgaattttngtcgggttctagcgagtctactcttaataaaccgatctcttt

SEQ ID NO: 680704 - DNA, 280 bp, Homo sapiens
  misc_feature (238)..(238): n is a, c, g, or t
tctttcctgattaaaaaagaagatacacatacctgaaactgtccttcctcttccttcctaccttgaaggtggaggcaatgcccagagctgtggcagccaccttgcagccgtgaagcaccagtgggaatgacagtcaagagaaccacggagatgccagcccctggacccacagcagcagcacctgcttccagactcagagtgtgagaaaaaaataaattctgatgcgggccgaattttngtcgggttctagcgagtctactcttaataaaccgatctcttt

SEQ ID NO: 680705 - DNA, 249 bp, Homo sapiens
  misc_feature (10)..(10): n is a, c, g, or t
gggggggggnttcctgccccaccttaactgagtgattaaccctgtgaattgttctcctggctcagaagctccccaactgagcaccttgtgacccccacccctgcccaccagagaacaacccccttttactgtaattttcctttaccaacccaaatcctataaaatggccccaccccatctcccttcgctgactctctttttggactcagcccgcctgcacccaggtgaaataaacagccatgttgctca

SEQ ID NO: 680706 - DNA, 137 bp, Homo sapiens
cagacaaccatctcatgggccccatccaggacacttctgagtacatcattttcatgtcatcctgttgggcactgatgatggacccttacagttcaggggtcctggacttctaccagtgccactctgacaggctacca

SEQ ID NO: 680707 - DNA, 419 bp, Homo sapiens
acccacgcgtccggactagttctagcccacgcgtgcgccacgcgtcgggccgaggcgggcggatcaccggaggtcgggagtttgagaccagcctgaccaacatggagaaaccccatctctactaaaaatacaaaattagccgggcgtggtggcatgcgcctataatctcagctacgtggggaggctgaggcaggagaatgcttgaacccaggaggcggaggttgcggtgagttgagatcgtgccattgcactccggcctgggcaacaacagcaaaactccgtctcaaaaaaaaaaaaaaaaaaaggccacctcaggggcctctatcgtggggcccgtggggtggcaaagtgcctcctgaattaaaaaggaaggggaaaagatatagcgggaacgcgaggggaagagatgctgagggcgg

SEQ ID NO: 680708 - DNA, 340 bp, Homo sapiens
  misc_feature (4)..(4): n is a, c, g, or t
  misc_feature (43)..(43): n is a, c, g, or t
  misc_feature (117)..(117): n is a, c, g, or t
  misc_feature (121)..(121): n is a, c, g, or t
gctntctgtggttttttttatgtggcattgtgtgggtttttcntgccccttcccaccccaacatttttttaaaggggcctggggggtttttttgaccttaaaagggcttccttaagnggcntgttaaaaaccggggtggattttcctttttacccacccggtacgcggttgaagcaagaggcccccttttggatggacaagttttgcccggggggaataaaaccccctttctttggtaaaagggcccaaatccgttgggggccctttttttgtttgggaagggccttaagcccttcttgccccatccccccaaaaaagaaaaaaaaggggtttcctccca

SEQ ID NO: 680709 - DNA, 350 bp, Homo sapiens
gaatgtaattatggctctagcacaattaattaaaagtgaaacgtagttgtacaagcaggttatcacccatgcatagggcatgataaacaaagcagagctttcccgtcccccgaagtgatatagcgaaagctcgcgttgtgcccttcagctagcttagatgtaccaaattgagaaagcttaaggcgggctacagaacaaggaaaaaaggccacaacagttccctctcactttcagtgatccataaatagatacagcagcaggccatgaaatctagtgacataccggagacaaatgaagtaaatattgtgttgtgcagcattgaaaaaaatcaaaataaaaattaaatgtga

SEQ ID NO: 680710 - DNA, 117 bp, Homo sapiens
  misc_feature (58)..(58): n is a, c, g, or t
  misc_feature (89)..(89): n is a, c, g, or t
  misc_feature (112)..(112): n is a, c, g, or t
agtttgatgggaaagttacctacggtcagaaaagggctgctggtggtggaagctatanaggccatgtggatatttgggcacctactgtncaagagttggctgcccttgaaanggagg

SEQ ID NO: 680711 - DNA, 132 bp, Homo sapiens
ggtaacacatcttccccaggcccacacaatacaatcatttttgctggatacacagtatcgtcgctcatgtgcagttgagtatcctcatcaggcccgacctggcaggggatctgcaggtcctcagttacatgg

SEQ ID NO: 680712 - DNA, 654 bp, Homo sapiens
cctggctctgtacttagggtttctcccctttgtagaccatacagggcaacttcctgacgttgccatggtatctggaaactgtcatggtgctggtggaagtgtcttttagcatgctgatgcattataattagagtataatgaatagtaaggacaaccagaggtcactttcatcgccatcttggttttggtcagcttctttactgcagcctgtttcatcattaaggtctttattacctgtatcttgtgccgacctcctgtctcatcctgtgacttagaatgcctaacctcctgggaatgtagccactgtgcccagctgtattccctattatattccattggtctatgtatctgtccctcctgagtagctgggcatgcaccaccatgcccggctaattttgtatttttttttttttaagtagagaaaagatttggccacgttggctaggctgctctggaactcttgacctcaggtgatcggcctgccacccaacctacggggattacagtagccagtccggccagggttctggctgtgccgggacagtgaatggacacaccgtcccagatgagctgcagaacacggtacgatgtcatgtggaggagccgccgagtgattgatgggccccagcttgaatgggaagtccagatcccaga

SEQ ID NO: 680713 - DNA, 785 bp, Homo sapiens
catctataggtgcttcatgatccgcaaccgcatcatattgttcaagaaagtgctgatacttcttccctaatgaaatgcgtgattctacaaagagcttcacaacatgtggcagcggtgctcctggcctgacctgtccacacaggaggcgcgtaaacaccaagcgactcactgggacgagcgtacatatgtagatgtgaaaaacagacgtgtcaacagatgcaccactttgtatggggaggagaattgctactatgttgcgatgcactacatagcagaggctatggcgtgcaactctatgacgtggcaaaactacatacagagggttatataccgaggaagtgatacacgctggactctctgatctcatgaaatatactctgacactgagcgaaaatgaaagagatgagataccattattttatgtacatgcactatagacctcgagggtgctagagccatctcctgtgggttctttatgcgctacagagatcacgtaaaaaaacagggatttcagaagaaaattgtaaccaaattgagtacacagtgtgaggtgagagatgataagcacaggagacttccacagcctcgcatatacgcacacaacaaggccggctgtattaacgcccacataaaccccatgcggggttggtcaacggacttaccacgcactcatatcatactttaaaccggtcacccattgcgaggtgtagggtagacacccgatgttgatagaatgtggagccaccttctatttccttcatgaggagtccgatggagcccgtact

SEQ ID NO: 680714 - DNA, 240 bp, Homo sapiens
atccccctctgtgctgatgtgatcgcaacttaactccatcggagatttcaaccgtagaatttattcagagatgcatagtttcgtggctagtagaaatctatgctccatggtgtggtcactgtcaaagattaacaccagaatggaggaaagcagcaactgccttctaagatttcgtctaagttggtgcactcttatggggtaccgagcctctaacttcgtaaccctcgatcggtagctttt

SEQ ID NO: 680715 - DNA, 1132 bp, Homo sapiens
tttggggcccccccttggtttttttgccccacggggggagcccccgcttattggtagtgacccctgtcgcgtcgtgtttgattctctcccccccccccggggcaacccggggctcttcccaaggccgggatatttgcggcgcgttctcctcacacagggtggcggctcccgttggtgtacacacacgaagtttgttgcgtaccaccatcgtgggccgttatttttacatcacacgggggggcgaacccccccgcgtatatggatgagtgttgtctgtgccccacaccattctttctctcccggcgaggttgaaatatattgaatgagagttcgggggacaaaacaaactgtgccgcggggtatacttacccccccgtggggcttacagaggccccttatgccaacgcacaaacccgccgtgctcgggtggcgagaccccaccccggggctgttaacactcacacgtagctcaccgcgcgagaagccctctcgcgcgcccacttcttggggcatacaaacacgccgcctcgttgtatactcacgcgcgggtctcctcgcgggggagcgcgcataacatacctcccacgcacgtgcgaagtaaatctttctaaggcgcacaagaagaagagaggggtgtaaattacatagcgggagacaccaaggggcacccaccccgctcgccttcacagagaaaggagcgccccaccccttttggtggtgtgttaaagccgcccacactgtctgtccgccacacgccgcctcgttgggtgtcgctatatagcccccacgggttgcccccccgggtggtttctcctcgggccttctaaacacagagtcccccgacgtgtcgccctgccctgcttccgccgcggtaatacccgggtgtaagtaagccgccccacacaagcaagaaaccgctcgctggtgacacacatagttgtcaccaggaccgctggttgtccccccccattttttagaggggaatataggggaacacttcgactcccacgacttttcccctacccccacccatccttttgtaggggcttttggggggaactggggcaacaacaaagggaaatgggtttttactttttggggtaaaaaaagatgtttttttgtggggcatata

SEQ ID NO: 680716 - DNA, 517 bp, Homo sapiens
  misc_feature (46)..(46): n is a, c, g, or t
  misc_feature (115)..(115): n is a, c, g, or t
  misc_feature (248)..(248): n is a, c, g, or t
  misc_feature (251)..(251): n is a, c, g, or t
  misc_feature (507)..(509): n is a, c, g, or t
aaaaaattagctggccgtggtggcgcatgcctgtagtccccagctncttaggaggctgaggaaggaggattgctggaaccccaggagatggaggaagcaatgagctgaggggtcngccactgcactcccagccctggcgacagagcaaggctcccatctcaaaaaacaaaaacaaacaaaaaaaaggaaaaggaatatatgtacccattttcattttaattttaaaaaatctttctaggccaggccancgngcacgccactgtaatctcagcactttgggaggctgaggcgggcagatcatgagctcaggagattgagaccatcctgtctaacatggcgaaaccctgtctttactaaaaatacaaaaaattagccgggcgtggtggcgggaacctgtagtcccttctactcgggaggctgaggcaggagaatctcttgaacctgggaggaggagcttgcagtgagccaagatcgagccactacactccagcttgggtgacacagcannnctgtctca

SEQ ID NO: 680717 - DNA, 262 bp, Homo sapiens
  misc_feature (2)..(2): n is a, c, g, or t
  misc_feature (13)..(13): n is a, c, g, or t
  misc_feature (116)..(116): n is a, c, g, or t
  misc_feature (126)..(126): n is a, c, g, or t
  misc_feature (200)..(200): n is a, c, g, or t
anacaaggaagtnggcagctgatcctagcgggcgtgctaggcatgcactacagacatgaatatcaggtgcccagaccgggcacggtggttcacgccttaatcccagcactttgggnaggccaaggnagatggatctcgaggtcagaagttcgagaccagcctggccacaatggtgaaactctgtctctactgaaaataanaaaaattagccgaagcagtggtgggcacctgtaatccctgctgaggcaggaaaattgcttga

SEQ ID NO: 680718 - DNA, 175 bp, Homo sapiens
attcgcggccgcgtcgacaaagaatattgtcaaatatctggtgagtaattgtggggcttttcatgtttaagaatgaatcataaaactgcctagagactttgctttagagtaagctgacaggaagcctactgttaaactgggggtttcccaaatttcaatatacagagagtttttg

SEQ ID NO: 680719 - DNA, 894 bp, Homo sapiens
agtcatgctgaacacatgactatgacctagagccctatttctggtgtcttgcgattgttacaagactccttggcatggtgggtacttagtgtatcttataatttaatctccattgtgatcggagccttgtcggtccgttcggagccttggctttactcctgacctctatgcgagttgaggtcatcttcgcatttcggggaccatgggatcggcgccacgcccgtttaaaaaccccgggacctcctcggatccttgccggtgccatgtgaggtgcttgctggccgacctacatggttcctttggtattatcggtcgtcttgtacgggtctgtaggagtgaaccgttttacatcacacgctccggcatgtgtcctcggacccctcgatccttgtcgctgcccgatgcccgtgccttgcaccttctcgtccgctcgcccatctcatgcgtgggttcgggttcagctcccagcctgcacccagggtgatctggggcccactgtggcatccagatccgtccctgcccgcgaagtgacagtttacataaagttattttccttgctaaacaagatataaaagcttacgttagaaaaccaaggtaaacgtacatattttattatagaaaaagtattttttctccaccaggacgacatatggtaacaaagagaggcaaagattaactatttgcaccgaaatgtcttgttttgttgcgacataggaaaataaccaagcacaaagttatattccatcccgtttgttgacgtgatggtaattttcttctatctgttcccatcggcaggatattcaccttctccaatctgatgtccattatggtgtgggagtcggggtagggggtactcttgtcaaaaggtacaactaggtgccagtgtgtgttttg

SEQ ID NO: 680720 - DNA, 509 bp, Homo sapiens
  misc_feature (86)..(86): n is a, c, g, or t
  misc_feature (420)..(420): n is a, c, g, or t
  misc_feature (497)..(497): n is a, c, g, or t
  misc_feature (499)..(499): n is a, c, g, or t
tgatggcgctgatgacacccagaggggttctacccgaccaaggcgctgatggcccgcagccctttgaatacgggctgcggcctgtngtcgcaggggttgaaaccgtaacactttgttgctaagagagccgccccgcaggcgcgtaagccttagtagtaggcgttctctttctgcgtgtggtcagtcacgtcacgtacgcctttgagctccggaatacgctcgagcaaggtgcgttcgatgccttctttcagggtgacgtcggcctggccacagccctggcagccaccaccgaattgcagcacggcaatgccgtcgtcaaccacgtccaccaggctcacctggccgcatggctggccaggccggggttgatctcggtctgcaagtaataatttatacgctcgttgatcggcttgtctttgnttgacatcggcaccttggcgttcggggccttgatggtcaacttaaccaccattccattggggggggaatccaacaancnctttttcaag

SEQ ID NO: 680721 - DNA, 644 bp, Homo sapiens
gacgtaaatatcgccccatccgcgcctggacgatttcttcccgggtaccgatcgctttgcccggccggattcagggacatttccaaatggaacaaccgcgtagtgagcaactgttctattaccagaccaactacctggtggtggctgccatgatgatttccattgtggggtttctgagtcccttcaacatgatcctgggaggaatcgtggtggtcgctggtgtcacagggttgtgtgggcagcccaaaataaagacgtccttcgccggatgaagaagcgctaccccagacgtcgtaatggtggtcatgtgggcgagctatttccttatctccatgtttggaggagtcatggtctttgtgttgggcattacttttcctttgctgtggatgtttatccatgcatcgttgagacttcggaacctcaagaacaaatggagaatacaattgccaaggaatcaggttgaagaggacaccgatgggcattggtcctgggatgccctagaacagccggcacacaaggcctcaccagatcacttgacttattattcagcaaagtgaaaggaataaacataatttacctgaagctagggttgcagcagaaattgaagttgcagtttgcctttgtcaagacctattttcctggtg

SEQ ID NO: 680722 - DNA, 473 bp, Homo sapiens
ctcgtacctgcagctctctctgatgactactgggtacataaccgactaggcagaaataaataagttctttgaaacccatgagaacaaagaaacaatgtagcagaatctctgcgatgaagttaaagcagtgtttagagggaaattcatagcattaaatgcctacaggagaaagtgggaaagatctaaaatcgacaccctaaaatcacaattaaaagaactagagaagcaagagcaaataaattcaaaagctagcagaagacaagaaataactaagatcagagcagaactgaaggagacagagaaacaaaaaaccatgaaaaaaaaaatcaataaatccaggagcgggtttttttgaaaagattaccaaaatagaccactagccagactagagaaagaagaacgaagaatcagatagacagaataaaaactgataaaggggatatcaccagtgatcccacagaaatacaaactac

SEQ ID NO: 680723 - DNA, 366 bp, Homo sapiens
caggatctccttgagtatatcgtctagaagtaaagctactctcacctctgaacctactttatacgccctatgtctgagattatcttgtcgggcacgtcgtgcattttctacctggtatgggaattattcatgggcgtgattggcacatcctggagactatatgctcactgaagaaaacccagttcaatgagtgcttagaccatgactccttccttgttttccttaaagagagcaatccccaggctcccacatcactttggttccttcacctcagttgtccataacacttaaccttatcccaggatgctgttactagtctgagtatctgccttccctagaggataaactccttgagatcacaatagt

SEQ ID NO: 680724 - DNA, 156 bp, Homo sapiens
tgttaaacagaaatcagtgtatcatcatgcattgaggggactgctagccaattctgcttgtatgactatgtactgtctattcatctctattatcctggtatgacgcgagtgcatccgtctagtaggtctgacctgtaggcagtgcatgccttgtca

SEQ ID NO: 680725 - DNA, 341 bp, Homo sapiens
ccaggccatttgacagttgcaccctgatcgttcatattcccacgcttctggttaatgtcccgcatcaattatacgggacatttcgttaaatgtcccgcaaaattattgggggctaattgtggatagcaccggaaaaaagggacatagaccggaaaaaagggacacttccggttggaaaagggatagttcagaggaacgtcaaaaccctcgcaaacccgcatggatgaaggctttccgggctgccctcgcgcgcgcgcgtaaaaaaacaagataaatcaagaaaaaacaccgggaagcgcccgagaccaaagaccggcagcatagaccaaatccagcgccca

SEQ ID NO: 680726 - DNA, 339 bp, Homo sapiens
ggaggcaggaactgtgagcgcctttgtgggggttgggaggggaagaggacactgggcggccctggggctctagcaggggacctcctcaagcccagtgcaccagctctggcccaaactgtgccccaggcaagcagctcctcctcctcttctgatgaggcaggtgaccccaaatgaggcacccatgccccgacacccatgctcggtgccctggccccgcacgacaggttgacacctgggccagcctccttgagcgacacacgagtcttacgctacagctgtcctgcgcctcccagcgctaccgcagctcgaacttcgctaatcactggtcactagcatgtc

SEQ ID NO: 680727 - DNA, 273 bp, Homo sapiens
ttaatttttaattttttttcaaaggtttaaactcctggttcttaaaaggatcgggatcttttcccaccttttgggttccatttggtgaaaaaaaaaaaaattttcctttttttacttttggatcagcattttaaaacttgcctccccctatatttccaaggaccccattccctttctttgttttattctttttatttactttgttttctttaaaaaaactgggcattttgatttggcaattaacagcccaatatttccaatcaaccccccaga

SEQ ID NO: 680728 - DNA, 348 bp, Homo sapiens
gccggggctcacacggccgtgtggcgggctcggagaagacacgcagagtgaagtcagcctcgtcgccggcgtgggcgggctcggcaccaccaggtagtggcctggacgcaggcagcagcgggggtcacgtcgcggcgggcgctgaggggcgagcggtcggcgcgcagcagccggggcaggagcgcatggctgcgcggggaatcccagaggcccagcagctggggacggggcggatgaccacggaccaggctcacccccggccttcatccccgacctccaggcgcccgtcactggtaacctgtcagtcgcccgccgcccgccccccccctcctccccccccttggcttc

SEQ ID NO: 680729 - DNA, 681 bp, Homo sapiens
  misc_feature (22)..(22): n is a, c, g, or t
  misc_feature (26)..(26): n is a, c, g, or t
  misc_feature (59)..(59): n is a, c, g, or t
  misc_feature (119)..(119): n is a, c, g, or t
  misc_feature (504)..(504): n is a, c, g, or t
  misc_feature (533)..(533): n is a, c, g, or t
  misc_feature (540)..(540): n is a, c, g, or t
  misc_feature (550)..(550): n is a, c, g, or t
tgagataggaagtatcggcgcntgtncatatacatcaaaaaggaaacggaaaatgccanaaaagataacacaaatagcactacttttttaattgaaaagtcttctttgttggaaaacanaggtattccgtgaactatataagttgaaattttgttttacatccagccgatcactcgccacgttatatcatagtcggctttatggagataaaaacaaaaacgaaaaatcggaaattctttattgcaacttatatagtatctgtatgaaaaatacaatcgcaagcaataaataagattttttactcacctatgtcacgaaactcgcgcaaggaagcccctgcctaaagataggggaggaattgaagtttcattccctcctttcgatacgtgtacccatccaatcgttgaatgagacgaatatatttgtagtgaatgccttgtgccattcgctttccatcttttcctttgatgtcaaaacttccgctttttctgcatgccacttcgncaaaccacacgcctttatattttcctttnggaacancagccttgancatgtctcctgtttgaaaaccaaagaaaaattttgtctgcaaggtatcccttggaagccatattgtaaggttgtgcgtgacgatgccagtctttgctgatgatatatctttgtcgaatcagcatcggggga

SEQ ID NO: 680730 - DNA, 457 bp, Homo sapiens
tctgaggtgactctagcaggatctgtgtcatccccttcgtcatactcaaagcacaggctcatttagccctaaatgtcttcccagcatttccatctgcgcaccagcacagtcccccagtgtctgactcgtagagccaccatgctcaaatttctttatggatttattagccaagtgcttattccaagacacaatagcttagtcttaaccagttttgtagtatagcttgatagaccccttaagcctctttcaatcagcagcttaccctcagagcctcttcttttccttttgtaaacaccaggtttatcttttgtaaacaccaggttgtatgagctggagggtttgccaacgactggatgttgctcatggtggaggatgggccatcagcagtcagacctggaggcttccccttggttcagagtccacctcttgggcacaaacctacgaaggcggatggaca

SEQ ID NO: 680731 - DNA, 252 bp, Homo sapiens
tcagaagggataattgaggcctgtgaggtgaagtgattattttaagactacacagtctaaaagtgggctggggctggaatttgtctcatgactcatgattgccagacaccacgatccgtcttctgtgtttaaaacttggtcccccaatgccctgtcttggttctcatacgctgacaaataatatgtaactgccttattcttttgccagtctggacacttacacaaaccccttgctcacatttccatcactac

SEQ ID NO: 680732 - DNA, 780 bp, Homo sapiens
ggcttgtgtcatggcacagcctggtttctgctgctcgccagtctgtgtcattcttcttacaaaatgagcgagtagacacatagagcccctcgtatgtgtcagacctgctcctaggacctattatgattttgatcctcatggcagtccctgagaaatggggggaaatgtaagtgacaaggcagagccaagtcactaagtcacatgcccctggtgacgtagcttctaaggggagacgtgggtctttttaacccaaacccaaagtgctgggattataggcgtgagctaccacgtcccgcctatcttcaggctttttaagggtgtctcttgtacacacacaggaacacacagtgccccctcctggccactctgtgtctgtcatggctaaaagctgtacttagagaaaagcacacagatggtgggtgtgaacccagttgcacccctcatttgctcttcaccttcatccagtcgctttcttctgagtttctcaatgggaaaagtggggtgagagcatcttccttgagaaccattcagggctcacatgaactaggtggatgtgcctggccacatggggacaagctggcgaacattgagcctgacccgactctggaacacgctgtcaaaaaggagcaaagactcccggacctcccctctctacctttccttctgttgacaaagctgaggagcttgagtcagtctgtcttccaggactctggggaagagcagcaattggtaaacatactcttgacaagtggcacaaaggtacacggttacaaatacggc

SEQ ID NO: 680733 - DNA, 825 bp, Homo sapiens
aacatacggcataggtgcgaggcctgggattatgatgctcagctcagacctcccggctcgattgtgcggcgctgggacggctggataaaatgtctggtatccagtgaccttaccagtgctgtgaccactggtgccttcctcagcaccatcctgcacctaccatcctaatgaatgatgacagtgtgctgttaacatgttattaccccacacctccatgctcccatgcctgtgtgccaactactgtggtgcttgtgactgtgtggcctgattgtggaatgtgtgcatgaatcctccttctgtattatacccatgccatgctgcccatccccaataacaatccaagttacctgtgcatgactgtgtctactgtgcatgcaccccatcaccttttttgtgacctgccctatccaacattgttgtttgtccttccttgcaacaatgattgatctgtgatgtcatgcttgtcctataatcgcctgtgttgctcttgaccttgtgcttgtccttgcgtgtgatgccttgtgccttgcttgggtggtgcatagctgtggcttgcttgcttcatccccttcttgctgtgtgattgcccttgcagtgactgtttgaccactctacttgtcccaacttgcatgatgctctcctgtgcgcacctaccaacgctgttttgtacgtgactcaagccagactgtctagtggatgccgtggttgcctgcacgttgacgtccttttcctccttctcatccagcttcactgcctgtgtggcagtgttctgccctggtggttctcacctctcctgtgttgcccaccttcatgtctttctctggg

SEQ ID NO: 680734 - DNA, 367 bp, Homo sapiens
acctcctaccccacgtgatctcctctgccaaaaaataaatatgaaaaacaaaataaaccggctaggtgcagtgggtcacacctgtaatcccagcactttgcaaggccaagggaagcacatcacctgaggtcaggagtttgagaccagcctggccaacatggtgaaatcctgtctatactaaaaatacaaaaattagctgggtgtggtggtgggtgcctgtaatcccagctactcggaagcctgaggcaggagaattgcttgaacccggtaggcaaaggttgcagtgagatgagattgcaccattgtactccagcctgggcaacaaaagcaaaactccatctcaaaaataagaaaaaacaaaaaacaa

SEQ ID NO: 680735 - DNA, 367 bp, Homo sapiens
tgaagaataaatatgcatttatgcacatgaaaagatgctcaacatctttttaccattaggaaagtgcaaattaaaatcacaatgagataccactatatacccactagaatggctgtatcaaaaagtattggtgaaaatgtgtagaagctggaaggaaccctcatacattgctgatagacatgtaaaatggtatagctactagctttgcaaaagcattttggcagtttcctacaaagttaaacatactcttagcctataacctagcaattttattcctgagtatctacctaagagaaatgaaaacatgttcacccatagatttgtgcacagttcatatctgtattattcataatagccaaaaaaaaaa

SEQ ID NO: 680736 - DNA, 1390 bp, Homo sapiens
tggatgtacaaacgtacctgttttgggggagggggtggggaggggggatgggggagggacgggtcagttcttcctttcaggcctcccaaacacgtggggctgtggcacgcctctgtgcgtgccccagccgacaccctcgtggggctctccaggctcctatcttcgttccctcgttccctcgttccttcgccccaggcgtggaactctctccctgcgggtggtgtgcaccgtgcgtggtgcccagctctctgtgccacagcctcctctctccggagagaggcgtctccctctcctctccacgaacacgagagcaatcgtgtgccctcgtggtgccgcccccagaagcgcgtgtggctcacacgctccctcccctgccctctcctgacgccccgtccaacgcgtgcggctctctgtgcgacccgcggtgtagttctcccccacgccgagccttttcaaagtgtgtgtgtctccagagttgcccccactctcttgtcgcccccatcagggggcgcccccgcgtgttcctcactagctacccccggtgggtagcgccccccgtggtggggcggcccacctggcgccgccccgacgaaagacctccttgttgtagagacggctatctctttgcgcgcgagctgcgccccctttgtggagcagttttgtctccgccccttgcgccgcgtcgtgtgttgcgtcacctgcgttgggggcccccatgaggcaccgtcgcttgatgccgcgcccccgtgaaaatattaaccgccgccaaagacaattttaactccccctatcagaactagaggtgatgttgtccacccatcaatctactgaggccccaataagtcgccccgatggaaaacacctctccaaaaaaaatgcgccactttttccacacacgacgtttcctttaggcgactaaagaaaaacaccgcccagcccgacggagacctagtaccacggagggggcgaaggctcaaacaaacgaatttctctcggaggagaagcagcccaaacaaaacgccttgagatcccacaaatttgcagccccccgcagtggagcaaagccacagagaaaccaaacactctataccccccacagaaaagcacattgaggacaaacactccacaaaagtggtctccagtgcacacaaacatccccagacgagaggcagaacaacaaacttcttctacaccgccgccccgatctgccccctcccttccccgagatcactcgaccccccctcatcaccgtgggcgccccactccagggggcctcacaaaaattttcccccggcgcacggatacgctatctcagcgctgtgtcaccccccccgcattagtagaacttctccgcgggccgccgtccccccgctgtatgacagcttcttcc

SEQ ID NO: 680737 - DNA, 901 bp, Homo sapiens
  misc_feature (207)..(207): n is a, c, g, or t
  misc_feature (284)..(285): n is a, c, g, or t
gggcaaaaaaaaaaaaaaatctaatgattcacagaacagatctggagcctctcttcattctcagtaatggctagtcccaaaaactaaaattgcaaatgggcacaacctatatccttcctgtggcaagaaggaaggccactctctcgaagcctgaagtttccagaaagaagcagcttaagtgtctcaagaagaaaatttgaacctcanactcgagcaacaaaggcactctatttgtgaagaagccaacattttcacaagagctaaagtgtgtgcactgtgttgcnncaaacccatttataagggtggccataataattatggcgggggctccatgtgactataaagggggaccccttttaatactctcccacagggtttttaaaaccctcggtgggggaacaaaacaaccttgtgattgttgcttccttgtttgtgttggccgccacaaagagagagtcagccgaacccgaaacaaccagagaaaaaaaatttctctttcccctttgagcttttccacccaaaaaagaaataggggtgtggggggcgtaccttttaacaccagggataatttatttagaaaaggagatttagaaaagggggggaaaaaagaacggaagaaattttaaaagaagggaagaagggaggggcaggaagaagcaaaaaaaaaccaacaccgcctgtttggctctcaacaacacaccccaccaaatgttgtgtttcgcgaggcgccggtttaaacacccccaattgttgtgggaaacacaaaatctcttatacactgttgtcttcctgtggccgcaccacacttaatctcttgttatgctacctgattccgccttttacccacgacaaaaaaaaaaacacctacgtcgattttacgggtgcggcgggcgcagacaag

SEQ ID NO: 680738 - DNA, 285 bp, Homo sapiens
tccaggctagtctcgaacctcctggcctcaatgtatctacccaccttgacctccgaaaggtgctaggattgcaggcatgagccattgcactccggccactagcacagttatagttcactgcagcctctacttcccaggctcaagcaaatcctcccacctcagcctcccaagtagctggaactacaggcatgcaccaccacgcccagctaatttatttttatttattattttttgagacagagttttgctctgttgtccaggctggagtgcagtggcacgatctca

SEQ ID NO: 680739 - DNA, 464 bp, Homo sapiens
ggcggggtcgtgcacggcagcatcaggagacggaactgcttatatagctgggaccacgcagattacgcacgacgagacggacggcgacggcgggaatgggagcagtaccgctgtccggcagtgtgagcacacccaggaggggaacccacccgggtggctgtccctcacaaggtaggctgtggggctctggcagcctactgaggggcggcgacgggacgaactgggcttgcgtcctggcgacacgttcctggttaggacgcatggacagtgacttacccactgtgggggtggggcagggacggctgtcctatgacaagcatcacagcccaatactgcggtgccggctgtactcttaatgcgtcttggtgaacatgtccaacacttattttcctagacggactttgactcgtgccccggaaatctggggcttagcacaaagcaagggttatgggacttttgcctca

SEQ ID NO: 680740 - DNA, 329 bp, Homo sapiens
tagacagaagacgaaaggaaaccaaagactaaaagaagttgccaaaactgtctgggactgggaacttatgaatcctatcaaaccaatattgcagagaccatcagaagaagtagaagaagatgaatacaaagctttctacaaatcatttacaaaggaaagtgatgaccccatggattatattcactttactgctgaaggggaaagttaacttcaaatcaattttatttgtacccacatctgctccaagtggtcagtttgacgaatatagatctgaaaagagcgattacattaagctctatatgcgccgagtcattcatcacagacgactt

SEQ ID NO: 680741 - DNA, 459 bp, Homo sapiens
gcgccctctttttttcctttccgtggggaggccccccaagttcccaagtagagcccccccgggttttttcccaccccccggtttttcctcttgtttccgttttttcccaacaattttccctggaatttttaaaattttttggtgggcccaacgggtgtccccctaccaaggtacaccccccgtttccaacccttttactttgaccctatctttgaacccctgttttttcaagggttcaattttgcttggggcccccctcctcccccggttttttgccaattcaaagactcttttttcgggggggtttttttttaaagggggttttcttttaaccccccgaggggggaccccttttttttccaaaaaatcccccctcaaaatggggggtgttcttttttttccccttttttccccacccaaggggtttttcccccttatttaagtcccgggtttccccca

SEQ ID NO: 680742 - DNA, 230 bp, Homo sapiens
ctggtcgcaggtcacacagggaggtgatagcatgctggcgggtaaattatgtaatgcaaaatttgtttaatctgcgccttaatactttttgatttcgttggagggcgaatgatgagccttcgtgcccacgcgcgtcccccttgtttggtccccacaacttgacgacgtatgacaggctttgtggtctccctcgggagtgggtggaggcagccaggggcttaccgtgtaca

SEQ ID NO: 680743 - DNA, 291 bp, Homo sapiens
ctttatatgaactctgtacatgctctaagctctttttgaatgatattttaagaagtttctaaaccaaagtgcttaagaaaacatgaagatgttaatttcatgaagactgtacaagtttagaagtacaatgtagacctgtttaagacaaaggtggatgggctttggggttttttttacaattggacttcaggtacagaaggattgggtaatggtactcctcagttcatatcaccttatcattggcctttagtattttgtaaataagtaactggacttttatgaaaagcatat

SEQ ID NO: 680744 - DNA, 1111 bp, Homo sapiens
  misc_feature (142)..(142): n is a, c, g, or t
  misc_feature (279)..(279): n is a, c, g, or t
  misc_feature (511)..(511): n is a, c, g, or t
gggtacgccgtgcagtaacacaggtgtctgctgaaaactagccccgaaaaggcacatctggtcactacggtaaagaggactcatactcaaactatttgtccgtgcaattgcgagcatccctagaatatcgagggcgaatgtntcacaacctatatacctggtccctatcatgaatcatactaaagtggcggtctggacttcggctaatacagaagctagttgatgccattttgaggaatggaggctgcttgagatgggagcagggacgtccatcaatgntatgcctgtgtggtctcgtggataatactgtaatagctgagtcgatgaatcgctggatatcattcaattgcatagtactaccttgttgtgagaacttctagtacgcacctcgagcaaggtatctattgatgaactaatctatcttgagtgcctccaatgtgataactatgcagacttttattcaataatagccattagatttacgacgtggacatcttcaaagtgcttgacnttggagcgtcgtccgtggattacgtaagcttgagcttgagtgctaagagtgtgaattctcttgacatgctagggaattctccaaaggaatgcggcgaggaacccagaagagcattgcccttgactggtcgttacaccagcgtggtgtggtgcaactaaacataaatagtccggtagttactcatcaatgtggttccatctgagccaactcctaatacgccaaggaacgcagagtactgtaaggcaacgttggttcaacgaggaaagttccacgagacattcaccatgggctgaaacacatttggtgtactgacccccggaagcaaaagccagccaatttgttgtcccacacttcctggagaggtgcactgggttgacaaccttgcctggaagccaaaccggtgccaaagaatcggcctttgagcgacccacgggcgattgcgcacaggcagaccccgcaaaagacggagcccaagccaagggggcaacccacggcagcagtaccagaggccaggaatgaggcagcagagaccccaaaccggccaaaccagggcacgcctgaggcctagcacaccacgagatgataaaaacacgaggagag

SEQ ID NO: 680745 - DNA, 180 bp, Homo sapiens
ctcggcaccccctcgttgagtaggttgtggggcatccgcaatctgacggacagctgccgttagggtaacctacgcatatctgacgtggcaaggggcgacgaggctcacacaacgtccccgcgaatgaagggtgatgcacgccgcacgcctgtccccacgaaccgcaggtgatctcgtcac

SEQ ID NO: 680746 - DNA, 271 bp, Homo sapiens
  misc_feature (181)..(181): n is a, c, g, or t
  misc_feature (199)..(199): n is a, c, g, or t
cccgactagcccgacaggcaggtgttggcaaccacggcctgtgggccacatctcacccactcacccacagcttattttggtaaataaagttttattgggaacacagccacacccggctcatattaccttgtggctactttcccactggtggtagcccatcgaaactgaaaatatttaccantatctcgactttgcaaangagtttttcaggcctggctttaagggtcccctgagctaggatgcttgcttgtcggggctaagtccggggggg

SEQ ID NO: 680747 - DNA, 106 bp, Homo sapiens
atactgtcaccgtgatacacttcttgggtcttagctttttctagactagaagctctattagccattaagataataactcgtcgttccctacccctagaacacctgg

SEQ ID NO: 680748 - DNA, 124 bp, Homo sapiens
gtgatagactcgagctggtacctctgttaaaaaaaaacaaaatgggttcaggaacaggcagcagggagcagtgtgggattgaggatgggagggaggagggaaagggctggggcttgccagccag

SEQ ID NO: 680749 - DNA, 519 bp, Homo sapiens
tcagctgcttcttgcggtgactctatcaggatcccctgtgggcatctagtgaggacatctccaccagtacagttcgtgtgtctgcaagctgactaccccttgggatgattttatccctcttactgtcgcgttcttttgccagctacccagtcggatcctctcttcgttcactaattcatactcgacggagacctaagggccatcctggactctattcttttacttcctgcctatatccaatagatcactaattcctaattatttgagctgccaagtaattcccaaatccatccagcctctcatgtcctgcgatagcctgcttaccacttcccctgtctcagtttattcttcatgtggctacaaaagcctttcgaatttgtaattctaatcaagacatttccttattgaaattcttacgaaattgcctgtaggataaaaataacagttccttagcatgacatactgaattgtttgtgacctagcccccactcactacctatatcttatctctggccacca

SEQ ID NO: 680750 - DNA, 110 bp, Homo sapiens
caggttggtcagcgctctgctctgcgcggcttgagttatagctctggtcagggcagagctctgctctggcctgggctgtgctcctggcctggccagggccccgccctggc

SEQ ID NO: 680751 - DNA, 594 bp, Homo sapiens
  misc_feature (4)..(4): n is a, c, g, or t
  misc_feature (7)..(7): n is a, c, g, or t
  misc_feature (105)..(105): n is a, c, g, or t
  misc_feature (152)..(152): n is a, c, g, or t
  misc_feature (169)..(169): n is a, c, g, or t
  misc_feature (172)..(172): n is a, c, g, or t
  misc_feature (185)..(185): n is a, c, g, or t
  misc_feature (189)..(189): n is a, c, g, or t
  misc_feature (219)..(219): n is a, c, g, or t
  misc_feature (226)..(226): n is a, c, g, or t
  misc_feature (231)..(231): n is a, c, g, or t
  misc_feature (414)..(414): n is a, c, g, or t
  misc_feature (437)..(437): n is a, c, g, or t
  misc_feature (458)..(458): n is a, c, g, or t
  misc_feature (536)..(536): n is a, c, g, or t
  misc_feature (585)..(585): n is a, c, g, or t
  misc_feature (590)..(590): n is a, c, g, or t
tgtntgngagagtgcatccggcccggtacttgtgatcggaggagagccggatcgtccttccttgaaccctctggtaagggctgtgctgaggggctgggcgggganacatgccgtgtccgctcgcttgcaccttttcagactgccgtgtcagnctcgagcggcgcccacntgnagccctcccctgnccanccgcccccagcgcccgatatccgcccccgnccagaangcatnccgcgtcaatccccagtcccgtcgcggccactgacccttgagatcagccctcccctccccaccttcccgtcccaaggccaagcccaagggcccgaaagcccaacccactcgcgtctctagcaagccgctcttgtcctctgggtacggctcgcgggagtgttggttagcatggtgaaacttggnagcaaattgatccttggcagttnctgtggataaaaggcttagcntgcagaagtgtgctctggctgttgtgaagttttgagattagtcttaatggaactgtggcctggccgcggctcaaaaanaaatttcccgtgaaaagaagaaccaagagttggcaagaacggcctgganagatnttcc

SEQ ID NO: 680752 - DNA, 160 bp, Homo sapiens
tgcttaagtactctgctacgatttattccaggtagttcatttgttatagtcactcacaaatcctaaaaatgaacctacaagtagcctattataaactctttcacacaaacgataaattccctaactcagtatcattctttagaactaaagattaaacgtt

SEQ ID NO: 680753 - DNA, 396 bp, Homo sapiens
agaaggatttgtactctcccagcccagacaatggtgattctttctttaccatttctggggacttctagttctctaattaggtaccattattaacaaggaaatgctaagagtaccattctcctgtggaacatatctgcaagtgtctaacatctgcctgtaccgagagccctactcttcttacgcctgtctgaccatcacgtgctctattccacttcttcagaatgaagcagggagtggtacctatcccggccacggtagcgttcagatgctgggtggtcgcactgtgaattctcccttcaacagttccaagcccctgatttcctgacgtatcggtggtatgctccagtttcagaccatgtgtattcctgaagcatggcttgatcagagatcaggagg

SEQ ID NO: 680754 - DNA, 175 bp, Homo sapiens
  misc_feature (9)..(10): n is a, c, g, or t
cctttttannccattgtggactagtggctgctgtatgcctcagtgacaatgtcccagcgctcctatcatgtttacagtcaccctatggtcctatataagaattgtgttacatgtaggttcgtgtcgtcgttggctctgagacattgataataaattttttctcaactagtgaaag

SEQ ID NO: 680755 - DNA, 480 bp, Homo sapiens
tgtgatatggcacgtgtttggtcagatcactagaggtggatcactagtcgttagaacatccgtgatcttgactattatatgtggctcagacaaaattacgcaggctggttcagctgcagttcacgtggcgtatggcgtgtgtactggggtgttgctgggcaatattactgcctgtacagctgcatgccgatggtggtgtttcacttaaagagtacaccctggatcaaaggtcagaaagggctcataaaagtgatttcgtaggcggtgcttaggggtggagtcagccacaccacgtcagatataatttaaattccgtctattacaactgaaaagttaggacccagaatgtgttgagggccgagcttgccaatagactcactatgttagggagccaaattatcacaagggttgcttgggtgtccacacaaggattcaagaacaagtgctcttaatgggatcttagacaatgcttgctgtcac

SEQ ID NO: 680756 - DNA, 854 bp, Homo sapiens
  misc_feature (220)..(220): n is a, c, g, or t
cgacccacgctgtcggacccacgctgtcgcccacgcgtactgtggacgcgtgggtcctggacggcgtgggcgaggagcacccgcgtgctagctgatctgaggccccacctgaaccccaaagggcaagcgcagagaagatgacccagatcatagtaatgatgaccgttcaacaaccccgagccatgtacgttgctatccagtgactgtgtctatccctgtnacgcctctggcacgtaaccactaggcatacgttgataggactaccggtagacggtggtacacccccaacagctagtgacgccatactaacggagggtgtattgcccctacccaccatagtccatccgtgcgtctaggacctaggctaggcctggtgaaccatagactagactaacctacatgcaatgatctcttcaccgagctgcggactaccagatatcacgacccacggaccgacgacgtggaaatctgtagctgtgacaattacagggacgaaagcctagcagctcacggttcatgccccttggaacatatcgacgccaagcatgactaggacaacagctgctgcattacacagcgatcccatacccctggacgaaagaagctaccgaagatagcccatgacgctcgggaaacacaagggagtcgaaatgaaaaccaaacttggaggtcacaattagaaagacggagcatcaccaggcctttggcgcctatggatggcgcacaacatgccttaacccacgacgcatgatcacactattaaccatgaactaccacttgcgcaaggatcccatggctagggcacaatccgaagagaaaatactcaacccaactcaccaaccccatacagtgac

SEQ ID NO: 680757 - DNA, 587 bp, Homo sapiens
ggaatatgcatgggaatgaggctgtgggacgagaagtgctcagttgttcttggcccagtacctatgcaacgaatagccagaaggggaagcgagacaagttgtcaatgctgatccacagtacccgcattcacagtcatgtccttccctgtaatcccaggaatggctttgagaacggcagcgtctcagtctggtgaactcatggactggttggtgggtcgaagcaatgcccagggaatagatctgaaccggaactttccagacctggataggatagtgtacgtgaactgagaacagaaggtggtccaaataatcatctgttgacaaccatattccagaacgatttgggtgatctaatatcacaaaagcgttggtcctgagaccaagggcttgtcattgcattgggattatggaatattccgtttgggtgctttctgcccaagtctccatggaaggatgaccttgttggccaactgtatccatatgatgacgaacgcggagtgggtagtgctcaggaataacagctcctccccagatgacgccattatgccaaagcttgggccgggcaatacgtcttctttcaagccgga

SEQ ID NO: 680758 - DNA, 171 bp, Homo sapiens
gtatccccggcggttgcggcacggaggcaaaagaagaatcagtgtgtggcttgtcccatgtcatcagcactaagcaacagaaacacaggctgtgtggacatggagcctcagtgtcttccatcatcacaaggtgcaccgtagtcgtctaccatgatcacaagcttatagtta

SEQ ID NO: 680759 - DNA, 762 bp, Homo sapiens
  misc_feature (400)..(400): n is a, c, g, or t
  misc_feature (454)..(454): n is a, c, g, or t
  misc_feature (563)..(563): n is a, c, g, or t
  misc_feature (649)..(649): n is a, c, g, or t
gcgcggcggctgcggcggcgagcattactccggaactcggttcgcggccgcgcccgtcgtcgcacggaccgcgcgcatgcagggcatcaaagtgctgtggtaggtgcggggacggcgccgggggagaagagatgcttgactcgactccagcttataacgaccacacgtcgcttgctcgcgcgggcatgaagatacattacaccgcgacccgtgtatgtatgaccaaactatggtctgtcactcacggtggatggctggacgtggaagaaccgatgtgcaagctgtagggaaacgtggtagggcaacatccatgcagagagattccaggacgtgagcattacagtaagtcgtgaccttgcggggcacaaacgtcgtcgcatagcacgcacaccaaataccnttggatcgggtccttgtgtacctttgacatctgggacattcttccttgcatggntttgaggctcgcgagagcgcttgcgcgtatccggaaagaagatcgtatccgttgcgacaagagttggggtaccacgtgacgtggttgccagagggacgcccaaactggnacgcaccaccgagactagcgacgcaccatttccctctccgcgtgggatgcgggacgagccgagatagcctgggagcccgtgcccgnccgtaaaacgggaagcccaagggaaaacgaaccgagtgttggaaggcagggcctggtccgggggaaaccgagagaagaggcggtggggggcaaacccccgaatacagcgctga

SEQ ID NO: 680760 - DNA, 325 bp, Homo sapiens
ccccccaaggggtttaaaaaaaaaaggggttttttttttttgggggaccccccctgttttttgggccccccctttttttaaaagggggtttccccccggtttttttcccccccccggggaaaaagggggggggggggcggggtttaaaaacccaaaaaaaccctggggggtttttgggggggggggctttttttttaattttttttttaccccctttttcccccttgggggcccgtttttccaaaaaacctttgccccccccttttttttttttaatttggggggggttggggggggccccccccttttaaccccccccttttta

SEQ ID NO: 680761 - DNA, 406 bp, Homo sapiens
cccagacagacaccgcgttccgagatgaatagaggcccgtaagacagagcgcacttcgtatgccaccttccaaccagcaaccagcaccccctattggcccccaggcccgatcgtcttggactccgtactggatgaatctgacctctatagcctgacccattcctacctcggaagttggaggccggataggacgctccaatagagaatctggtgtcaacacctaccggccttgccctggtggacacgagaggaacctggtgaccaatctgcagacatcagaaaggacgactcgggcacggttctgagacagagctggagatgaggccagaccatgcacactacagcccaccttagagacgggactgccgatgtgaggacctggtacaggatccaggcctgcttagct

SEQ ID NO: 680762 - DNA, 523 bp, Homo sapiens
  misc_feature (55)..(55): n is a, c, g, or t
  misc_feature (99)..(99): n is a, c, g, or t
  misc_feature (121)..(121): n is a, c, g, or t
  misc_feature (149)..(149): n is a, c, g, or t
  misc_feature (239)..(239): n is a, c, g, or t
  misc_feature (315)..(315): n is a, c, g, or t
attaattggaagtaaacaatacacaccggaatgcaaagaacggaaattacaacantttttcagaccacagtgcaatcaaattagaattcaggattaagnaaattattcaaaaccgcacaantaacatggaaactgaacaaccttgttcntgaatgattactgggtaaataacgaaattaaggcagaaataaataagttttttgaaaccaatgagaacaaagacacaatgtaccagaatntgtgggacacagctaaagcaatgtttggagagaaatgtatagcactaaatgcccacaggagaaagcaggaaagatntaaagtcaacaccctaacatcacaattaaaagaactagagaagcaagagcaaacaaattcaaaagctaccagaagacaagaaataactaagatcagagcagaactgaaggagatagagacatgaaaaacccttcaaaaaaatcaatgaatccaggacctggttttttgaagagattaacaaaatagatagatcactagccagaataat

SEQ ID NO: 680763 - DNA, 333 bp, Homo sapiens
  misc_feature (103)..(103): n is a, c, g, or t
  misc_feature (248)..(248): n is a, c, g, or t
  misc_feature (313)..(313): n is a, c, g, or t
gggaggatttgaggggacatcatcctgaattaggttaaaaactgtcgcaagggctgggcatggtggctcccgcctgtaatcccagctctttgggaggccaagncgggcaaatcacttgaggtcaggagtttgagaccagcctggccaacatggcaaaaccccgtctcaactaaaagtacaaaacttagcctggtgtggtggtgtgtgcctgaaatcccagctactcagtaggctaaggaaggagaatngcttgaacctgggaggcagaggttgcagtgagccaaggtcgtgccactgccctccagcctgggtnacacagcaagactctgtctc

SEQ ID NO: 680764 - DNA, 411 bp, Homo sapiens
cgtgcccctgtatatgttatccctcatacttaaatatttattttgttttttattaattgctatataatgttgctttcatttgaatagtgaacttatgcgctgtgctctttccatacttacaacctgtaaggcattaagtggagagtaagacttgcgttgaaatcgaactggcatgatctgttatgatcagactgctaaggcttcaggtccagactacagagcttctttcagcattcactgcatgcaagtcttttttccctcataacttcttattgggtaaaaatatgtcagatcattctgaagcaatttgtcagaatacaatatacatcattataccctctccttacattcaacattcatccatttttgctttaccatattaacattctcattttgcaagtgaagtgggta

SEQ ID NO: 680765 - DNA, 150 bp, Homo sapiens
ggagcctttacttgaattgtgcttggaacctatcctccttattcttttcctaattaggcctattaaacacattttagggaattgggattcccttattcccctggttcaatctctagggattagccctaggactctagtgattcgctctcg

SEQ ID NO: 680766 - DNA, 2290 bp, Homo sapiens
aagccactttgacaacgtttctgagccaggggtgaccatgacctgctgcgaaggatggacatcctgcaatggattcagcctgctggttctactgctgttaggagtagttctcaatgtgatacctctaattgtcagcttagttgaggaagaccaattttctcaaaaccccatctcttgctttgagtggtggttcccaggaattataggagcaggtctgatggccattccagcaacaacaatgtccttgacagcaagaaaaagagcgtgctgcaacaacagaactggaatgtttctttcatcacttttcagtgtgatcacagtcattggtgctctgtattgcatgctgatatccatccaggctctcttaaaaggtcctctcatgtgtaattctccaagcaacagtaatgccaattgtgaattttcattgaaaaacatcagtgacattcatccagaatccttcaacttgcagtggtttttcaatgactcttgtgcacctcctactggtttcaataaacccaccagtaacgacaccatggcgagtggctggagagcatctagtttccacttcgattctgaagaaaacaaacataggcttatccacttctcagtatttttaggtctattgcttgttggaattctggaggtcctgtttgggctcagtcagatagtcatcggtttccttggctgtctgtgtggagtctctaagcgaagaagtcaaattgtgtagtttaatgggaataaaatgtaagtatcagtagtttgaattaatttgagaagtacacttgttttcaaagtcatctttgagatgatttaaaaaatcaacccttcacgtagaaagcacgttgtaaatgcataacactctcatatcagtggttgatttgggaaaggtggagagaattttcaattagttttgtgttgtactattcaaattttttacctcttcactgtgtgtagagaaaggagaagggaaggaggatgagaaggaacggaagtcatcctgaaaataaaagtacaggactttttttttttttttttgagacagggtctcaaaaaaggctggagtacagtagtacagtggtgctatctcagcttactgcagcctcaacctcctgggctcaggtgattctcccatctcagcctccctagtagctgggactacaggtgcgtgccactatgccaagctaatttttgtatttttagtagagatgggggttttccatattgcccaggctggtcccgaactcatggactcaagtgatctgcctgcctcagcctcctaaagtgctgcgattacaggcatgagccatcgcgcctaaaggacaggacctttttattgtatttctttaaagaataaatacataacctgaatgcaatcaagtctttagatctaattctcagcttgcagggaacactaggacaaatccaaaaagtgggtcagcgggcacagaatggcccaattttcaacaggaaaatgttataaaagaaaaatatttttgagggaactgttatagattaagagaatagaggcatgtttcagctaaacacatgtaaactttgtcagagataattgggaggagtatgtagaagaatcggattattgttaattttggtaggtctgataatggttttatagtataaaggctgagtaccccttatccaaaatgattaagatcagaagtgttttggctttcacatttttttggattttggaattttgcctataataatgagacatcttggggatgggatgcaagtctaaccacaaaattcatttatgtctcatacacactttgaacacctggcctgaaggtaatttcacacaatattttaaataactttgtgcatgaaacacaattttgactgcattttgactgcaactcatcacatgaggtcaggtatggaattttccacttgtggtgttacgttactggctcaaaaagttttggatctcggagcattctggattttgaatttttggattagtgatgctcaacctgtatacagaaatgtcctcatttttaaaaaaagaaatgcatatttatatgttttaaaattacttcaaccaaaagcaacggggagatgtttactgttatatttaggtgacaggtacatggcaattcattataccctcctattttcctatgtttacattattcattaattaaaaaacaatacctagaaaaacccaagactttcaaaagctattttctatatgtgccaatctttaaaaaacaggataacaagggtatttatcacattaaaatgttgtaaaacagcaaagctaaaatct

SEQ ID NO: 680767 - DNA, 624 bp, Homo sapiens
atatgggtctaggagagtaaaacctaggatataagtcggggaaaaatgagtaacacctcaaaagcacaggcatcaaaagcaaaaataaacaaatgggattatatctaactaaaatgctgttatacagcaaagaaagcaatcagtggagtgaaaagacaacctacagaatgggaaaaatatttgcaaactagtcatctgacaggagattaatatccagaatatacaggaaactgaaacatctcaatatcaagaaaacaatctgattttaaaatggtcaaataatctgaacagacatttctcaaaaagagatttaaatatgtccaacagataaataaaacaaaatgtggccatcaataatcttcaaggaaatgcaaatcaaaaccacagggagttatcatctcaccccagttaggatggctcgtatcaaaaaggtaaaaaataaaaatgctggtgagaaagcagagaaaagggaactcttatacactgtgtggtaggaatgcaaactagtgcaaccactgtggagaacagtatagaggtccctcaaaaaataaaatagaataccatatgattcggcaattccactactggatatttatccaaaggaaggaaattattacatgggag

SEQ ID NO: 680768 - DNA, 291 bp, Homo sapiens
gtttcgtccagcgagttgctgatctacacttggatggatgcactttgaccgcactgtccaggcttagtaacagaagtctatccagcagctagaaagaagggcactcactatcaattttgcaatcgtttttacagatgttaacagacctggctatcgagttcaggagataggcagcaccatgtctggcagaacaggggactgctgattccatgaacctgcagacgcacaagttccacgactacggagattaacttgtatcatagacaaattacccctccaaatcgggcaacc

SEQ ID NO: 680769 - DNA, 298 bp, Homo sapiens
ctaagaggtgagtgagggaatgaagagaggttggttaatggataaaaacatacagttagataaaaagaaaaagttctagtgttcaataacacagtagggtgactatagctaacaataatttattgtatatttcaaaacagctagaagagaagatctgaaatgctcccccacccacacacaaaatgatgtatgtttgagatggtggatatcctaaataccctgatttgacacacggtatgtatgtgtcaaatattgtagttaccccataaatatgtataattattttgtggggaaggaa

SEQ ID NO: 680770 - DNA, 798 bp, Homo sapiens
  misc_feature (50)..(50): n is a, c, g, or t
  misc_feature (62)..(62): n is a, c, g, or t
  misc_feature (67)..(67): n is a, c, g, or t
  misc_feature (76)..(76): n is a, c, g, or t
  misc_feature (78)..(78): n is a, c, g, or t
  misc_feature (89)..(89): n is a, c, g, or t
  misc_feature (171)..(171): n is a, c, g, or t
  misc_feature (174)..(174): n is a, c, g, or t
  misc_feature (246)..(246): n is a, c, g, or t
  misc_feature (272)..(272): n is a, c, g, or t
  misc_feature (282)..(282): n is a, c, g, or t
  misc_feature (287)..(287): n is a, c, g, or t
  misc_feature (294)..(294): n is a, c, g, or t
  misc_feature (305)..(305): n is a, c, g, or t
  misc_feature (322)..(322): n is a, c, g, or t
  misc_feature (331)..(331): n is a, c, g, or t
  misc_feature (567)..(567): n is a, c, g, or t
  misc_feature (631)..(631): n is a, c, g, or t
  misc_feature (644)..(644): n is a, c, g, or t
  misc_feature (766)..(766): n is a, c, g, or t
cactaacgcacacacagataaatcccttgcccaaggtcacagagctggtnagacgcatgttngaacncaagcctangnaacctgtactncagatctgcacccttgaccactgtgcactctgcctctcatgccctcatctctaccaggttgggccggagatacatgggagangcngtcgccacttgctctgccccaggcacttggcaaacacctgtcggttcaatctcagacgaccccagtgaagantgacccagatactcactgtccacctngagacgccanaccanacgtctnacatctgccanagccacacagccccggnagttagggngctgaaatccaaacctcttcctgatctctgcccaccaggtgtctcctccccagcccatgtagggagctgaagagaatggagaccagaggggagggaaagaggaggctggagaggagctccacaggtcttcctcaggcctgacagctgcccctggcttccctgaggtccacaggaacctccagaccttcccaggattgcccagcaggggagggggcccagtggggcaggaactcaangcagttgggctcctggagagcagccaccctgccgctcctgcctgcctcaatgcaacggtctcangctgggctgccangatgggaggcaggtcttgtggagtcgcccacacaccacatacctgccctgaggccttcagggaccaatgcaacaggagaggcattcccaagcaccacatgttccagtggtccctcctgctcnacctgggccaacagggctgaggcctggaggag

SEQ ID NO: 680771 - DNA, 419 bp, Homo sapiens
attatgaaatgtataggtaaatggatggaactaaaaaaaattatcctgagtgaggtaactcactcagaaagacaaatactgtatgtactcactttcatgtttatgttagtatagaggcttgcttgtataataaataacatgtgtgtgtgtgtgtgtaaccacagagggtagggagagggaaacagaatagatagttatgaatggacatggtcaggtggtgactagaatggcaatatcaaacagggagtgagagggaagagggcaggaagggagagaatacagggaagaacagctaaacttcgggtcacttgaagggtcatatggaaacctagtacagtacaagcttccgataatatatatgcatttctttttttttttaagatttatttacttggggctggtgagatgtctgtcgacgc

SEQ ID NO: 680772 - DNA, 375 bp, Homo sapiens
gcggccgcctactactactaaattggcggcggtcgacgagaaagaaaagggagagatttaaaaagtaagaaggtggccgggcatggtggctcacgcctgtaatcccagcactttgggaggcttgaggtgggcggatcacaaggtcaggagatcaagaccatcctggctaacacagtgaaactccatctcttactaaaaatacaaaaatttagccgggcgtggtggcgcctgtagtcccagctacttgggaggctgaggcaggagaatggcatgaacccaggaggcggacgttgcagtgagccgagatcatgccactgcactccaacctgggtgacagagcgagactccatctcaaaaaaaaaaaagaagtcgacg

SEQ ID NO: 680773 - DNA, 303 bp, Homo sapiens
tagagatcccccgcggtcactgtcttacgttacatattgtgacaattcctgctgcacagcaaagtgattcagttacacatttgcacaatccattctctttcagattctctgcccacatatattatcaccgtatattgggtagagttctctgtagctgtacagcattctccccatctatccaactatccataattcctcaggtatgtacatttctcaatccccgcttagacataatccgcggggtgtaccgaggctcgaaatctcgtaaatcttcggttcattagcgtattttcctggtgttga

SEQ ID NO: 680774 - DNA, 817 bp, Homo sapiens
gggcatcttttctagctgcgacatgtgtacccagtcacgccaacgggtgatgagcgtctcacattcagaccttggtctgccagctgccaccactcccttatctgatgctggagaggcacaccaaaatacagagaactttcagaaaggcaccatcggacttgagctggaagcccggcttttacgttttaaatagataagatgtggaggaggatgtgtgctccatgaagactttttcacagaatctaacttgctatggagtggccagagggctaaacaaagatgccaactgcctttagatgtctgcagctgctatcacggatgtgtgaagctataggctgtggcaaagaccaacctggggagaacaatctttggccatttattcaaaggctggtgcatcaggggatccaaccacccatacatgtgttatgggaagctgcttctccccgacgcctgatttagctgatcttcagatgaaactggttgtccagcacgacctcctaccccatttctacccatcttgggttcattgggccgggacccctgtgacataatacgtattaacgggaaagcgggcccccattctacttaacttagggtatagggctcaggagccttcacatggatataaggttctgagtaaccatctagaccatagaggttctttgctaaatataaggagcattcgaaccatggctgaaaatcgaggaaagtaaagaaacacacgtagagaaatgtgagagatggggatggggcctcctctcttaagggaggatgagtattatcgcgcgtctaccgactccgcagcaagtcatatgag

SEQ ID NO: 680775 - DNA, 178 bp, Homo sapiens
ccagcagcttggaaggcgctgcgggtggctcacgaggtcaggagtctgagaccggctggaccacagtggtagaaccccatctcaactaaaaaggaaatataaatacaaaactgggcatggtagtgcatacctgtaatcccagctacttgggaggcaagaggaggggagaagtagcctg

SEQ ID NO: 680776 - DNA, 138 bp, Homo sapiens
cctgagtggtcgatctcggctcactgcaacaagagcaaaactgcgttcaaacaaaacaaaacaaaacaaaaaagaagcaaattgccacagtcacctaaccttcagcaaccaccaccctgatcagtccgttcgcatgtt

SEQ ID NO: 680777 - DNA, 508 bp, Homo sapiens
  misc_feature (4)..(4): n is a, c, g, or t
taangagcgccccccatgcataccttacatatatataaacacatgtgtatatatgtacataccacacacatccacacatgcgcacctacaacctagacaccccccacactcacacgtgtatgcacacgacagcacacagtggtggctgtgaccgcaggggagaggtctggggttccccagggcctgggagctttcaccttcttcggcttgggcagtggtgcagctggccaggggtggcacaggcaggcctcacttgggctccagttgaaggaacagctgtctggcccagccacccttccccctgcagagtggcagggccattgtggttagagcaacttgcacctggcctgggctgacaggccgtgagcggcattgcacagaccggggagagaagatgccagctccagcaattggaagcttgatgccagagtggggagaagggcagggctagttacggcgctcgttacggaggcggttaggaggcgctcgttacggaagcgctcgttag

SEQ ID NO: 680778 - DNA, 138 bp, Homo sapiens
gtcaacatgtatatatatgttatatacaaggtctgacaacatatttctgtttttatatgttttcttatgatgcagggcatactcttatgcaaataattagacacttcataggtcttaatttccatatctctatatatt

SEQ ID NO: 680779 - DNA, 630 bp, Homo sapiens
cctgatgcgatgtgcgcgggcaagccagtctggagcgccgaggagcggcctcctcttcaatgagtgggagggggcagggcctggagtgttgggtgcagcctgggaacacctccgcttaatagtgcgtggttagagactgaatcagtgtgactcgtctggcagtcagtcccagtgctgaccgctcgtgagtgtactttccttgatcaggctaggcttgttgtggcagggctcagcttgacagtactccatcctgcagcagccttcatgagttctcgcttcttccctgccccagtgccttcagtgtgcagaggccatgcaaggtgctcggccggtaaggagaacggtcagtggcccatgggcttcagcatggcggcaccttgttaattggcattgactgttgatggagtgcctcctcctcactctggactccagacaggaaggtgatcccagtgacaacggggggcactgtgcgtggcagcgctgagactggtcgccatggcaatctcctcatgagaaaactactgaatgcaagcatagtctggggtgaccatgttgggcttcagcaaggtgccttccaggtaaattgggtgatcactcagagccttgtagacaggcagccagcaccttctc

SEQ ID NO: 680780 - DNA, 183 bp, Homo sapiens
gccctgtgggcacgcacgtgcgggcaactcggaactggattgccaccaggaatttctaacatctttttagaagaccagaattccccatcagaggcccaggtatagtagtgacagggtcctgcatgccttctgctgggacacggagaagcggagtcctggcaggtgtgaccccggcccctgcct

SEQ ID NO: 680781 - DNA, 489 bp, Homo sapiens
  misc_feature (342)..(342): n is a, c, g, or t
  misc_feature (363)..(363): n is a, c, g, or t
  misc_feature (444)..(444): n is a, c, g, or t
  misc_feature (454)..(454): n is a, c, g, or t
gctgctcgggtacagataaaaacatcattgcaggtggtacttgaaccatgaatgctctcaactatgaagttttacgcaacaccgagaaattgtattacaaagaccaataccaggccggtgcaaacacgcaagtaacgcgggtgcacagtgacggtatcgagttgcaaagtaccgtggcctacccggaaggcggtggccaggaggcagacatgggtaccattgaacttcccatcggtaccgtacgcttcatctgggttaaaaaactttacggtagccccattcgccttgaaggtttcaaaggtggaaagctgggcggcatcattattcacagcctgcaccccnatgacctgcacttgctcgatnaagtcaccgcaggtatgcccggcccgcgtcaccatcgatattgaacggtgcgaacggctgacgctgtctcacagtgccagncacttcttgnatgccgccggcatcgggcttgcaagaagagttgaa

SEQ ID NO: 680782 - DNA, 195 bp, Homo sapiens
gaccagctaattttttgtattttttcctttccgtagagagggtattttgccattgttgcccaggctagtcttgaactcctgggctcaagcgatctgccttcttaagcctcccagagtcctaggattacaggcatgagccacttcacccagcctcttaacaaattttgaatataactccgccttaaaatcttcaga

SEQ ID NO: 680783 - DNA, 134 bp, Homo sapiens
gggtattctgggggaacatgcctttgttataacatttattgaatgttcacttttccagctctgaatactgaaacttagtgagattttttttttcgagccatgccccatcaacacttttaggttgtctctaatgg

SEQ ID NO: 680784 - DNA, 1004 bp, Homo sapiens
gcctcatgtacccattctaatcgcaatggcattcctaatgcttaccgaacgaaaaattctaggctatatacaactacgcaaaggccccaacgttgtaggcccctacggggctactacaacccttcgctgacgccaggtagaaactcttcaccaaggagcccctaaaacccgccacatctaccatcaccctgctaacatcaccgtcccgaccttacgctctcaccatcgctctactactattgaaaccccccgtccccatacccaaccccctggtgcgacagcctcaagactaggcctcctgattgtatgtctacgccacctctagcctagccgctgacgtcaatgcctcggatcagggtgagcatcaaattcaaactacagccctgataccggcgcactggcgagcagagcccaaagcaatctacatgatgaacgtcaccctagccatgcattgctaacgtatcaacatcactactaaggggctcctttaacctcgccatccttatcacaacacaagaacagctctgatacactcctgccgtcatgaccctagcccatcatatgattgatctccacactagcgagagcatcaagcgaaaccgcttcgaccttgccgaaggggagtccgaactagctctcaggctgcaacatcgagtacgccgcaggccccttcgccctatgctggcatagccgagctataccaaccttatcattcataagcaaccctcagcactacgatctgcctcggaacaacatatgagcactctctcctggaactcggacacaaccattggttcagccagaccctacttctagccccctgctcgttataaatcgaacaggcgaaccccgatccgtagacaatcccataacctctcatgacaaattccacctcgcccagcagtaatcaggagcgcccgcccataatccagcatcccgccccaaacaaccaaaccacacaacaacaccgccctcggggcagcgaagcagcccccctccacgga

SEQ ID NO: 680785 - DNA, 242 bp, Homo sapiens
gccaaaaaggatttaaaccgggctgggggggggaaaagtccttttttgttttcaccctttggttccaaaaaaagttcccctttttttgggttttggttccccgggggggggccccaggggtttttttttttttttcccttccccttggctttggggtcctgttgggaaccccggccccctgtttcccctttttgggggggaaaatccataaaaaggccccttttttttttttttggccccca

SEQ ID NO: 680786 - DNA, 134 bp, Homo sapiens
ttatccccagccggtgagggagatcagcggataacgcacaaggtcttcaatcgacctgatgccaccacctaggttgaccagggtgggcgagcataccggtgtaagctcaatgctggctaacagcgtggagtcga

SEQ ID NO: 680787 - DNA, 1420 bp, Homo sapiens
  misc_feature (255)..(255): n is a, c, g, or t
  misc_feature (310)..(310): n is a, c, g, or t
  misc_feature (592)..(592): n is a, c, g, or t
  misc_feature (806)..(806): n is a, c, g, or t
  misc_feature (961)..(961): n is a, c, g, or t
  misc_feature (1039)..(1039): n is a, c, g, or t
  misc_feature (1420)..(1420): n is a, c, g, or t
gtgacactctctgtgccgggtggctgttcttgttgttcgtttgttataatctcaaaggatacttataattccatgtggaagaaatagccatatacctgagctattcgtacactttactaaaggaatgtgtgaatggtcgatatacgatcctcgatgcgtctcctctatatcgtactggtcttcgttggacatgtttctcatccaatagtactatgtactagattaacactactaaattcccatgaggcggtgtcntaacccgtattggaatacccatcaggactagcaggaaaactcacgtcatggtccnaggtgagactaacaaatacactatagccatttattccggcattaagattgtgaagggcggtcgttataaccttggtgttagtgcatttggccataataggtacaaggacccagccctttttattaagctcgtacgagaccatgatttattggtgacatgttgcatggaagggataggttttaggctcttatctaaaatcgtagaaatagttcccaccttacataggtaattcctttatccttagggttccggaaaagaccaaaagtttgttattatatcaangagataagtgaccgttccagttgcttcttaggttgacctgttgcgaactcagaacagacaccaaacaccgtaggaagccagtgacgaacacagagggtaatcctccatgcctaagaagttctataaaccttcaatttgttgaacttttcccaggggggtatctcataatccgctcaagccaggttgtttttattttcacgcgtgaagcctggcngtacaatgaagtgtcatcgttcgtgacagccgggcactggacatcaatactgggcggaccaagtcatggtggagcgtgcttgcaaagcattctggtagtcttgcttgtatttaccacgattggaaatattgggactaatcgtaatcgtatcttgngggctggacaatctttaagaattgcgggatatcgcatctgttcttcatcgcacatttcacatggccttaggaaatttnaccaattcagtttcctaacggggctgaagtacttgcatttggacgattattagtacgcgcacggcgtgtgtgcggaatgcggagagagtgggtgaactcacctgggaatagggtagagatgttccctaacattggacccgtaaattacccgaggttgcagaggcgcagattgggaccgggcacaaagggagatttggacacccaaattggcgggatggggattaaggaaccaggagagcattgagagcttcagcgagagaccacacggggttgccgttcatccacagagagaagctcatgcaaacgccgagagcagcgcgacagagagtcgcacagtgtgcaggtcacacacagaggagagcactaatacttatgctctan

SEQ ID NO: 680788 - DNA, 207 bp, Homo sapiens
ccttatcactatgttagtgtccaactccaagtgggatcaattccttagtataatattaaggcttactaatatcactgctttttccttatcttaattacttacttataatttatcctttattttaaattatctgtactatctagtgtctaaaacactattctccataaaaatcattcattttctagccctctccctcagtcctttatt

SEQ ID NO: 680789 - DNA, 971 bp, Homo sapiens
gccgaggatgggtgtaatgcctgagattgcacaagctgtggacgagatggctggctcctcccaactgatatccaggctgaatctatcccattgatcttacggaggaggtgatgtacttatggctgcagaaacaggcaagtggcaacaactggtgcttctccagtattccagttatccgagcatcagtttatgaaaactctgcaaagcaacgaaccaggaaggcaaacaacaggcaacaacacacacaattcaacaactggtgcttccagtgctgcaacaaatggcagatgaacccatatgcacagcaggcatctgcattttagccacattagggtccagcatggtcttcagtggtccaaagccagcagacagtcacaaggcaatggcccatgggtgtaacgcagctaacgtacacggcattccaatgcacacagggcacacaccactactcatgcaagatcagtcgctgaatcaagtgcaccacacggcgatcaactggacagaggacatccgaggatgcgagtcgtaacccactgaacagcgcacaatctacacggggaccacctacgagataacacatgaccaacgattgccgggccatgaacggacataagcagagatggcaacacgcagcgccaccacgacacaagaccccatatagagcagcaacacaaaataggataaaccatcaaatgggacaagaaagggcaatgccacaataagaggacaataggcagtaaacccaataggggagaagagggaagaagacatggagaaataataaaggaagtcaaagggcgggaagacaaggtaagcaaggataaacataacccgacaacaaacatgcgggaagaccggacagaaacgggaaacaaaggacaagtagggaaccagataacgcaagcgaacagaatagaaacacgaccaaagagccgaacgaaaaacgatgaataggaagacaggaaagaaaa

SEQ ID NO: 680790 - DNA, 327 bp, Homo sapiens
ccggccggtggtcataccaccagaatctcagcgagatctccaggtcatggaaaactagactcagaattttcatttggactgaggtggaacactttctgggtctgggctccctcataagcagcccctgagacaaatattcagtggcaagtagtttatcacagaggtgatcccatggaatacacatggaggaataagtaagtgagaaaaaaatgggaaggaagccagtcgagaatacttaatcaagccatttctactgtggacaaccagaattttatcctacgggggaactcaggtatgaacaacagtgcaggtatgaacaacagtgca

SEQ ID NO: 680791 - DNA, 194 bp, Homo sapiens
ctcgcctctgccccctaaccacagtaaaaaccaaagccactggcccctggatttaaagtcatttcagaccaccttgggggcctgccctgctctctccagaaagcctcaatctatgagaaatgaatgtttttgtgccctttctggacatgtgtagcatcctcagcattgacatccatgccaattttgagggattg

SEQ ID NO: 680792 - DNA, 394 bp, Homo sapiens
ctggaacttagtacccttaggcctctctggacagtatgtaagaactttttgtgggctcccccaaagaaacaaaaggaagcctgcccccttgtagccctgaacttttttttgggcccctgaatcccaggaaccctcaatgaggttttcaagatgaaaagactggtgccagctaccagcctggctggccctgtcctgtcccccctcattgcccccactcccatgttgttttgtgaagataaaagctggggtcttttttttttttttaagtctcccaagacatggggcatctcccccaatttaagttcctgtccctttggaaatttgtttttatggggccagtttgtcaaaaaaaaacaaagtttttgtatgaatacagaatgtgattttcgccaga

SEQ ID NO: 680793 - DNA, 130 bp, Homo sapiens
tccttttaacttttttaagtgggctcctcaaaatttcttggtgacaaatttttgggctcaagttgtgtttcccatttaaaaagttactgatttttaaaaacttaattaactttaaaactgtgccacacgc

SEQ ID NO: 680794 - DNA, 291 bp, Homo sapiens
caatcccctttgccatttttggtttcaatggggaccctcctccccttcccacctgtttttataatggtcagtgaaatggcccaggcttttcttccagggccatgcttggcaaggttggttgagggcaccctccttttttgcacccttgggacgagggcagggttgggttttccaatgcctccatcccatccccatggtgttttggcctcctcaaagcatcccccatggtggatggggtgaagtgggtatatttttttgattttttttttaataaaaaggaaaaggagcaga

SEQ ID NO: 680795 - DNA, 225 bp, Homo sapiens
tttaagaacaaacgtggggaacaaacgtggggcgctatggtatgtaaagaatacttatacactagaatactgcttcgagacgtatcatagtactatatccaaaagaagccacccacctcaaagagccctgcgcagccccacgtgacccatagagtgtggtagccggtcatttaattatagccactggtgggcaatcactcacaagtatacaccatacagagtgtg

SEQ ID NO: 680796 - DNA, 340 bp, Homo sapiens
  misc_feature (338)..(338): n is a, c, g, or t
gatagtgaatgagccaatgaaaatttaccttgaggttacaagccaggcacagaggcttatgctgtaatccccgcactttgggaggcggaggaggcggatcacttgaagtcaggtgtttgagtcgagcctggccaacatggtgaaaccctgtctctactaaaaacacaaaaattagccaggtatggtggtgcacacttgtaatcccagctacttgggaggctgaggtggaaggatcacttgaacccagctagtggaggtttcagtgagctgagagccaagattgcatcactgcattccagcctagacttggaaggcagcagactctgtcttcaaaaaanaa

SEQ ID NO: 680797 - DNA, 935 bp, Homo sapiens
  misc_feature (94)..(94): n is a, c, g, or t
  misc_feature (340)..(340): n is a, c, g, or t
  misc_feature (362)..(362): n is a, c, g, or t
  misc_feature (373)..(373): n is a, c, g, or t
  misc_feature (388)..(388): n is a, c, g, or t
gctctgtgacctgtttactgagcccagggcccagcccctggctgagggaagggctggcaggccgtgttttggtggcctcctccgtccgcctctnagagctttgctgtggccttggggaccgaggcttgtcacaaggtgccgggtggggggggcccaggtccagcgagtacctggaaacccaggcacactgtgtcctggagctgggccatccctcctgctgcttttcccgccctcttcccaccccttttctccctgctttcctccctcccttcctcctctttcctcatcctctccatgtttggaagcctcctgcctggaccacagcctgcacatgcgtcanggctctgggagccagcaaggantggacagctgnccctgaccaggcagngactctgagggactccccctccaccctgggctacactgctgctgctcccctccagggctccccaggtccagtcctgggcatctccaggccaggccctgtgactgtccgcacgacccccgcagacccgggaccagtatccccaggcccagctccatcccagtcagccacacacacctggttgtgggcatctgccacttcctccagtgttggcaactctgcggctttctctactcaggaagcacttggagccgccagctgcaggcgctcctgtctccgggcaccgggctctgctggagctgcagcttagcctgccctcgcccccacaggcgtggggattgttgccctgtgtcggtaaggcaatgtttgaggcaggcacccaaacccaggaaaaaataactgggttttaaaaatggacaatgaacgatttgggtgataaaagaaaatcctcaaacattacgggagggagtgcggtcgaggctagagtcccgcccccgatcgagtcccgctgccctccgttctcagagtcctgccaaggtaccgactgatc

SEQ ID NO: 680798 - DNA, 1237 bp, Homo sapiens
  misc_feature (94)..(94): n is a, c, g, or t
  misc_feature (340)..(340): n is a, c, g, or t
  misc_feature (362)..(362): n is a, c, g, or t
  misc_feature (373)..(373): n is a, c, g, or t
  misc_feature (388)..(388): n is a, c, g, or t
gctctgtgacctgtttactgagcccagggcccagcccctggctgagggaagggctggcaggccgtgttttggtggcctcctccgtccgcctctnagagctttgctgtggccttggggaccgaggcttgtcacaaggtgccgggtggggggggcccaggtccagcgagtacctggaaacccaggcacactgtgtcctggagctgggccatccctcctgctgcttttcccgccctcttcccaccccttttctccctgctttcctccctcccttcctcctctttcctcatcctctccatgtttggaagcctcctgcctggaccacagcctgcacatgcgtcanggctctgggagccagcaaggantggacagctgnccctgaccaggcagngactctgagggactccccctccaccctgggctacactgctgctgctcccctccagggctccccaggtccagtcctgggcatctccaggccaggccctgtgactgtccgcacgacccccgcagacccgggaccagtatccccaggcccagctccatcccagtcagccacacacacctggttgtgggcatctgccacttcctccagtgttggcaactctgcggctttctctactcaggaagcacttggagccgccagctgcaggcgctcctgtctccgggcaccgggctctgctggagctgcagcttagcctgccctcgcccccacaggcgtggggattgttgccctgtgtcggtaaggcaatgtttgaggcaggcacccaaacccaggaaaaaataactgggttttaaaaatggacaatgaacgatttgggtgataaaagaaaatcctcaaacattacgggagggagtgcggtcgaggctagagtcccgcccccgatcgagtcccgctgccctccgttctcaggcccctgctttagttgtttccgggccaccggggacagccatccttacaaggcgatgtgttcaccggtgtccttccccgccacacccacctctctgcgccgtgaattttgtcacttaagagtatagtttgcactccatccagcctgggcgactgagcgaggccctgtctctaaaagagtagagcttggggaaggttctgtgctggctcaatccatatcagaaagtttacccctcggccaggcacagtggatcacacctgtgaccctagcactgtgggaggccaagacagaccagcctgggcaacatagcaagactcgctctctctaaa

SEQ ID NO: 680799 - DNA, 153 bp, Homo sapiens
gggggcctctctagcttgcggcctgtgtctatggtcgggccctcttgtcgttccagcttgctccggaccgagctccgggttgtatttggggtgtgttaaggagagtgccgggccttccgggagacccctgactaaacgggccgtctcccacaa

SEQ ID NO: 680800 - DNA, 257 bp, Homo sapiens
tctagaggatcccagatgattgctccacgctcccggccatagagtggagtatattcagccttgaaagggaaggagattctcacacccactccaacatggatgaaccttgagggtgtcattctcagttaaataagccagttacaaaaacacacatgctgtatgtgattccgcttctgtgaggtctctagagcagtcagattcctagagacagcaagtagaagggtggttctcaggggctgccggagcggtgcacatgt

SEQ ID NO: 680801 - DNA, 164 bp, Homo sapiens
aagattctgtgggctcaagctgcggacgatgcgggacttgggaagaagaagtgaggcctccggatggggcaggctgaagggcaggtagtggtatgtatccctgggggctcccgggtgaagaacctgtcctgaaagagctcgtctataatgctggacgcgcggct

SEQ ID NO: 680802 - DNA, 240 bp, Homo sapiens
ttagcaccgacagtcagctggccccatgccacaccgtggcttctcggggactggcctgcattctcacacccgtgcttacaggcaaggatgggcatttgttgctcccctgccagcaaactcctttggaccaggaatcgatgccgatggtgttagcatacaagtcccgcttcaaggcacgctggtgaaacactctgagacggtcatgaaatcggcttttcatccctgtcgggctagtcgggg

SEQ ID NO: 680803 - DNA, 417 bp, Homo sapiens
  misc_feature (188)..(188): n is a, c, g, or t
ccataaacacgaatggctgctctccctaaaaaaatcacccatgcccatacaataacacaacaaaacccacaagtaccttatgaggcaaacagacgcaacatcccaaaaactttatcagcaatacattttacaaaaagaaaaggtggctgggcacaagtgcacgcctgtagtcccagcactttgggagnccaaggcaggtggatcacctgaggtcaggagttcgagaccagcctggccaacatggtgaaaccctgtctctactaaaaatacaaaaattagccaggcgtggtggctggcacgtttaatcccagctacttgggaggctgaggtaggagaatcgcttgaaccctggaggtggaggctgcagtgagctgagaccacatcactgcaccccagcctaggcaacaagagtgagtg

SEQ ID NO: 680804 - DNA, 706 bp, Homo sapiens
tgtgcgtcctggagggtgtctctgcccttccagacccatggatattgggctggctaccaccccactgctgaccagcgccaacgggttctggggtgcctgcacccgcaagatgtaatgctcgccatcgcccgcatccggcatgctcgcgacaaaatactgtttgccgttgaaatcgatggctttagcctcagacagttgcagctcctgacccacaggctccaccaacacttcaaggctcgcagtgggcatcaacgcctgcgccacttcatcgcgggacagggtttgaatcagctgtgcttcttcgattgcaaactgcccctgcagtgcttcggccacaccgtcgaacaccgccttggagattgcaccggactcgaaatcgcgcaacaacgcattcatttgttcgtgatggggttggttctgcgcctcgaaccgcgagcggtatttgttcgcgatgtagtcttgccagaattccctgacgagcatggtttgaaactcatgcaccgaattatccaggccgatcaccttatcgtacgcagcatcctgcatcgcctggctgacgttgccgaaacgaatgaacctggtctgctgcgcctggccaggcaagtcaagccgctctttaaggccgtaacgataggccagcctgatttccacttcttctagagcccttagagcgtcagccttctgcgtcgccgtcaggtcttcgcgg

SEQ ID NO: 680805 - DNA, 140 bp, Homo sapiens
tagtttagaagtttcaatagcaggcactctgagccttgtttggttactggtttgcctcgatagttccaataacagggccacctctgagtcttgtttgttaacttctaaaacgaggggctatcgaaacttctaaaactagg

SEQ ID NO: 680806 - DNA, 927 bp, Homo sapiens
ggacgcgtgggtcgacccacgcgtcgcccacgcgttcgctgtagacatatctgaagagatggattaagaatgctttgtattaacggattgtggagcacatttcaatcatttaggattgtcaaaaggaggattgaggaggatcagatcaataatggaggcaatggtatgactccaagtgctatgtcgcagatgaaattggcagtatagaccttatactaaaaggcaggggttatacaatgattatatacattttccttaaaatactagcaaacattttattcagttgtctgtagctacaattgcttgctttttaaaggctgggcaatgtggcgaaaattatattgcccattttgtagcaacttatttgctcccttccccccattttggttatatagtagggactaatgtgggaagaactggctagtttgtcacagtgcttagttgcaatcgtgttaattgtgtgacctgctgtggggtgtacagtgtgtggtacaggctgttttgaaatccaacaagatacgagtatagactatcaatactgtctaaatctgcatgtcctctgagtgactgatagagcgttgctatttcatttttttaagacaaaatgaaagcacaatataaagttccaatgtattggtgtgatatttattgggaatactttaagtctcacttccctttatactagtttccttaatggcgtcgaatgtttatgagactttatttgcaattggttgcaatgggacttaaattggttgtgactagggggggcctggcgacacttttggtactttggccgaacgttgtacgtaggacaggggattaagcaccgtacaaggtcccaggtctatgagtatgaaccaagtggggtggttagagacaaccaaaacaccgagggaggacaccagtggtagacaacaaataatgtag

SEQ ID NO: 680807 - DNA, 444 bp, Homo sapiens
  misc_feature (49)..(49): n is a, c, g, or t
  misc_feature (276)..(276): n is a, c, g, or t
  misc_feature (407)..(407): n is a, c, g, or t
  misc_feature (443)..(443): n is a, c, g, or t
gcatgcatttttcaatgggagatactaccgcaagagggcaaatgttgantcttgaaaggtgaaaaaaaatcttgaatataacaatggtttttgacccttcaaagggccatagtacataaacagatatataatacatttgtggcattaaagtttcctaggggtggctgggtagcgtggctcatgcttataattccagcactttgggaggccaaggcgggtggaccacttgaggtcaggagctcaaaaccagcctggccaatatggtgaaaccctgtnttttactaaaaacacaaaaattagctgggtgtggtggtgcatacctgtattcctagctacttgggaggctgaggcacgagaattgcttgaacctgggaggtggaggttgcagtgagctgagattgcaccantacactccagcctaggcaacagagggagactctgtnt

SEQ ID NO: 680808 - DNA, 1293 bp, Homo sapiens
actccatctcaaaaaaaaaaaaaaaaaaaattttaaaacggtgtcaggaaaaatttcaccaaggtaaaccgggtgattcctgggttgatagactctatctggcagtatatttatttcagtggtatcagaaccccaaagttgtgttggccttggtaaatctcttaaatatctctcacatttttggcaaacaattagcatgcctatcctctatagctacacactactggaattccactcttattagttagacaactacttacgagaatttaccaaatactgggctctgtgaaaaagtcttgggccctttattccaaccaatcttctatcagtttgtgccccacgtgaatttttccaacagtgttcgtgcgtggcgaaatgtcgcttatacactacagtctagaacaccgttgcaaaacactgtgacttcttacactttaaagaacagtggggcatagcagaagtgaaagtttctacagtgcgccttttacacacacacggcctatcttccacagctctcccaatcatatcttccaaacaccgtgctcggggcgcctgtgcctcggaaaatatgttggcctccatgcgcgtctccccgtggaactctcacgggaaacctcttaagtggaagcccacccgtgtggatcccctatacaaaatctacacctgtacccgccctaaaagaggaaccctttctccttacgcattcctcgcccggtatcatctagcaagaacaaatttccacggaaagtgtcccacatctttaacatttctcaccattcctaagctgggggcgtctttgcctataaccccaacaaaatctcaccacggggggctttcagccacgtctacacacctttcaaagcgcgcatcgcgagcatgtggcgtcccccatgttgtgttggtgcccccgtgtggtctcttccccctattagccaaccccccccaacgttgtacgccgcccgactataacatggtgtgccaaacattcccattttatacataaacgcgccccttttgtcacaccccaccagttgtcggggggcggcatatctctgtcattacaaatagcgctccacacaatttgtgggtgccagacacaacaccaatccttgtagcgaacacgcagactccttgggcacagtggccttctacgtggccctgtcttcctatggtgggaatatgtcccgatagtgacctgcttaacaacgaccagagggttctacttcagagggggacaccacttcaccgcaatttaactcattcttggtggtatgcccgtgtgtgtgaacaacc

SEQ ID NO: 680809 - DNA, 335 bp, Homo sapiens
  misc_feature (116)..(116): n is a, c, g, or t
cgccctggcgcactgctcttcccggtcatagaggcgccacgcccgtcttgtttctcctcctgttgcttgggactttgggccccggcgccgggcaagcgcttcctcccgaggaaccnccgttgatcattaaggacgttgaagcgcacagtggacctaaagcagccacctggctaaggtgacgcccgaggtggtcctggcgcacctggccggcggctccacgtcccagagctaccgctttcctgctcgcttttggagctgagctcaagcccggctcgcgcagcttgagagtacagataaaggcagagatgaggaacaccacagtttggagtgtacgt

SEQ ID NO: 680810 - DNA, 127 bp, Homo sapiens
aggacctctaagacatccttatgacgacagttttgtccaaggggatatccacagagtaccttgtggcattaggtgattgtagtcatacactttaaaaagattttatttctgatcttttggcgatctt

SEQ ID NO: 680811 - DNA, 300 bp, Homo sapiens
  misc_feature (82)..(82): n is a, c, g, or t
  misc_feature (84)..(84): n is a, c, g, or t
  misc_feature (86)..(86): n is a, c, g, or t
  misc_feature (99)..(99): n is a, c, g, or t
  misc_feature (106)..(106): n is a, c, g, or t
  misc_feature (160)..(160): n is a, c, g, or t
  misc_feature (227)..(227): n is a, c, g, or t
aagtgcggcttgctggcagagaggtacctttgggtcgtgggcgcctccgttgttggcctatacccttcataacatgacgacnantntccgttcgaatgncttatcngtggcggatgtctcctggatgagatatattcacgaacttgagatcctcggagancgaaggtagtccatccgtcgactgtcgattcaacgcttgtggtctatccgggcgacgggcatgggtnacttgtctcgatcgctcggcatctctgctctctcgattcactttgctcattgttcactccggtgatggtacgt

SEQ ID NO: 680812 - DNA, 209 bp, Homo sapiens
tgtctagcgatccctgtgcgcgagttccatcagaagagcttaatagagattaaacaaatagactttaattttagagaagttacatttacagaaaacatgagcacatagtacagtgttcttatatcccttctctacctttcagtttccctattattaatatcttgcattagtatggtacttctgttgcagttgatggaagcgtcgcgcat

SEQ ID NO: 680813 - DNA, 276 bp, Homo sapiens
cttttcatatctgactcctgtaaactatctataccaatggctactccccagaggtctgtaaaccctttaaacactgtatgtaaaattgtgtgactttccgtgcattttttgagaagagtaaccatagcttttttcttttttttttttttgaacactggccctctatttagctacctatatgcctgtggtgcagggttgtatctctgggcccatgtgggcaggcggtgccctcaaatatcggttgatgcttaaagttatttttttggttaaccaggc

SEQ ID NO: 680814 - DNA, 102 bp, Homo sapiens
ccactaggaccgtactactgcactgactaatttaggccttcaccacttctcagatgcagtatcttcttagctgacctccctgcctcatccacagctttcaca

SEQ ID NO: 680815 - DNA, 561 bp, Homo sapiens
  misc_feature (1)..(1): n is a, c, g, or t
  misc_feature (61)..(61): n is a, c, g, or t
  misc_feature (79)..(79): n is a, c, g, or t
  misc_feature (83)..(83): n is a, c, g, or t
  misc_feature (90)..(90): n is a, c, g, or t
  misc_feature (118)..(120): n is a, c, g, or t
  misc_feature (129)..(129): n is a, c, g, or t
  misc_feature (141)..(141): n is a, c, g, or t
  misc_feature (144)..(144): n is a, c, g, or t
  misc_feature (160)..(160): n is a, c, g, or t
  misc_feature (169)..(170): n is a, c, g, or t
  misc_feature (189)..(189): n is a, c, g, or t
  misc_feature (191)..(191): n is a, c, g, or t
  misc_feature (218)..(218): n is a, c, g, or t
  misc_feature (223)..(223): n is a, c, g, or t
  misc_feature (239)..(239): n is a, c, g, or t
  misc_feature (242)..(243): n is a, c, g, or t
  misc_feature (248)..(248): n is a, c, g, or t
  misc_feature (252)..(252): n is a, c, g, or t
  misc_feature (268)..(268): n is a, c, g, or t
  misc_feature (276)..(276): n is a, c, g, or t
  misc_feature (281)..(281): n is a, c, g, or t
  misc_feature (292)..(292): n is a, c, g, or t
  misc_feature (294)..(294): n is a, c, g, or t
  misc_feature (318)..(318): n is a, c, g, or t
  misc_feature (325)..(325): n is a, c, g, or t
  misc_feature (355)..(355): n is a, c, g, or t
  misc_feature (379)..(379): n is a, c, g, or t
  misc_feature (395)..(395): n is a, c, g, or t
  misc_feature (402)..(402): n is a, c, g, or t
  misc_feature (404)..(404): n is a, c, g, or t
  misc_feature (406)..(406): n is a, c, g, or t
  misc_feature (408)..(408): n is a, c, g, or t
  misc_feature (431)..(431): n is a, c, g, or t
  misc_feature (451)..(452): n is a, c, g, or t
  misc_feature (522)..(522): n is a, c, g, or t
ntccctctccatcccctcaccccaccccttagccagcggtgaagggaatggaaaatgagangccccgagggtcctgccngggnaggctgncccagacgtgtggtgagcagagtcagannngctgtggcnggggcagcagcngcnataggctcctccctanaaattaagnngctgaagccacagctgtgngncaaggatacttgtagaagcaagggagngcagnatgagaagggagaggnagnngcagngacncccagccatgggatgnacgggcangcgcnccgggctcagngncaccaacaggccaggtgggaaganggagagncagaataggccaggagcatggcaggttganggactgaggcccctaaattttggncccaggggaaaggaanaggccantncngnccagttttgatggctactggggnagggaatgtattgaggaagnntgggggggggagggggccagcaggcacctctagaggtgacaggacaggctgaaccccccaccctgacagnaatgagcttgagagctctggggctctctgggaatgtcac

SEQ ID NO: 680816 - DNA, 367 bp, Homo sapiens
ggagatcgtgacatcacagatagaggaaaaactttcaggactcatggcgagctgaaatgtagatgagtatcaagcagaacagaaattaactgcttgtactgaactaatctttcgacttttgacttaaaatgttgctgctccttagtttagtctatacagagtcttaaaacagtgggtctggagctatggataggtaatagcgaattcagtatacgtcccatgaacaaaattgggagactataagtttctctctacctgattactccagaagtttagaatgtatgcgtgagtattcttaacttatggcaatacagatatttgcataagatgcaataagaatctgttttcatttgtaaccgaacactac

SEQ ID NO: 680817 - DNA, 749 bp, Homo sapiens
  misc_feature (20)..(21): n is a, c, g, or t
  misc_feature (158)..(158): n is a, c, g, or t
gctttcggagggtggtgagnnagtctgcggacgctgtataccctcctccacttcccgctgcagccaataaaggccgttcctaccataaaaaaaaaaaaaaaaaaaaaaaaaaaaaaaaaaaatagaaaacaaaaaaaaaaaattaaaaaactttggtnggagcaatcttgacccatttaaactttagaagtgaaccaagcttatgcatgcggccgaaattgaggctaattaggccaattgcccctaaaaaagacaatataaaaattaactgaccgtggtaataaaccgacttgactgggaaaaacctggctttaccaaattaagttgccttagaaaaaatcaccctttcacaaatttggcttaataacaaaaaggccccgacgaatcgcctttccaaaaagttggcaaatcctgaatggaaaatgaaaatggtaagcgtaaaaattgtgtaaaaattacgaaaaaatttgagaaaaaaaactaattttttaacaaataggccaatatgggaaagattcctttaaaatcaaaaaaatcaaccgaaatagggttgaaggtaggcaaagttggaacaaaaagcaattataaaaaccggggtctcaaacgcaaaggccaaaaaaacctttttaagggctatggtcctttaggaaacaaatacttaaaaaaattttttgggatgaagtgccccaaaagattaaaaggaaaaccaaaagggcacccccatttaaaacttaacgggccgccggggc

SEQ ID NO: 680818 - DNA, 207 bp, Homo sapiens
  misc_feature (9)..(9): n is a, c, g, or t
agggagacntcgtctcgaaaaaaataaggtttgaaaatcactagtttaggctaagtgcagttatgtttaggtgtcaccaaggacgagtaagtatccttgtgtagctctcagtgcaatattagatatgcttttctttagtgggaaaatgaacagtttttgcatgcgactagtgtaacttgatacatttagtcatccactttggggtta

SEQ ID NO: 680819 - DNA, 675 bp, Homo sapiens
tgagcccccccccccccccccccccgcttacgaggtaccccacccgcaaacacacgcaccatactttcagaaaaagaactttaggacccctttcttcgcgcgcccttgctccgtcctcctacggcttacgacgttagtcgaggccgctagcataacgaaattaaatcggtgggacggaagtagaccacctcgttacccccttaggctcccgagccgtatgctaaactcggggtcgactattttatatccgcccagttcgttcgcgaggcctataataacccctttagtctcgcggctactaacgaccctaaacctgttaacgcaattacgtcctactactatagcgagaaattggatgacgatcccggagtatggttcaacaagtattcggtgcccgttcgctcccctggtacggccgacatctccgagagtactcgttaggatacctacgtgtattaccgcggtctgcgttgaaccttcgtagtttgggggacttatcagcctcagagtggctgctattgtcgcggagtcttaaccggtttcacagcgagctgcaccatgtgtgtctatcggttgctgccccataatgccgcgatcgggaaaatttcggtgccttttaatccaacttttccggactatacattttccctgttagtcggtccaacaattaagaat

SEQ ID NO: 680820 - DNA, 514 bp, Homo sapiens
tgaatgataacagctccatcagtgattctacggagccaggcatcatatcctagggcacaggaaaatgcttcagacaattatattgccgttctgtgtgattacattcatcatctttgagaatgcttactgggtcgtagtgagtctggtgtctgatatatagcaggcaaatgagtagcagtacagctacctcccaatcaaagcccatggttccttgagtgtaaactgcaggacatgcagtgccgtctgacacgtgagctacagctcatcccaggcagtgtcatatctgtggcagagaagcaagctgcagattgttgcttcattaggaataagttgaaacaaatgtttggagccaccttttgcagtgcacacatctatcacacatccataactattaggacatttagagcctagggatccaataagctgtgtacctgtcataaaagtcaggagttccatcagagtcactccaatactgtctatggcaatactacgatgcatattgagaaactgcttc

SEQ ID NO: 680821 - DNA, 245 bp, Homo sapiens
aggcacaagagtctgaagcagcaagaaccagctaaacttgggtgtgggaggtaatgtatgaataaggtgtcagttctaaaggaagagaaggtgaagtttgagcagcagagattacaggtaagcttacatatgagccaaattgtgattggatgcagtgcgctacacctgtagtcccagctacttgggcggcccagcgcagggaggtttgcttatcgccacgaatgtcaacaatagtaaaacactgt

SEQ ID NO: 680822 - DNA, 332 bp, Homo sapiens
cccgtgaacctttactgtactctgattttggcttctgactttccatgtgtaggataactgggagacactgaagcgggctcgttagggctcgcggagtcaccgttgaaataccagtcttggagagtcggaaatctaacgatatttcatgaaactggaaatcggacaatgtcagacgggcagtttgactggggcggtatcctcccaaaaagtaacggaggagtccaaagcttacctcatcgtggttggcaatcacgaaacgagcgtaaaggtataaggtaggttaactgcgagaccaacaagtcaagcaggtacgaaagtagggcttagtgccg

SEQ ID NO: 680823 - DNA, 676 bp, Homo sapiens
ctctccacacagagattttgaagcttgtcccacaggctgcttggcaggaaagatattcctctttaatggcatgtaagttacctgtggaggatgtccaccctctgtctcaggcctttgatcaaattaaaggcagtgaaacagcaccttcaacctggaggaatacagcctctctcaggctaccttggagcaggtgttctctagaactctgtcaagagcaggcgctgggaaatgttgatgataaaattgatagtaacagttcgatggaaacttctcccagcaggaagattcttaaacagcgaagaaggctcctaacattcaaggttgctaagtcctactgcattattacgtttccataattcgtacggagaatgttgtccttttacttcagttaacaagatagaaaatattcaatgaggtttaaacatgcaacgaagtgagttagagtttttcatttttaagaaagttttaggatgaaggagaacaaggaaatatagggaaaagtagcagacaaaattaacaaagctcagacatgttattcatccccaagatgggtctattgggtgcttaaaagagtaattttagaaactcataaacatatgaggttagtgtatatggttagttatcaagtaaaagttaacgactggagcaccatgtgacaaacaaagacaaggcaaag

SEQ ID NO: 680824 - DNA, 1164 bp, Homo sapiens
gaaataggacaataataaaactaaacaaattagaaaaaaaataacacaattagaaaaaataaaaagtattaacgtagttcttgtacgattaaatgggtaaagtgtcagctcagccagaaacagtaccaattagtaaattcgtaattcgaatacggcaatacataaaatcaatagagattctgacaaagagttatcagtatagcctgccacaacaatgtgcatctacatatatgcccagctccttaatcaagatacaacacacattcatgaaaactgacacatatatacacccagcacgaatattaccaagaatcaggctatctgagaaataacccacaatactcaacgacataaaccaattaaacataggcacatatcgctatgtagaacagcttcaacatagagacttatataccacaactagttcaaagaaacatatcctcctggccgggctgtaggtggccatcaggccatggatcatcccaaccacattatggcgagtgcacgaatggtcaggataggacatcacaaggatgtcagcgacgttccgaagaacccaagcacatggcgcaaacaatgaggtgaaaacactgatatatctacacatatcaagaaaaatttacgaactacacactactacacccagtggccacttggtggtcagcacatgaccttgtgaaatccccaacaatacgtacgaggagagcctgtgagaacaggtgagcacattgcgtgtgaaccacaaaagaaagcaaagaggttagcaactagagtcgagagcatcgaacccattggacccaatccactgtcattagctgatagtacaacaaatcaaacaacatacacatcctacaatctatataaatcacaatacaacaataataaacaccatatatcttcccaaacaccaaaatcaaaacaacacaaatcataacaatttttttcccatcactatacctcaaataaaatcttttaatacaataaatgatcatagataactaataaatcaaccaaaatccactttacgtatcatatagataaaacaagtccaaaacaataactataattcacctataataaaacattaccacaactacattcatacttaatataacttaaaaaagtgtaataaacatctactccattattaacccacgcgaaacc

SEQ ID NO: 680825 - DNA, 112 bp, Homo sapiens
  misc_feature (72)..(72): n is a, c, g, or t
ccaacctcgatgccataggaactgcaaccactaatttcctaaacttctagagccgactgatataaccggcanatatgagcaaccgcttcgtatcgtggactgaagcaaataa

SEQ ID NO: 680826 - DNA, 245 bp, Homo sapiens
gtgttgtggcgcatgcctgcagacccagccactcgggaggctgaggcaggagaaccgcccgaacccgggaggcggaggttgcaccactgcactccagcctgggcgagagcgagactccatctcaaaaaacagattctttctcactgtggactgagatttcatggagagcactgggagagcctggctccgtgaaccccagggtctgtaagatctcatgtggccctgaccggtgcgcatgacaccaa

SEQ ID NO: 680827 - DNA, 379 bp, Homo sapiens
gctcgcatgaacgccagagactggacaactagggacatcctaccccaaacccattgaaaggattcaagctaggcaatcctagacctgctcactctgcctctcaggttccttcctaagcaaaccacaataaaggctcttgccccacagttcccctccctccctctgcccccgaccaacactggtgcttccccgtgtggcccgtgttagtgtgcggtgccgcctgtttctagggaactgtgagtataagcttcttcccaccatggcagtcatttctgtgtctgttacatcatatctaaggacaacaaatccaaggtgtccttacaacaactggcgcagtgagcagggtggtttgatgccagatggagatggtatgtcctca

SEQ ID NO: 680828 - DNA, 136 bp, Homo sapiens
cgtatctaggtcttttgtgttagtgaaaatgaggtgaatggtatatatatatatcttcatcgatatctatatctatctatctatctatctatctatctatctatctatctatctatctttctttcttttttttttt

SEQ ID NO: 680829 - DNA, 138 bp, Homo sapiens
ccgatggcgaagtattccatgtgtgttaggtctagtgaaagccccatctatggctgtgcacttcaggacacttgaattactttcgtgcggttaccttgataactgctttaccccgtgacgtaggccacatggagtcca

SEQ ID NO: 680830 - DNA, 106 bp, Homo sapiens
tacaggatctatgatgaggaagtactatagagaggttcttgggtatcggcgacgccctcctatcaagcgaggccgcaggcttcggaggcgtgcgctgctgctgggt

SEQ ID NO: 680831 - DNA, 126 bp, Homo sapiens
ctataatatgacacaagacatagaacactatactattatcggcgcatgggctgaagtctagagcacagctctaagcctccttattcgagccgagctgggccagccaggcaaccttctaggtaacga

SEQ ID NO: 680832 - DNA, 953 bp, Homo sapiens
agataccaccgaagagccacacccatctagtcaagatcaatgtgctacacagagaccaggatagtgcgcatctccctggctcaccaaggaccctcctcaccggccgtcacccccacgagcttgtaggaaaggactgccgggatggcttctatagactgctgagctctgagccggtgctcgcgtgggatcctacagtgttcgcagaactctggtgaatccccgttgtgtgcagagaagccgggacctggagctaggcttatcgagtcaggcgcgatccagcaccaaatgaagcaacccccttccaagttctctatagaacaagcagtggctggggagtactgagctgaagtgctggtgcgggtctgggttctcgaggttggactagatgcagggaatccctatcagggcaggcgcgcctccggcctgccgcactgatcgcgttgcatcagtcccatctttggactgatcgttgccgcgcacaaagactgtgcgaagctcaagatctgcctgagtgacaccgagaatgtctggcagctgcctcggtgtgggatgatgatctatcgctactgtgtgacgacggtgcggaaggaggacattgaggtgtatgtcacggtgaccagtgctggtgaggcccgagtgctccttttcgctaagctgatgtgcagcgcacgagtggccttgtgttccaggaacccctttcctacgtggacgtgcaggccgtgggagggctccgtgtgcgtgttgtccagtgcaagctgggggggtcttgcgagcgcggagcttattgatgccatgggaggttccagtaccttggccgagtatcgacgactggcccgggttggggtgaacgttaagggcgtttttccccttggaggctcgcggaggaggtctttcggccggcgcccgggggtccccggggttgttggcgcccggaaaagttgtccccaggcccg

SEQ ID NO: 680833 - DNA, 230 bp, Homo sapiens
agcggggaacatggataggggccgatagcccagggctgggctgatacatcttggccttggcggttacggggcattggtatcacggatgctccagttaagtctccattcaggtgtagagagaggaatcctgggatacggtgagggcatttccaagtccttattggcatatctggatgatatatgggagtgtgaagaaatgcatgatcatcacaaagggatggttccccgcg

SEQ ID NO: 680834 - DNA, 127 bp, Homo sapiens
gcacttgccttcacttaattcctgagatcattttatcagtacatactgagagccccttccttttatttaaataaccacagggtatgtttttacaacttattatttgttatacacaaatttcaaacat

SEQ ID NO: 680835 - DNA, 383 bp, Homo sapiens
acccgacatgtcccttttcccaaaaccccccaaagtgaaaatttgcttctgttctgtgacctagaatgtgtcccgaccttaaaggtcctgaatactcctttacctgtaaaaattgtaacactgctctggcctggttttgacgtccgtgtttatgtaataacttccgtgttttatttaaaatgggtaaatttgtgaaataacaattttttggggaccgtcaaccttttatggtttaatctaaaggttttcatttacatgtcaacgggtatctgaatcccccgtgaaactgttaagttttccttaaatgactctgctgcaatactagtttttttctccgaaaatggaattcaaataaaataagttttttggtcttggcctttcca

SEQ ID NO: 680836 - DNA, 510 bp, Homo sapiens
  misc_feature (7)..(7): n is a, c, g, or t
  misc_feature (31)..(31): n is a, c, g, or t
  misc_feature (52)..(52): n is a, c, g, or t
  misc_feature (71)..(71): n is a, c, g, or t
  misc_feature (86)..(86): n is a, c, g, or t
  misc_feature (103)..(103): n is a, c, g, or t
  misc_feature (145)..(145): n is a, c, g, or t
  misc_feature (149)..(149): n is a, c, g, or t
  misc_feature (169)..(169): n is a, c, g, or t
  misc_feature (182)..(182): n is a, c, g, or t
  misc_feature (220)..(220): n is a, c, g, or t
  misc_feature (226)..(226): n is a, c, g, or t
  misc_feature (240)..(240): n is a, c, g, or t
  misc_feature (242)..(242): n is a, c, g, or t
  misc_feature (256)..(256): n is a, c, g, or t
  misc_feature (282)..(282): n is a, c, g, or t
  misc_feature (332)..(332): n is a, c, g, or t
  misc_feature (351)..(351): n is a, c, g, or t
  misc_feature (415)..(415): n is a, c, g, or t
  misc_feature (487)..(487): n is a, c, g, or t
taaaaancggcatgctcctttatttgttcanaagagcagccagcatcacccncgccactcaaacctggcanaaacgcttcggaganaatggcctcgggacccncaagctgcggggcccaggagaaaaagttctgaggcagaaacncggngtccaaggggggccgcgggncaggcactgtggngaagggaacgccggggagtccggccccaccttgcagcngggganacgggggcgcaaananagggggcaggctantgtcccgctgccccaggaacaaaccncagggccccaggagggtctgcaggcagcaaggagcctgccaagtgctggnggaagtagaggccgaaaangctggcgagcagctggcaggcagccgtccaccaaaagaggtaggccaggacgccacggaggaanaggggagttagccggccacccagggccccggcaatccgcgctgcagtttgctggacttcgtcctccccaaanccgatgggggcagcgctggctga

SEQ ID NO: 680837 - DNA, 911 bp, Homo sapiens
gacttggacggagccgagctgaggctcggcttcctgctgatggtcaggatttttggcaactccccggtgtgagagtgggtagggatgtgctcccggcggctgacggggccgagttcaccagccgccggggcagtagtcgaaggccctggcgcgtgcatgtcctgggtgcctgcggtgcgtggcagtgaactgctgcgccgtggcgtggatgggccggctgccgtgtgcgccagaagctgtacctgggctccgttccctgtttgtacgcgcttcagggtctgaccccagcacttgggctgctcatcgctgcgggcggaggaggcgccgcaagacaggcataaagaatggcgtgcactttcttgcagctagagctgattaatgggctgcttgaagttgcctccttgcttgcactcccatgacacaggagacacggggaccaccatgaacttggcactggctggtgacatccttgctgcagggcaggatgcccacgtgtcagcatcctgcgcttccaggcacatcaagcagcagggcaacgaaggcagagaaggccggttccaaaggagcacgggggctcgacgaaggaagggagcaagcccccagcaagagaaggaaatgtggagcgggaaagccaggatgatggggctagaagttcagggtaggagaatttgcggggcgggtggagagagagctttaggtcggatcaggtgcagaaaagttgtgtgctttagacgagataatacccgttgttgacaagtggaggaacagatggatacgtaccggtgctggaaagtgaccaggcttgacaaggtcttggagtggaaggcacgaaggggagattgaggcggtgtttaggtgctgattgagaagtgggtaggggttggcgtaccttagggtattttgtgcaagtg

SEQ ID NO: 680838 - DNA, 158 bp, Homo sapiens
aaccttttttggggggtttttttttccaagggtttaaaaggtgtgggggccaaaagaagggcccccccctgccctcctcccccctggggctttcccgccccccatttggttaaagggtggggaccccgtcccctaattaaagttttttgggtttctca

SEQ ID NO: 680839 - DNA, 1570 bp, Homo sapiens
  misc_feature (350)..(351): n is a, c, g, or t
  misc_feature (356)..(356): n is a, c, g, or t
  misc_feature (373)..(373): n is a, c, g, or t
  misc_feature (402)..(402): n is a, c, g, or t
  misc_feature (420)..(420): n is a, c, g, or t
  misc_feature (487)..(487): n is a, c, g, or t
  misc_feature (499)..(499): n is a, c, g, or t
  misc_feature (696)..(696): n is a, c, g, or t
  misc_feature (768)..(768): n is a, c, g, or t
ctaagactcctactctctcatcgtaccggatttgtaacttgcaatgagtaaattcctaactgttataccgaatcgcatatatacttgtagtgctatattactgatctacgcttaggcctcacaacacgtttagtaacgccacccttacagcgtgactactacaacactcctttcgactgcatcgaccgaataaataacatacattcgatcctagaaagcattgactcccttgaacacagcccagtcatcacttatactccatcatcgctccttacatcataccgtcaccgcgcaactccttatgtactactacacacagatcgacgtgcttacatacgcatattgcaatnnccctnctactcacctcaatacntcacaattgcggcccatggcatacatggntatcatgacactacgtancgcatgtaaacatctcgattttaacgggcggactctatagtccttacaaccgtctcttacattaacnttcctcctgcanttagtggccttaggacaactcagggacgtaccctgcgcgaaagcttcccttgtgaatcgggttgaacccacatgtcgaaaggatagcttaactccccgaaatatgatacgtcacctctctaatatcgtctactacacctaaattttactacatctatcataagcatcgtttcattgactatattctaatgtaagacntggttcctccatctattatagcgttcctttacaacaaacctagaattgacaaaatatcccccggaaaaccanctctacataactataaatcacctttttcatcccgtgtaacacctgagagccgcgggaggttataagcattactgagtcaacactatgccttctttggacacagtacgtaggtcggacggcgaaaaacccaccatgtttgtaccacttgtcgcccagtacaggtgcgcgtaagtaacacttaaattttaagctccctttaaagagacatttctttttcgataccataagtgggcccccggttaaatgtgtaaccccccttttaattaaagacaattaactctcccctttctaataaacgcccccgttaatataaggaaagacccaaataattttacatgtgcatctaaattagagaacaacgccacgtgaggagggcgaggggagacacaagtttctatagcgttttattgcacccccacaggatgggttggcacccgacaattattaacgccgcttgggacaccgcgtcttttgctttggaaacacaagcgggtgggggcaccacagaaaacggggagggttggtaaaatccatcacgcgtaggcgggactgtggacctcggcgatataacaaaacccccggacattcggggggaacacaagcgaacacgagttgaacacctcctgtggaagagggcagcctctcatcccacgggggcgcgagcaacatggcgtacgacaagctctcaaagagagaataacgactccggcgagtaagcacacatcccaggtaaaagtagaagagcggcgcgccaatattattcgtgcggaggagtttcggtaatgttgaatcacaacagact

SEQ ID NO: 680840 - DNA, 617 bp, Homo sapiens
ggtgaacaggagccgcgttcctatcccgcttatgggaactcttggggacaagagccgccccaggccgcctggatggcccgaggcaagggtgctgaccccaggaccccaggcacggcctccgggaacccaatacccatggccccggagtccccctaagaccctataacggttctgtctgtctgtctaatccgtctacaggtctctgctgtcccatgtgagtctcccccccgccggtccctgtgctgtgggaatgagcgccacctggcacgcccgggagtgggcccgggagaccggggaccccggccaagggattccatggccctaggtcacactgcggcccgggcaagtccacgggcaggactgaactcgccctcggaatcaaggggaagaactgggtccccacgggcatgggccaggagggaccccggcccgcgagggacccgagaggccggtccccctggcatgccaccgagcccccgaagggagggaagattcccgaatcgagagagggagggatcaaggtggaacccctagagtgagcctcctgtagaccccgaagcggttgcctctctccattgaattaattaattagttaataaaattaaccccctgtttta

SEQ ID NO: 680841 - DNA, 367 bp, Homo sapiens
cagttttaatggtgatcctacgcggccgctacagacgcttttgggtagaggggtcacagtacttaactgtgagggcgttgctatagctgaatgagcacgtggcgtgatgaccttcatgcgttaagttttcaatccataatgtgatggtgaacttatgaagcgtttaattgcgttaccctttagtgcgttgatggtggtgtctgttcaggtgtctgcgctttgcttgaatatttcagagagcttcaccgggataatcgggcctggaggtgatagtgtcgcccatggtcccttcacgataagtggtgcgaacggttgctccggcgcaagtataaatgccatggtttccgctggcggtgcagggagaagt

SEQ ID NO: 680842 - DNA, 167 bp, Homo sapiens
catcgcacaaacaccgcaatctcatccctcttggcctttgcttttattcttgcagtttgcattggaggggacaatcaaagaaggtgtgggcataaaaaaaagctagtgatcaacagtggcaatggagctgtggaggacataaagccaagtggactcaacggaaaggc

SEQ ID NO: 680843 - DNA, 164 bp, Homo sapiens
  misc_feature (116)..(116): n is a, c, g, or t
tgaatgagtgatctcagctcactgcactctagcctgagtgacacagtgagactccatctcaaaaagcgaaaacaaaacaaaacaaaacaaaaacaaccagcaacacaaagggcccntccttaggtcagtggtcatgaatttaacagggagagccaggtcagctt

SEQ ID NO: 680844 - DNA, 131 bp, Homo sapiens
tcgtggcccatggtaaggcattctaagtcacaggatgcacattgtaaagactttgctgataaaacaggtacagtactacagtgagctctggttgtcctcactgctacactctcgtggcatcgataacaccg

SEQ ID NO: 680845 - DNA, 598 bp, Homo sapiens
ctcgggacagtagcaatcttatatattcccacatgctaggaccagcacacagtgaaccagtaggcactcagtgttgaatgctcaaaccaggtaatctgcttcctgtagttaccctgctgagcactgcttccatcacaggtgcactgggcctcaacacttctgccatttccccatttgtctcctccatggacactgtcaacaatggtctgtcaacacctgctctgtgccaaagccagggagtaggctggggggatacggaagagaatatctttctccttgatgcctgctgtgccaacagccccctttaagccttgttcacagcctttgctgaaacaagcatcttgaaagcaagccatgttatacaccgcatgaccttcatgctctggcccagctgactgaactggggcaggccccagagtcatgggcagcctattgtcttgctaatggcctctgacttagcctggagtaaaacactgtccaaacaagactggtggttattcaagcataagaatttgaactaggaagccaagaatgaagcaaccggaccattaccatcaaaacatgattacaggatgaagaaggaagccaacattcagag

SEQ ID NO: 680846 - DNA, 608 bp, Homo sapiens
  misc_feature (510)..(510): n is a, c, g, or t
cacagcgctgggctaggggcgcggcttgaactcgcctaaagagctgcgcctctcacccgtgccgccccagccgctgccgcctgcaccggacccggagccgccatgcccaagtgtcccaagtgcaacaaggaggtgtacttcgccgagagggtgacctctctgggcaaggactggcatcggccctgcctgaagtgcgagaaatgtgggaagacgctgacctctgggggccacgctgagcacgaaggcaaaccctactgcaaccacccctgctacgcagccatgtttgggcctaaaggctttgggcggggcggagccgagagccacactttcaagtaaaccaggtggtggagaccccatccttggctgcttgcagggccactgtccaggcaaatgccaggccttgtccccagatgcccagggctcccttgttgcccctaatgctctcagtaaacctgaacacttggaaaaccaaaattttaaactctttataaatacccaaaattaattccnccgtgggggaaaataacaaaatccctctgagggggggccccgtcccccaattcgccctatagggagttggtttaaatattaacgggcccgggttttac

SEQ ID NO: 680847 - DNA, 495 bp, Homo sapiens
gaggggcggtgtctccaaggggcggggtcccggggtccctgaaaggcgcggaccaggccggatccacccagtctcgcgcctgcagcccgtgccgccccagccgctgccgcctgcaccggacccggagccgccatgcccaagtgtcccaagtgcaacaaggaggtgtacttcgccgagagggtgacctctctgggcaaggactggcatcggccctgcctgaagtgcgagaaatgtgggaagacgctgacctctgggggccacgctgagcacgaaggcaaaccctactgcaaccacccctgctacgcagccatgtttgggcctaaaggctttgggcggggcggagccgagagccacactttcaagtaaaccaggtggtggagaccccatccttggctgcttgcagggccactgtccaggcaaatgccaggccttgtccccagatgcccagggctcccttgttgcccctaatgctctcagtaaacctgaacacttgga

SEQ ID NO: 680848 - DNA, 488 bp, Homo sapiens
  misc_feature (80)..(80): n is a, c, g, or t
  misc_feature (167)..(167): n is a, c, g, or t
  misc_feature (324)..(324): n is a, c, g, or t
catcctgatagaagagtgtgcatctctggactagtctcaaggggtactggctgtgtgaggtgtagtctgccctagtggtngtgcctccagtatgctatcagggatcaggggaccacttgaggagcagtctctccattctcagatctcagactccgtcctgggagaancactactcgcttcaaagctgtcagacaagggcatttaagtctgtggaggtttctgctgccttttgttcggcttgtgccttgccccaaagagtaagagtctacagaggcaggcagggctccttgagctgtggtgggctcccccagttcgagcttcctnggcgctttgtttacctactcaagcctcagcaatggtgggcacccctcccccagcctcgctgctgccttgcagttcgatctcagactgctgtgctagcaatgagcgaggctcatgggcgtggaacctccaagccacgcgagggatataatctcctgggtgtgcgt

SEQ ID NO: 680849 - DNA, 638 bp, Homo sapiens
  misc_feature (540)..(540): n is a, c, g, or t
gaggggcggtgtctccaaggggcggggtcccggggtccctgaaaggcgcggaccaggccggatccacccagtctcgcgcctgcagcccgtgccgccccagccgctgccgcctgcaccggacccggagccgccatgcccaagtgtcccaagtgcaacaaggaggtgtacttcgccgagagggtgacctctctgggcaaggactggcatcggccctgcctgaagtgcgagaaatgtgggaagacgctgacctctgggggccacgctgagcacgaaggcaaaccctactgcaaccacccctgctacgcagccatgtttgggcctaaaggctttgggcggggcggagccgagagccacactttcaagtaaaccaggtggtggagaccccatccttggctgcttgcagggccactgtccaggcaaatgccaggccttgtccccagatgcccagggctcccttgttgcccctaatgctctcagtaaacctgaacacttggaaaaccaaaattttaaactctttataaatacccaaaattaattccnccgtgggggaaaataacaaaatccctctgagggggggccccgtcccccaattcgccctatagggagttggtttaaatattaacgggcccgggttttac

SEQ ID NO: 680850 - DNA, 449 bp, Homo sapiens
gcgaattcactagtgattccccaccaagcctgtttgagcagccatggggagtgtgaggggcaccatgccccactccctacttgccaagtggccatttccccccactggggtgcaaaggtggcagtaaccgccctgtttttctcgcttggcttgtacaacccgtgcctgagtcagagccctggaggccacctccccagcctgctgtttacaaacataccaagcctgcccaggactacaccggtggcccatgggtgcattatggagtgagaggacagccactccacgaagtgagtgagaacaccagactgtcccttcccatggggcatgccatcaggcccagggatcaccagaacctgacactgctgggttgcaaatagggcttcatgtgagccaaatgttggcatactcaaagtgtgaggaataggatggtagagtcatgtgacttgctc

SEQ ID NO: 680851 - DNA, 812 bp, Homo sapiens
ggacacctggactagccggttggtattaggaaacgcggcagttgagtttatattccgctgcattgtgtaggggctaatcaatgtgatcagccctaagaagggacgttcaaacctcctgaagtcatgcaatcaaatgatatatatctgggtggagaagtgtcacacagtaaaatgaaataatacatctatgggattccaagtcagatgactagagatatgtgtgattacagagataatgtacaatgaaaaggactaggagattggtcgttatttagatagttcgaggaatgctggggaacttcagaggtaactgttattgcactgtatatcgtgtgggattagtgtcttttcccgagttgtctgaattggttggtatacgactatgacgaattttcggctgtaacaagatatgttacgcgcgcctgtatggttgcggagaagagtacattgttacgcagaggttcgctcctacagttgagaactccgtgataatactacaagatagatatacaaaatccttgtataaacagctgtttattttaccaatattactatatttcctatgtgactaacagtattaaattgtatagaaatttaaggcaatagtaaggaggaattgaaataaatcaagtgtgagatcagaaacaaattgatttaatagtacttataaataatatagtttaatgttgaattgtggtatggtgtcctcattggttttcgaaaatatcttcgggtgtgcaggagtcacctagttgagaatggtggtcgacttacggtaagcgcagacacagcacaggaaatttgagtgaggg

SEQ ID NO: 680852 - DNA, 507 bp, Homo sapiens
ggggattggagatgttcccctcatggagggtgctgaggaccttagggtgggctgccaggctgggcggatgcgggctaagtgcacagggccttgggcagagctggctgcaagaggcgggtacgccagtggtgggtaggcgccgcgtcctgcagcgtctcaccggggcctgtctgtgcctctgcagccgagagggtgacctctctgggcaaggactggcatcggccctgcctgaagtgcgagaaatgtgggaagacgctgacctctgggggccacgctgagcacgaaggcaaaccctactgcaaccacccctgctacgcagccatgtttgggcctaaaggctttgggcggggcggagccgagagccacactttcaagtaaaccaggtggtggagaccccatccttggctgcttgcagggccactgtccaggcaaatgccaggccttgtccccagatgcccagggctcccttgttgcccctaatgctctcagtaaacctgaacacttgga

SEQ ID NO: 680853 - DNA, 121 bp, Homo sapiens
cttcggtactgtttattaaatcagccgaggtacttccctggggaatatcctttctttctttctttctttcgagacggagtcttgctctgtcgcccaggctagagtgcagtggtgcaatctc

SEQ ID NO: 680854 - DNA, 932 bp, Homo sapiens
  misc_feature (65)..(65): n is a, c, g, or t
  misc_feature (95)..(95): n is a, c, g, or t
  misc_feature (120)..(120): n is a, c, g, or t
  misc_feature (139)..(139): n is a, c, g, or t
  misc_feature (151)..(151): n is a, c, g, or t
  misc_feature (157)..(157): n is a, c, g, or t
  misc_feature (177)..(177): n is a, c, g, or t
  misc_feature (193)..(193): n is a, c, g, or t
  misc_feature (195)..(195): n is a, c, g, or t
  misc_feature (209)..(209): n is a, c, g, or t
  misc_feature (224)..(224): n is a, c, g, or t
  misc_feature (226)..(226): n is a, c, g, or t
  misc_feature (238)..(238): n is a, c, g, or t
  misc_feature (352)..(352): n is a, c, g, or t
  misc_feature (358)..(358): n is a, c, g, or t
  misc_feature (361)..(361): n is a, c, g, or t
  misc_feature (372)..(372): n is a, c, g, or t
  misc_feature (377)..(377): n is a, c, g, or t
  misc_feature (379)..(379): n is a, c, g, or t
  misc_feature (388)..(388): n is a, c, g, or t
  misc_feature (409)..(409): n is a, c, g, or t
  misc_feature (415)..(415): n is a, c, g, or t
  misc_feature (495)..(495): n is a, c, g, or t
  misc_feature (575)..(576): n is a, c, g, or t
  misc_feature (585)..(585): n is a, c, g, or t
  misc_feature (597)..(597): n is a, c, g, or t
  misc_feature (624)..(624): n is a, c, g, or t
  misc_feature (691)..(691): n is a, c, g, or t
  misc_feature (787)..(787): n is a, c, g, or t
  misc_feature (809)..(809): n is a, c, g, or t
  misc_feature (845)..(845): n is a, c, g, or t
  misc_feature (907)..(907): n is a, c, g, or t
tattacgtttataattatccagagacttgaacatgccatgtcctctgaagaaggaaagctcttcntgggagggctcaactttaacaccgacgagnaggcactggaagaccacttcagcantttcggacctatctctgangtggtcgttgtnaaggancgggaaactcagcggtccangggttttggtttcatnancttcaccaacccanagcatgcttcagttncnatgagaaccatnaacaggagaggtggggcctcctatctgcagagggaccttgtccccatctgcgagcttccttcattctttttgtttttccctctgtagtcatgctcggggcagacgtgagcaacnaagccncgnagtgcccactnacagnancatgactgncttttgttctagggggtgganggcaanggcagacaaagccataggccgcctgggaggcgacgactggtcctgcatgaggccgagaagccacctgatggatggttganctgcctatgggcttaggatagtagaatctgcagacactgtgggcctggcccggagaggaactcgtgagtcttctgacatnnactctgaancctcaaaccaanagaggtgtctgtctagccctgatagtngggcagcttagaggagtggggaggagaactcagcctgagttcagtcaagattctctggatggtcgtnagatccgtgtggatcatgcaggcaagtctgctcgggggaacagaggaggtggctttggggcccatgggcgtggtcgcagctactctagaggtggtngggacagggctatgggagtggnagtattatgacagtcgacctggagggtatggatatngatatagacgttccagagactataatggcagaaacaagggtggttatgaccgctactcaggngggaattacagagacaattatgaca

SEQ ID NO: 680855 - DNA, 650 bp, Homo sapiens
  misc_feature (552)..(552): n is a, c, g, or t
ggggattggagatgttcccctcatggagggtgctgaggaccttagggtgggctgccaggctgggcggatgcgggctaagtgcacagggccttgggcagagctggctgcaagaggcgggtacgccagtggtgggtaggcgccgcgtcctgcagcgtctcaccggggcctgtctgtgcctctgcagccgagagggtgacctctctgggcaaggactggcatcggccctgcctgaagtgcgagaaatgtgggaagacgctgacctctgggggccacgctgagcacgaaggcaaaccctactgcaaccacccctgctacgcagccatgtttgggcctaaaggctttgggcggggcggagccgagagccacactttcaagtaaaccaggtggtggagaccccatccttggctgcttgcagggccactgtccaggcaaatgccaggccttgtccccagatgcccagggctcccttgttgcccctaatgctctcagtaaacctgaacacttggaaaaccaaaattttaaactctttataaatacccaaaattaattccnccgtgggggaaaataacaaaatccctctgagggggggccccgtcccccaattcgccctatagggagttggtttaaatattaacgggcccgggttttac

SEQ ID NO: 680856 - DNA, 465 bp, Homo sapiens
cacagcgctgggctaggggcgcggcttgaactcgcctaaagagctgcgcctctcacccgtgccgccccagccgctgccgcctgcaccggacccggagccgccatgcccaagtgtcccaagtgcaacaaggaggtgtacttcgccgagagggtgacctctctgggcaaggactggcatcggccctgcctgaagtgcgagaaatgtgggaagacgctgacctctgggggccacgctgagcacgaaggcaaaccctactgcaaccacccctgctacgcagccatgtttgggcctaaaggctttgggcggggcggagccgagagccacactttcaagtaaaccaggtggtggagaccccatccttggctgcttgcagggccactgtccaggcaaatgccaggccttgtccccagatgcccagggctcccttgttgcccctaatgctctcagtaaacctgaacacttgga

SEQ ID NO: 680857 - DNA, 409 bp, Homo sapiens
gaccaatcctgccggtaggctgaacagaccatcctacggtcgtggttacggtgggaagtgtagaagacggcctgtctttcaggctataaggcccgtaagatatacaaaagcctaatcttatacaataagtgggatctggaagcctgcgtggatgcggccctgctggccacccagatggaccgcgtgaacgccatccccttaacctaccagcagctggacgtcctaaagcataaactggatgagctttacccacaaggttaccctgagtatgtgatccagcacctgggctacctcttcctcaagatgagccctgaggacattcgcaagtggaatgtgacgtccttggagaccctgaaggctttgcttgaagtcaacaaagggcacgaaatgagtcctcaggtggccaccc

SEQ ID NO: 680858 - DNA, 97 bp, Homo sapiens
gcccttcccccccccgccccatccccggaaaaaggggtggagccccccccctgttttttgaccaaccgggtttttaattaacccctggggcccccca

SEQ ID NO: 680859 - DNA, 504 bp, Homo sapiens
  misc_feature (406)..(406): n is a, c, g, or t
gaggggcggtgtctccaaggggcggggtcccggggtccctgaaaggcgcggaccaggccggatccacccagtctcgcgcctgcagcccgtgccgccccagccgctgccgcctgcaccggacccggagccgccatgcccaagtgtcccaagtgcaacaaggaggtgtacttcgccgagagggtgacctctctgggcaaggactggcggagccgagagccacactttcaagtaaaccaggtggtggagaccccatccttggctgcttgcagggccactgtccaggcaaatgccaggccttgtccccagatgcccagggctcccttgttgcccctaatgctctcagtaaacctgaacacttggaaaaccaaaattttaaactctttataaatacccaaaattaattccnccgtgggggaaaataacaaaatccctctgagggggggccccgtcccccaattcgccctatagggagttggtttaaatattaacgggcccgggttttac

SEQ ID NO: 680860 - DNA, 289 bp, Homo sapiens
aaaagaagtacggtaaggcaaatcctgaaattaagagttactatgtgcctgaaaatacattgttctactcatttagtgtgatggcaatgggcgccggcgcactcttgctatcgaccatcgtcgcgctttggatgaaccgtcgtaagtcacaattaatgtagacacaacgtcgattctcgtgacttatggggatcgcaactttcgcgccattctcgatcaacacagccggttggtcagtgactgaattaggtcgttatccatgggttgtttatggcttgatgctaatagc

SEQ ID NO: 680861 - DNA, 348 bp, Homo sapiens
gaggggcggtgtctccaaggggcggggtcccggggtccctgaaaggcgcggaccaggccggatccacccagtctcgcgcctgcagcccgtgccgccccagccgctgccgcctgcaccggacccggagccgccatgcccaagtgtcccaagtgcaacaaggaggtgtacttcgccgagagggtgacctctctgggcaaggactggcatcggcctggacagtggccctgcaagcagccaaggagaggggtctccaccacctggttacttgaaagtgtggctactcggctaccgccccgcccaaagcctttaggcccaaacatgcagcgtaggggatcactctcagagcaa

SEQ ID NO: 680862 - DNA, 422 bp, Homo sapiens
  misc_feature (23)..(23): n is a, c, g, or t
  misc_feature (42)..(42): n is a, c, g, or t
  misc_feature (145)..(145): n is a, c, g, or t
  misc_feature (391)..(391): n is a, c, g, or t
  misc_feature (395)..(395): n is a, c, g, or t
  misc_feature (411)..(412): n is a, c, g, or t
gccaatcccccagccccaagctnaaacactgtgggttaaaanattggcaggtagaaggaagcccagcacccaacaatgactaaactcggctgtgtctgaatccctggtggaacttattaaaaatagtttcccaggcccaggagcnagttgtcgcgccctataatcccaacactttgggaggcctaagtaggtggatcacttgaggcccaggagtttgagaccagcctggccaacatggcgaaacgctgtctctactaaaaatacaaaaattagccaggcttgatgcgcacgcctgtaatcccagttactctggaggctgagggaggagaatcgctggaacctgggaggcggaagctgcagtgagccaagattgcaccattgcactccagcngggncgacagagcgagacanngtctccagaa

SEQ ID NO: 680863 - DNA, 359 bp, Homo sapiens
atggtgcatatttatacaccaacgacatccaagctgagagccaaatcacgaatgcaatcctatttacaattgccacaaaaagaataaaatacctaggaatacagctaaccagggagatgaaagatctctacaacaaaaattacaaaacactgctgaaagaaatcagagatgacacaaatggaaaaacattccatacttatggataggaataatcaatattgttaaaatggccatactacccaaagcaatttatagattcaatgctattcctatcaaactaccaataacattcttcacagaatcagaaaaaaaaaagcattaaaatttatttgaaaccaaaaaagttccgttgaagccgt

SEQ ID NO: 680864 - DNA, 1014 bp, Homo sapiens
ctgagcattctgtgggataagagatcattaaaaaaatgctagggccgggcaccatggctcacgcctgtaatcccaggactttaggaggccaaggcaggtggatgacttgagctcaggagtttgagaccagcctgggcaacatgatgaaaactccgtctctaccaaaaatcaaaaaaattagccaggtgtgatgttgtgtgcctgtagtcccagctacttgtgaggctgaggtgggaggatggtttgggccccggaggtagaggtgggaggatggtttgggccccggaggtagaggttgcagtgagctgagattgtgccactgtattccatcctgggccaacagagccagaccctgctcaaacaaaaacaaacaacacaacagaggctgggcacaacagggggacctacacgccgggtatactcccaacgaacacctaggggaaaggctgaggcgggcaaacaacaaatggaaggtcacacgttggagaaccagccggagccacacctggtgaacccccgcgtcctattcaccacaaataaaaactaacacaactcaccacgcgacgtgcacgggcatgtgcccatatgaccccacagacaactcagagcaggcaaacgcacgacgcactactggggccaccacgggcggcgacaggaagcagatgagcaagatacaacacatccgccacgccgcgccaacagagtgacacacccggtgtcccccaacacacacaacgccacagaagaaacaaacgaaaaagaccagcacacacacgccgactagcaaaccggcgacccaacaccaaccacaacgagcgcgcgcccacccacacacacacgcagcaccagacgctcacgtcgccacacacaccacacaagacagcaacgccaacacacggaagatgccagccacgcacctccgcccagcacaccgatgacagcacaccaaccacgcgccggaacatggaccagaggacaaagcaacgacaccagcaaaccagactacgacacgag

SEQ ID NO: 680865 - DNA, 209 bp, Homo sapiens
atcccacccgatgcagagcgtttagtatctaaaccctagtaacctcgtgatctgcatctgtcctcatcaacacgtcaccacccttagctctgctgccaattagtacacatgtaggctgaattgtatttcactccagctactttagcgacctgggacagcacagaatcgacttacaagggtcaacttcccagcgagtttccttcagcggc

SEQ ID NO: 680866 - DNA, 942 bp, Homo sapiens
ccgttgtggtgtaccataaagtcacctcgcccccaactgccgaatgccccagcagggctgatttgccccatccctgtggggccctccacacctttgtgggagagaccccccaaatttatgagaaacttctgctgcttcgcccagaacgattgtgcgccccccctgaatcttttgtttcaaagacaggacaagcgtggtaattcgccttcacttaaatcgttgtgtgaaagatctctggccgtcctgttgctcccacacagaacggatgcacattctttccgttttaaaccaggcgcacacacaaagagagtggccccaaacaatactaaggatgcctagaagccaatggggtgctcgccaccaaccacttcgggggggatatacttcgttgggacatttttttgccacccgctgaatccccccacccacacagacgttcatgttctcccccccttgatatgcaaacttatgggtgaacacctgggcgaaatcttctctttctttttataaaaacaaatttctgtctgtacaatatacagtggtcaaccacaagagccgaaacctcctttactattatcaaaacatatgtctagaacagtttctcacctcccttgttagaataactcacaacagagacccatcctgtgagtaatacactcagagccacaatcatcttctccttgacccacgacaggagcctctgtgaaaatgctccccaaaagatatctcccccttctcaccctcccctccccctacaatgctgcatattccacacattccttttatccacatcgtttgaccacacagaaagttgtaaatagttccaactcctgtccccccagataaataattatgacatgatgtatttattaggcagtccagataaaccacacatcaacaccacgcagcggtaactaccttaaaaaaaaaatccacaaaaca

SEQ ID NO: 680867 - DNA, 134 bp, Homo sapiens
tcgcctgttatgtaaaggatgcgtagggactgggacgggcgactgacggacctacggactgactggcgggcaggactagttcagacggtttccatttcctgagcgtctgagatgttagtattagttagttttgt

SEQ ID NO: 680868 - DNA, 138 bp, Homo sapiens
taccgtgggaggacaccacgagaaggctccgtctgtgaaccagaaagcagaccctcaccagacaccaaatttgttggtaccttggtcatagacttcccagcctccagaactgttaaaaataaatttatactgttttta

SEQ ID NO: 680869 - DNA, 398 bp, Homo sapiens
  misc_feature (108)..(108): n is a, c, g, or t
gagcagaggcggaggttgctcctgtacgcgtacgggccgctcggccggagccgcagcccgtatgcgccgggcggagcgcagaaagccgtaaataatgctgttgctgcngctgcccacccttcgccgcccgggcccccgctgccgcccgggccccggctgccgcctgcgcccccgtcgaccccgcccgcgagtgcgccccagccaggacgccgcccccggccgggtctccacttcttggccgcaccttccatgacagcgcccgcgagaagatggctgcgaagggcgcgcacggctcctacctgaaggtggagagcgagctggagcgctgccgcgccgagggccactgggaccgcttgccggagctggtccggcagctgcagacgcttgacatgcccggg

SEQ ID NO: 680870 - DNA, 171 bp, Homo sapiens
atcgacctacacttcaggaaaggcatcaagcctgaaacaataaattcctgctagagaaaactgtcttcagatgtgcatgacttcatgggatttataacatgagtccatgaaggaaatcgtgaaagagattgtagagacagcaaaaacgggtagaggagaggggctctcaaa

SEQ ID NO: 680871 - DNA, 202 bp, Homo sapiens
gctcgtttcagtttttgtctttttggccggcagagacttaattgtcatgagagactgagttcagttggatttaaggagcagtgaggagagttgctagaagtcatcatttctggccaggcacggttggctcatgcctgtaatcccagcactttggaggccaagcaatgtggatcacttaaggccagaggtttagaccagcctg

SEQ ID NO: 680872 - DNA, 759 bp, Homo sapiens
agattccagtcctgcaatatgctacctactaactgtccgcatgccacctgaagcagcgctttcccgttctacaggctgttcaatgacattcgacaaatttagggactaaatagctacctgggtttccagggcacacctagacaaatcaagggagaagagtgtcagaatgcagaatcatggagataatgggcgaagggtgtgcgtctgggtgatgggactcattgtagaaaggaagccttgctcattcttgaggagcacttaaggtacttgtcgaacactagccaacgggctgctgcgtgcggactggacatctaattgcagccacgacttgggagaatactttgctctcatagtattggagcacatgttacgtgtcttcattgtctggagcattgtcggagtctgcatgactttcgtgttttctgtttgtaaattatccttgctaagcatatattctctaggcttttttcctgtttggggttctacagtcgtaaaagagataataagaatagttggacagtttaagagcttttagtcgtcctttgacaaaagtataatgggagggcattcctatcccttcctgagagggggacactccatgagtgtctgtgagaggcagctatctgcactctatactgcaaacagaaatcacggtgattttaagacgtgaatgttttatttatcaaaatgtagcttttggggagggaggggaaatgtaatactggaataatttgtaaatgattgtaactggcatattca

SEQ ID NO: 680873 - DNA, 160 bp, Homo sapiens
  misc_feature (4)..(4): n is a, c, g, or t
tttntctgtagtagcacattgcggagacacagttggtggccctatagaagtggtccggctgtatgatgggacagtgggtacagtgcctcatccccttggttggccttgcaaagtcccagatggacaacctcggcagacggtgccattctcaacggcctcg

SEQ ID NO: 680874 - DNA, 452 bp, Homo sapiens
  misc_feature (48)..(48): n is a, c, g, or t
  misc_feature (115)..(115): n is a, c, g, or t
ttttgccaggagcaggttaactgtccccacgtaaggtgggacacccgnttttgttttccagaaaaaaagggagggggagagggctgcctttggacttgttccgggacacctaggnatagggtggggaaaaacgggccctggtggtggcttggaaggcaaagcgttgtcctcaaccccgcgtggaatttgtttttggcacaacctggttgtggcctaacctgccgaaagtccatcagcctccatcctaccccctgtgcctttttacgccaaactttccacggctccttgagattccaacactgccagcattttccttcctttttttcctgtttccctcctttgcccgggagctcaggaaccaaggcagggaaggtttcctttagctccttaaggtttttttttaaggtttttttagtttttttttttccccctgaataaaaaattaatgggca

SEQ ID NO: 680875 - DNA, 1449 bp, Homo sapiens
  misc_feature (690)..(690): n is a, c, g, or t
  misc_feature (815)..(815): n is a, c, g, or t
tggtggagtgaaaaatagtgttttcgactccaagctagctcaagggcttacacgtccatttcaacttggggaccaattcacctttagaaagtggtgaagggaaaaggtgacagaccaattattccaaattttgtgggtaggaacgtcaatttggcattattattaccaccaagaactcatttactcacattatttacacaaacctaacattacccgcgtggttgtggtgaggattaatctcgtgacaagtggcgtcattctcatatttgtgggaagtatatccagagatataaaataagccccgtggagaacgagaaagacaccacctggtggccctctcaacacgagcgagcctgtgccccatgtgacactcgtggtcccctcagttgtggcgggtgctttataatatatagaaaccaacagaggataataacagacaaaggcgtgtatggggagacacaatctcgcgggtaatattctcgccgagcgtgagcactcgtgcacatagaatgtggagagagaaacaagagtttgtgtgctgagcggcccaaaatatcttctctctttagcgagaaagagtctccataaaggcgtgggtctcacgagtgtttctatatataccccctctctataacccaacacgaggtgtggtgagaagacgaggaaaaggtccctcccccgagagggggnccccgttatgacagtggagagtacacaaagaagggtgggaacactggagccccaaaagcagacgtggacagtatcttccgaggagcccccacaaccagcggtgagaagtgacagcagggggccgncccaacgggggcccccccaaaataggtggggtgtacgagacaaaaagtggagcaactaactccccgtagggacagcgaggggggccccccccgcagcagatgataaacaacgcccggtgggaaggagcaataacctgctaggcatggctaatacagacagacaacaccgagggggggaacacaaaaacagcgcccccgtggtgtacaaccaccgaaacaaacagaaggacaacgcaccctcaggtggttgtatcctcccggcgaggaaacaaccgcacgacgatcaaccatctttccggtagacagagacaggtgggcgcccaacatgatgtgagcacaaactcatacacaaggggggtctcatgaaggaggggccccaactgatgttacagccagagcaaaacggcatgaaaattcacgcacacgacgcgcggggctccgccacgcaacagagcggggcggctgggaacagctggtggaccgagacaacaacggggggcccatcggccgccacaaacatcaaccgagggcacccacaaaagaggcggcgcatctcggcgcatataagaaacaacgcataacaccacaaagaaagcaccgacgaagcgtcgacacagtgggggtagtacccccc

SEQ ID NO: 680876 - DNA, 125 bp, Homo sapiens
gaactggaactacctgtttaccacacatgacacgactactacactactgggtcaactacacgcactactgacaacacgactgcgccactaccgcacttggtcacttacgggacacgtgccaatct

SEQ ID NO: 680877 - DNA, 426 bp, Homo sapiens
tagataaggtgacagataaaccagcttggaaacacggagttttctgcaacagattgcatccaagatctcctgaaatatctccctgcttggtataagggtactctcctctcatttggtgtcacaggacctatgaattttttttttttttgagatggagtttcactcatgttgcccaggctggagtgcaatggaacgatcgatctcggctcactgcaacatccgcctcccagcttcaagcgattctcctgcctcagcctccagagtagttgggattacaggcatgcaccaccacgcccggctaattttgtatttttagtagagaccgagtttctccatgttggtcaggctggtctcgctcccgacctcaggtgatccgcccacctcagccttgcctgctgggattacaggcatgagccccgtgcctgc

SEQ ID NO: 680878 - DNA, 154 bp, Homo sapiens
atcacaaaagcagtgtgtgtgtgtgtggaataaccaccatgctgcttgtcaactgccccataatctagaatggactttaaacagcaacaaaagctgaaatggtggaccagaggctgctcctttgttcatccatgctttctcacttccagtcgca

SEQ ID NO: 680879 - DNA, 1397 bp, Homo sapiens
  misc_feature (459)..(459): n is a, c, g, or t
agcggggcgggcaagcccaggcggcagcggcaagcggcaagccacagcgaggaagcccaggtcagcggcacgtgccacgcgaaacctgcaaacttgtgccatcggctctgcccgtccccgtgggagcccgagcagcccctgaacgtcctcaccccttcccgacacgtctctatgctatgggtgtgcctttgcttgctgtatctatagtgtctgcggagcgagttcctcttactgtcctctccttgtgttggtcatccactactctgcattctcctggtgagttggccctctaagttacttagctgtgctatgtgggcgcgatagtagtgcttctactgctatgggcaaccagattgtgtcgattctacatttgaatgcaaaacagcgtgtgcttcctatacaaaggaggcgatggtcgaccaagtttgcctttttgcatttgaggactgagagtgagtnatcggaatcttgatttgcaaggattatgggttcctattacatgagttgcgcatactaggacagtacacttttttcctcctttgcggttgataatttgggggattccacttttgttgatctttgtgcgcatgtaaaggggcgttttataaggcaaaccaactatattgcttggcaaagttggttagatatggagagcttttgccaccggtggtgaacgcttattaattagattcgacaactcggccattatggttcgttgtcgccggcaagttagtcaagtttctacgttccggcaactcgttttccgttgtctccccccgttgctatctccttaagttgttggccctttgggtgggaagggttggcgcttcggtgggggcctcgggtgctctgctcgattttttggcgaacgttgttccattccaagttctggagcttgccccctcgcggggggctccttaatttggcttttccatttagcaaagaccctagtatagtttggggttccacgatcgtctgtggtgtggtaacaccgtttccgacttccaagagggattttcacccccggacaaagggaacaccccaacacccaggtggtgcgaaccccaccaggaggggtatagcttgccggcagggcaatacactccataggcttggtttgcgaacataatatgcgggtacccacactttccccgagtgctcacttccaatttctcccgtgtctggggaacattctgcacgtggtgttcccccccgtgggagacatacccattaatttgcgtgtgcccatacttgggccccactaggggaataaaatcctcgcttcagctggctaaaacgaccaacatagcggggaaggtgtttggcataacgccagttgtttcccctggattaacacctcgcggtcaccaattggtctggggcggcctcggttgtca

SEQ ID NO: 680880 - DNA, 127 bp, Homo sapiens
gctttttttgttgtgggacaaaccacaacaaggcgaggaatccccgcctgcgggcgttatacaacaaacaggggagacaacaattctttctgtctactctctctttctcatcaatagaacaagaaat

SEQ ID NO: 680881 - DNA, 138 bp, Homo sapiens
attttttaataccatggatgttggacctcaccctctggaaatggtgggattgggaatcttattaatttttttgagatgagtctagctctgtccccaggcggaggttgcagtgagccaagtccagccttggagacagag

SEQ ID NO: 680882 - DNA, 139 bp, Homo sapiens
ctcaacgctttatacttcgagaaggagaggaagaataagaaggaacagaagaaagaaaaaagtacaagaagaagaaagaaggaagaaggcacagacagaggaagaactaagaagcagcacgcggcggaacgacgacaga

SEQ ID NO: 680883 - DNA, 163 bp, Homo sapiens
atgtactaatacaggaggcaccactatgtaccctggtatagctgatcgtatgacagaaggaaatcactgctactaggactcctaagcaccatgaaagatataaaattatatgctcacccctgaagcgataaatactactgtctaggataagggggactaccat

SEQ ID NO: 680884 - DNA, 442 bp, Homo sapiens
  misc_feature (22)..(22): n is a, c, g, or t
  misc_feature (90)..(90): n is a, c, g, or t
  misc_feature (128)..(128): n is a, c, g, or t
  misc_feature (180)..(180): n is a, c, g, or t
  misc_feature (208)..(208): n is a, c, g, or t
  misc_feature (265)..(265): n is a, c, g, or t
  misc_feature (304)..(304): n is a, c, g, or t
  misc_feature (354)..(354): n is a, c, g, or t
  misc_feature (365)..(365): n is a, c, g, or t
agccccaaggatgaaacccccnctgaaacattatgggatccagaacggggcccccccagaatgtttccccagaattcatattggtttccncaaacatgtaagattgaaaggcttgtatccaaagttantttgtcagccttgaagattgaaaaaagcacgtctaaagagccagttgatttnaacaatggattgaaaaagatttggtacncccagagggcagcttcaaaatgaagaaattgggcacatgatggctccgctacttacntgagattcattattggatcagcctttgatcagcatctgngcatagcgtttttgcagaaggaacagtagtctcaaatctttcctcataangataacaaaangctcttgcatgattttttaacaatatatttaaacaggaagttgtcactgatatactttataaaaggatttttatcgg

SEQ ID NO: 680885 - DNA, 569 bp, Homo sapiens
gaggatcccgatttgcgcgtctcttcttgagcttagcagtggtgaactgtgcggcactgtgtcccagtgacaccacgctcagatcaggagaagatgaacaggtcgatcactctacgatgcgatcagctttcagagggtatttcttgaggccctctctaggcagaaatggcttgaagaagcagtccagcagcttgaggaggctcatggtcaggttgcagttggttgaggcgatcacctccttcactgaggaccgaacgaaggagatggattcctccaggaagctgacaaagagggccttgaaatgctcctcatagggcttcagcaagggaggcagcttcctcagccagcactcgatgaagggcatgagccccaggatgctgggctccaggtacaccatgccacagcgggagactgtagctggtgaagccaccgccaggtcttgcacctcgaacatcatggtcattgcctctgtgagcttgatgatctccccagagctgaggcacagcttcttgttgtcatccagcaccgtgttcatgttctcaatccagatggcatccacctggccatcg

SEQ ID NO: 680886 - DNA, 236 bp, Homo sapiens
gacagacaaagaaagagatgcccatgaacacacaaaatgcctacagaactccaaatagactagaccagaaaagaaattcctcctgacacaataatcagaacaacaagtgcactaaataaagatagaatattaaaagcactaaggggaaaaggtcaagtaacaaggcaggcctattagaattacaccagacttctcaccagggactatgaaagccagaagatcctggacgtcgacgc

SEQ ID NO: 680887 - DNA, 923 bp, Homo sapiens
ggacaactggagtcggctttaactatttctaaagttctcctctccatctgctcacttcttacagattgcaaccctgctgaccctctggtgggcagcatcgccacacagtacatgaccaacagagcagagcatgaccggatggccagacagtggaccaagcggtacgccacataggggcctgctgcctgccgccccgcgggacctgtgcaagcacattcaccaagtgcatcggtagccctgcccacccctccagacctcggttcttattttcctatttttattaaatttggaaccattttgtgatggtatgttgtccatcttcccatcccagttcttcctgccccccttcctctctcccacgctctcttttatctctcattttattcccttgttgatttctgttaacttgaaagatttgggattttttcccacctcatcatagatgggaacttttgttttcagtgcaaacaatgttggagctgtaatagtaagagctttcttacaaagctttgtattactgtgtggttttgttttttttgttgttgtttatttgattttgatttttttttcttttatgtgatctttgggaaaacacattcagaattatatctcgtttctacttaaatgtagtgcttagggttaattttttgtactgaagtctttattggtgggtgcatgctactgggaacaagtttttgtacaaaagcttcaatcagaatcactgtgcattactgagactctgtttatcactagccttctgtccctcccgcagaagactgttggattgaacaaaataatatgtattttgatttacttaaagtgcttgtaaatttcttagggacctgccacttttgactgtggatcagttgatgtacacttgtattattaaagcactcaataaatcactgtggctgataactgca

SEQ ID NO: 680888 - DNA, 249 bp, Homo sapiens
  misc_feature (197)..(198): n is a, c, g, or t
  misc_feature (226)..(227): n is a, c, g, or t
ttagggccgaggggtttaatgtggttggttggagaacggagggcctaaaggtttgggaccttcaaaaggggggttttagggggaaaaggggcccccccccttggggaacccccgggggggaaatggggggcccccttttttcccgggaagggaaaaaacttttttaaccgcgaagattttgggggggggcccccccnnggccccccccccccaacaaccccccaanngggtgccggcgccccccggggg

SEQ ID NO: 680889 - DNA, 865 bp, Homo sapiens
ggacaactggagtcggctttaactatttctaaagttctcctctccatctgctcacttcttacagattgcaaccctgctgaccctctggtgggcagcatcgccacacagtacatgaccaacagagcagagcatgaccggatggccagacagtggaccaagcggtacgccacataggggcctgctgcctgccgccccgcgggacctgtgcaagcacattcaccaagtgcatcggtagccctgcccacccctccagacctcggttcttattttcctatttttattaaatttggaaccattttgtgatggtatgttgtccatcttcccatcccagttcttcctgccccccttcctctctcccacgctctcttttatctctcattttattcccttgttgatttctgttaacttgaaagatttgggattttttcccacctcatcatagatgggaacttttgttttcagtgcaaacaatgttggagcgttgttgtttatttgattttgatttttttttcttttatgtgatctttgggaaaacacattcagaattatatctcgtttctacttaaatgtagtgcttagggttaattttttgtactgaagtctttattggtgggtgcatgctactgggaacaagtttttgtacaaaagcttcaatcagaatcactgtgcattactgagactctgtttatcactagccttctgtccctcccgcagaagactgttggattgaacaaaataatatgtattttgatttacttaaagtgcttgtaaatttcttagggacctgccacttttgactgtggatcagttgatgtacacttgtattattaaagcactcaataaatcactgtggctgataactgca

SEQ ID NO: 680890 - DNA, 160 bp, Homo sapiens
agtggggtagcgactggacggaggactggtgctgtgggtgacaacgagtatgatggaatgatggttgtcttggggtatactacagcataaactattgaggagtatcctgaggcatgggggtcaggatactcctcaatagtttatgctgtaatagtttatg

SEQ ID NO: 680891 - DNA, 1142 bp, Homo sapiens
ggacaactggagtcggctttaactatttctaaagttctcctctccatctgctcacttcttacagattgcaaccctgctgaccctctggtgggcagcatcgccacacagtacatgaccaacagagcagagcatgaccggatggccagacagtggaccaagcggtacgccacataggggcctgctgcctgccgccccgcgggacctgtgcaagcacattcaccaagtgcatcggtagccctgcccacccctccagacctcggttcttattttcctatttttattaaatttggaaccattttgtgatggtatgttgtccatcttcccatcccagttcttcctgccccccttcctctctcccacgctctcttttatctctcattttattcccttgttgatttctgttaacttgaaagatttgggattttttcccacctcatcatagatgggaacttttgttttcagtgcaaacaatgttggagctgtaatagtaagagctttcttacaaagctttgtattactgtgtggttttgttttttttgttgttgtttatttgattttgatttttttttcttttatgtgatctttgggaaaacacattcagaattatatctcgtttctacttaaatgtagtgcttagggttaattttttgtactgaagtctttattggtgggtgcatgctactgggaacaagtttttgtacaaaagcttcaatcagaatcactgtgcattactgagactctgtttatcactagccttctgtccctcccgcagaagactgttggattgaacaaaataatatgtattttgatttacttaaagtgcttgtaaatttcttagggacctgccacttttgactgtggatcagttgatgtacacttgtattattaaagcactcaataaatcactgtggctgataactgcacttctggtaacccgacatttgctttgtgtcctggtgaccgctgtagccctacgtgcagtgaggcttgtctaattcaattacaggttcaagtgtatttttcatctcaaacctctaatatttctttggagttgagttgcttagcatgtggaatttctccagctgtcagtagcctgatgattttatggttgttatagtaaattgctatcattttaaaaaaaa

SEQ ID NO: 680892 - DNA, 1001 bp, Homo sapiens
aaaatgctaaaaattatgactcactaaagactcagatgattttcacgtgagtcactaattctttttatttttaagacagggtctggccttagtctgcccacgcgcctgctaggtgcaggtggcgccactcagtggcctcacgtgccacacttgaactcgcggggcctcaagggcactccctccgtactcggcagaccttccccaaagtgtggcctgtgggcaacgtgccaccgcgtgccttgtgccatacacagtggccgtgggcctacttcttatactagactctctgttctcgtgctacgcgtgaagtggagaatcttcgagccattcttatgcataaagcgcgtggtctccctcgagccagacataccgtgggagaccactcgagagggcgagcatcacatacgcgccatcccctctaggccactctcccgagagggtgtgcccgtgcagacactgtggccacgagccccagtggacgagcccacacagtgggcgacaccgcggggccccaacagacctcttttctccgacgctccgttcatactaagaacaagttccccgctactacgaaatccgttgggtacagtgtgctatataaaagggggtaagtaaccgcacggcgatcctcagccacgcttgatatcttagccgcggatgtcatatagcaaaggttgcgataacatccgctctactcataaaagccgcaccttaagacggcgggaaccacacttcgtgctaggtgcccgattaaaccatgattagaagacgccgacgatagtgaacattatcctttccacgttggtgaacgctgttatgcaacaagcaccttaagacggagaaaaaacaattcttgagcaccacgtagataacccacttcaagcaataagaggttcgattgtcacaacataaacatggtgagtccgagcttcctttataaggtgggataaacgcctccaccgaggcggggagcccctatcctcttagtgaaagacgggtgt

SEQ ID NO: 680893 - DNA, 353 bp, Homo sapiens
tgtgaacttgatgtgaaaacatcttacaaacatatatatcggggatgagcagatgtggaggttaaggctaaatgaaactaatgaacaaacttaaggtgggatgatgctactcgtgaaacgaggggctgtacaaaagcttcaatcagaatcactgtgcattactgagactctgtttatcactagccttctgtccctcccgcagaagactgttggattgaacaaaataatatgtattttgatttacttaaagtgcttgtaaatttcttagggacctgccacttttgactgtggatcagttgatgtacacttgtattattaaagcactcaataaatcactgtggctgataactgca

SEQ ID NO: 680894 - DNA, 1217 bp, Homo sapiens
  misc_feature (680)..(680): n is a, c, g, or t
tccctccgggaattttttcctttttatattattttggggtttttaaaagggtggttgtattatttcagggatatatagggcatataaagaacatttattaaaaagaataagggggtatcaggggaggggagggaaattccggaaaattccaaaaaattcttctcacatataagaaatttaaaaaatctcacaaacctgtgggggcgcaagggtgagcgagaggcgcgaacacccattctctttctctataacagagaggtgcggtgtgagcaccatatatcgccacacagtgtgtcgcgctctcaaagagaggcgagagagaatatatacacaaagactctatacacaacaaacacacacacacaacaaaagaacacacagagacacactctcagaaggtgtgcgctatatgagtgaagacgagctgtgaggggtctctgtgggggggcccgtgagaaagagactttatagagagtgtgctcccttataaagaggcgggggggcggggcgcgcatatatagagaacatatcttaattcgcggcgagagacatatagcgcgccagagggagagagaaacaaatgtgttcacgagtgttggggggtttttaagagaggggcctataagagtgagagactctgctgtgggggggccacacaagaaagcctcctctatgtgggnggggggggacacaagcgcgcgcgtgcgcgcggtgggggaagtataaacacccgacgagagtttttttctcgcacaagtgtcaacacggttctatataaggcgcgcttagagggggctcacacgtgtggtgcattgtcggggagcagcacacagaatttatgcacacaaatatgtcggggggatgtgaatacgggcgggagcactatgtggcgtgtggtgttgggatcactacacccattagtgggggtccaccaaaaaaaatttcctcacacccacaaaggttttgtgacacacgttttataaaaaacaacacaaattccccccaaaaaggtgggagaaacatcttcaaataagtctctctaaaaaccggcgtttgtatagtgggactagtggtcactgacgcaacggggagtttctccaaaaaaaacattccttgcgtaaaaagaaggctcacccgcggcgtctcccccttgtgtgaaaagccatttacaaaacaggggagggggcacccacacataagaaaacggcgtggtcttg

SEQ ID NO: 680895 - DNA, 257 bp, Homo sapiens
cccaggcaaccttagcccctcagaacagggagtcccaggacccagggagagtgtggggacaggacagcctgtctcttgtagcttcctggggtgggaggcacaggggcaaagcaattacccagggaaaattggaagttgttcttgttcttttttcaaggccaacattcttggaaaagccgccaaaaccttgggcctccagcctgggactgctgtgatggggtatcacggtgatggtcccattaaacttccactctgca

SEQ ID NO: 680896 - DNA, 899 bp, Homo sapiens
aaaactcaagctacgataaggctgcgtgatgaaaacggacggaggcaggaagaagcatcagctgcctcactgaaacatggatgtgtttgcatgcctgctctagtgggacagcccagagcctggctgcccatcatgtggccccagccaatacacggtgacgaaggaggactgctggactggaggcccctggagccagatggcaagagggtgacagccttccatttcactgtgtgtactctgtccagtaacctttagacaaaaatggatgcccagaggactcccaaccctggcttggaggtcaatgaatacagacagcaatgagttagagggacccttaggtgcacttgaggcatgtagatccattgaaagcctgactctggccctggcccttacttgctatcgtctagactactctaggagctcgtccagatatagcacactgttccccagccctccactcagcctgtcctgcagacaaacactccacccatccaccttccattttcccccagcgtactgcagaacctccaggcctgcttgctatagagcctacctgtatgtcaatacagacccagcagctgcacgccccccacacaaccacgaacaacaaccaaaccaccagccagcagacaacacaccacacacgcaggaccccccacccaacaaacgaaaaggacggcgagcaaaccaccacaaaccacctaagtacgctaagccaacacgaaacacacaaacgacgaagacacccccccagacaagcacagctgccagaggcgcaacaggcgaacccccaccgcacagaagaacaaccgcaagaacagccacaaaacaggccacgaacgaccacaacgacaccccaacacgccaccatgcagtaccggaccaaaagggaccggacg

SEQ ID NO: 680897 - DNA, 323 bp, Homo sapiens
cagttatgggctaccgagtggacggtcagagatggggtgaagggtgttcccggttcttcaagttctcagcttctggccgggaagttaagcaacaagatggggctaagaacggaagccggaaggggggcgcgcaggaagcagggcgccgcagcctgtcgtacggtccttctgtgggtctgtcggtgccgagggcaggatggagaagctgcggctcctgggcctccgttaccaggagtacgtgactcgtcacccggccgccacggcccagcttgagacagcagtgcggggcttcagttacctgctggcaggtcgattcggcgatt

SEQ ID NO: 680898 - DNA, 315 bp, Homo sapiens
gaaggttctttatcatctcccccacccttaagaagtttctttgtaattctcctcacctttgacaatgtactttatgagatccacctcctgcccccaaaacactgttcttaactccaccgcctatccccaaatctataagaaccagtgataatcacaccaccctttgttgactcctttttcggactcagcccgcctgcacccaggtgaaataaacagccatgttgctcacacaaagcatgtttggtggtctcttcacacagacacgtgagacaggagttcggcactgtttggactctgggcactgtttggactctg

SEQ ID NO: 680899 - DNA, 322 bp, Homo sapiens
atgctgaggtggagaaaccctattttaaactgaagtgcacaatctagttgaaataaggtgcttttggccaggcgtggtggctcatgcctgtaatcccagcactttggggggccgaggcaaggtgagcggatcacttgagcccaggaattgagaccagcccggccaacatggcgaaaccctgtctctactaaaaatacaaaaattagctgggtgtggtggcgcgcacatgtaatcgcagctacttgggaggctgaggacggagattcacttgaacctgagaggcagagattgcagtgagccgagatcacatcactgacaacgg

SEQ ID NO: 680900 - DNA, 675 bp, Homo sapiens
  misc_feature (165)..(165): n is a, c, g, or t
  misc_feature (167)..(167): n is a, c, g, or t
  misc_feature (223)..(223): n is a, c, g, or t
  misc_feature (248)..(248): n is a, c, g, or t
  misc_feature (255)..(255): n is a, c, g, or t
  misc_feature (266)..(266): n is a, c, g, or t
  misc_feature (273)..(274): n is a, c, g, or t
  misc_feature (320)..(320): n is a, c, g, or t
  misc_feature (359)..(359): n is a, c, g, or t
  misc_feature (365)..(366): n is a, c, g, or t
  misc_feature (393)..(394): n is a, c, g, or t
  misc_feature (414)..(415): n is a, c, g, or t
  misc_feature (421)..(422): n is a, c, g, or t
  misc_feature (437)..(438): n is a, c, g, or t
  misc_feature (446)..(446): n is a, c, g, or t
  misc_feature (448)..(448): n is a, c, g, or t
  misc_feature (498)..(499): n is a, c, g, or t
  misc_feature (514)..(514): n is a, c, g, or t
  misc_feature (523)..(525): n is a, c, g, or t
  misc_feature (531)..(531): n is a, c, g, or t
  misc_feature (537)..(538): n is a, c, g, or t
  misc_feature (557)..(558): n is a, c, g, or t
  misc_feature (563)..(563): n is a, c, g, or t
  misc_feature (566)..(566): n is a, c, g, or t
tcgctccagctctctgctctcccagcgcagcgccgccgccggccctccagcttcccggacatggccaacctggagcgcacttcatcgccatcaagccggacgggtgcagcgcggctgtgggcgagatcatcaagcgcttcgagcagaagggattccgcctcgtgncnatgaagttcctccgggctctgaagaacacctgaagcagcactacattgacctgaangaccgaccattcttccctgggctgntgaagtnacatgaactcngggccgnnttgtggccatggtctgggaggggctgaacgtggtgaagacaggccngagtgatgcttggggagaccaatccagcagattcaaagncaggcnnccattcgtggggacttctgcattcagnnttggcaggaacaatcattcnntggcanntgattcagtaaaagnntgctgaananagaaatcagcctatggttaacgcctgaagaactggttgactacaagtctnngtgctcatgacgtgnggtctatgnnntaaganggtggnncacaacagcagtctccttnnagcanggngtggtgtgtcccgtggacacgagctcttcaattccatttgacttaagaggcaacaggattgatcattcgttttatagagcatatttgcaaataaagctttgggaagccg

SEQ ID NO: 680901 - DNA, 662 bp, Homo sapiens
agcggagagggagtgagtggcagagtgagttatacccctatgagactgtagagaggcccggggtcctacgctcaagaggagcggggtcagcgaagctagactagcagcggctcccccatccaggtccccgggcccggcggcgcggaggcggcattggtggtgaagaggcggaggaagcgggggtccaggtccccgtcatggaagggcgtggacgtagaccgtggactccggaggctgatgcgagaagtccgagctgcgcatgggcctagcacctgacagagggacgtgttcgtctccgatgttgccagcaggactgctgcggtcttcacagactcaaatcactgtcgcgagtaggcggccctatctgtccttggagcatttgacctaactggaaaccgtactaagcggggctagatgatgaggtgccactaatgagtcgaccttatgaagatggctcgaaatcgatcgaggtgtggcccgtcctagtgttcctcttgctagagagagatgtcatgcataaggagaatggggaggtcgattatgcatccgtgcatggctcgagttatgataaaatacattggcagggattcctagatagttcgtgggtggagaggacgtgtgacttccagggggtatgtacttaggatatgttcggggggata

SEQ ID NO: 680902 - DNA, 954 bp, Homo sapiens
  misc_feature (248)..(248): n is a, c, g, or t
  misc_feature (316)..(316): n is a, c, g, or t
  misc_feature (519)..(519): n is a, c, g, or t
  misc_feature (706)..(706): n is a, c, g, or t
  misc_feature (730)..(730): n is a, c, g, or t
  misc_feature (859)..(859): n is a, c, g, or t
  misc_feature (940)..(940): n is a, c, g, or t
ctagtgatactatggtgccctgttgtgcccctgggcccctgagcacatcgattaagccctcccgataacctcggctaaaatttctttcatatttttagaatttgtcctcggaaacctttttcgcttggggtggtctctctcactctgccccctcctcacgcagctcttggcagtcaacagacgctggcggatggggctgcccatgccatcccagctccaagcttcccactccgggacttgtgtttggntggggagacctgacctgggcatgttcctgtttcttcatcgttgagcttttctggcccggtctgaagcncaagtgaggagggggaggctgggtttttatcacttttaatgaatttggtgtgatttgttgtagatttttaaatttcccttttggagagaaaaaccaaaaaaactcgccccactggtaaaacatgggtcttggtcccagcccctgctcagcccctcccagtttttagcttgaatgagggtggggtctcctgggaccctgccccncatgccagaagcatcttgtgttgtatatgtgtgcgcgcgtgtgccctgagacccaggacagaagccacggtcctaagagccggttttatcctcgtcattctgcgtgtcctcccccacgccacctgtgtcggggctcagggtctcctgctttatatgagcccccttcctttcctcccctcctttatgntgggggtccaggacttccagccanaagcctttgcccttgcactaccttgtttgtcaccccatcccgtgtccccttgtcccccagcctgactcctgcctgatagctcctgtgtccccatgctggtcctcctggcccaggctgcaggagccaggntggggggcctccgcacccccttgctgggtgtgggtaattgtgttttgggggaaagtggggaatttaataaatttttggtgntttggaaaaaaaaa

SEQ ID NO: 680903 - DNA, 81 bp, Homo sapiens
ctagaagattcagcaaagtacttttgtgctcttgaggaaactctaggggatcggcttccccggggtatggttaaactcact

SEQ ID NO: 680904 - DNA, 166 bp, Homo sapiens
ctatgttcatcgttagctggacaaattgttacttttcttccctgaaaacaacagagagctgtaaatggaagaatcaaaaagaaaatgaaaatagttaagacccacagaactctctaccttgagccacagatgcatcacccccacccactaggagtgaacttgtgga

SEQ ID NO: 680905 - DNA, 383 bp, Homo sapiens
gagacaaggggagccttggggtttatttactcaaaaccatttacacacagagtgtgggtgtgtgttagatacatctggagaacacgaagtggtagcagacaggcgttcctggctttacagaacttacatggttgtagaagaagacatttagttacccccaacaaaacgctggtttgacgaaaacctttttctttttccatgccccaatatacatacccccctttaggttttaccggacttttaggggccttattggtggctttcgctttgggggctggctggggccagggctggaaggcataaaaatggtctggaaagggttaaaaaggggggaaggctttggggggggcaggccaatggcccaaaaccccacaatttttgaa

SEQ ID NO: 680906 - DNA, 281 bp, Homo sapiens
gtcgacgtttgccaaacccatgaggctctgcttatgagggaaaatattctccaactatggccactgtacagcatatttgtttttttcacgataaccagaactgtgacttctgtaggcctacttgtaagagttgcatagctttaagattatcttaagtcgactccctacttccatgtggcagatattttaaattgcagttgcagcctttcagcttagaactgcttgtcctgaagacccttaaattctaaaccagaggggctgttggggaggagaggttggca

SEQ ID NO: 680907 - DNA, 174 bp, Homo sapiens
ccatctcaaggcgatccatggaaagcttcctggggaacgtatgctagcagagcttctccccgtgaatcacatgccggagatcccactcttagctggcaaatgaatccgaattgacacagcagccccataagcatcagccctgtagagtgaggagccatctctagcgggcccttc

SEQ ID NO: 680908 - DNA, 289 bp, Homo sapiens
gaacagcttgcctgacctatcgagataggccgatcattcaaactacaggcaaagtaatgagaacaccccaaagacactcttcgagacagcaaccccaagacaaataattgtcagattcaccaaggttgaaatgaaggaaaaaatgttaagggcagccagagagaaaggtcgggttacccacaaagagaagcccatcagactaacagcggatctctttgcagaaaccctacaaaccagaagagagtgggggccaatattcaacattcttaaagaaaagaattttcaaccc

SEQ ID NO: 680909 - DNA, 135 bp, Homo sapiens
gctatacaccaccttcagtataagaaaagcactactcatgagaattcacgtgttgtatagcgtggtatagagtggtatagggtggatggggtggatagggtggtataaggtggtatagggtggatggtggtataa

SEQ ID NO: 680910 - DNA, 283 bp, Homo sapiens
cacgaggttttagtccctataatggacccatgattaaataatcactttcacatgtaccgttcacctacattatctgtgctcacattttattgttccacttgtgactgtatagggctttgtgttattaatgtggttctttattaatggattttaatgacacttcataataatttttcttgattcacaactcctaggattaccatgagtgctaaatgtgttcagccttgctcattcatatgcaatgtggtctcttttgtcgtacgactttgatttaaccatcatt

SEQ ID NO: 680911 - DNA, 405 bp, Homo sapiens
  misc_feature (26)..(26): n is a, c, g, or t
ccttcccaatttcaaaacatatacanagctacagtaatcaaaacagtgtgacattggaatatggacagacatacagaccaacagaatagtgttaagaatacagaaacaaattcatacacccacagcctgttgatttcccacaagcacgccacacctgttcaatgagccccccctactctcttcacacaaccgccctccaatacctgcactccccccacgcaaaagaacccagttgcacccctatccaatacatatccaattaactcgaaattaaaagctaaatgtaagggctaaaaccgtaatactctcaggaaaaaaacaacaggaacataccttcacaaccttgaatttaaattcttatatacgacaacaaaagcaccagccaggtggggacctcgtgccgaa

SEQ ID NO: 680912 - DNA, 997 bp, Homo sapiens
  misc_feature (374)..(374): n is a, c, g, or t
tgtagttctgagggtcttgatcagtgttgtaccatgatactagccgtcgctgtcgaggagaatatgttgtgaggagaagatttgctagatcaaaaatcgcgggtgtgcgtctagtgcacaagagatgttgttctcgtatctacgcgggtgatccatttcctgttccgccgggattccagtgtccgtccccgctgcgggtatgtggagcgccgcaacaggaatccctgggtacctatgggaaaacaattcgggggttagccggtttcagagaaactatgcttgccttcgtaagagcgtcgccctgataagtcacataggggcatggtcaaaacgaggttgtgcccccaattgaaaaggggtacccttatttgcanagcatatgtcatactcgggagaaaaaaatgtgccttaccaataattttggatcaactcaactcccgctttaagggtgttttttgcttccacaaaagattttgggaagaaactttccggcgccacaaagggaattagttgtgagacagaaggcggggcagaaccaagattgggggaaaaataaaaagtgtcataccaccccgccgggggaacataacaagacggttctgtttgcaacaccacgagccccaattatacgagctcgcgcctagaagaagtgaccgaccccacccttctacgagccaatgttagccgttaagagcacctccacccagggcccagcttaattggctttcacaagtggggatacaaaaaagagcaggcgtccgcttcaccaataagcccgcattgtatatagtggaagacaaatgaagatctgtcaagtgggctcttccctcgcataatcggcgcgctattcaatgctaatcagttcaattatagtgttatgaagagcgcacaggctgagtaatctccccgccgcctctgggaacaatggccgccagatacatcgagtcctcctacggcgaacctccaataaaaaataaaaccctcgtccacatataca

SEQ ID NO: 680913 - DNA, 159 bp, Homo sapiens
catcaccaccatccaggtcttgccaacggtgcctggcagctccatttctgtgcccaccgcagccaggcccagctgcccctctgccgaggcttccaccgaccccttcctcacttccacgcctgtcacaagccagccgtcgcccccacagtcgcctccacc

SEQ ID NO: 680914 - DNA, 148 bp, Homo sapiens
  misc_feature (47)..(47): n is a, c, g, or t
  misc_feature (98)..(98): n is a, c, g, or t
ctggcacctgttttccaactacttgggagactcatgtgacaggaggntcacttgggcccaggagttggaagctgcagtgagccgtgatcttgccactncactccagtctgggcaacacagcaagatattgtgtcaaaaaaattttttt

SEQ ID NO: 680915 - DNA, 371 bp, Homo sapiens
  misc_feature (38)..(38): n is a, c, g, or t
  misc_feature (40)..(40): n is a, c, g, or t
  misc_feature (68)..(68): n is a, c, g, or t
  misc_feature (85)..(85): n is a, c, g, or t
  misc_feature (94)..(94): n is a, c, g, or t
  misc_feature (107)..(107): n is a, c, g, or t
  misc_feature (202)..(202): n is a, c, g, or t
  misc_feature (217)..(217): n is a, c, g, or t
  misc_feature (220)..(221): n is a, c, g, or t
accagagcaagattgacgtcccacttctgctacacggntngtgtgactctgaacaggtcatctgattnatctctaagcctccatngtcaggttntataaaacccttngggccaggtagcaatacaacccatgtcaaggggttgtataaagatcgagtcacacagacatagagaacagacttgtggttgccaagggggagggngtggatggactgggngtnnggggtcagtagacgcaaactattgcatatagaaggggatgaacaaggaaagtcctactgtacagcacaagggaactatatccagtctctttggatagaacatgaatggaagatcatattagaaaggggatgtgtggtatgtatgtgtgtg

SEQ ID NO: 680916 - DNA, 160 bp, Homo sapiens
atcgatgtgtgtctatactgagtatccgtttgctatgtactattttgtcatgtccctgtccttctaatcattccctatgtgtctatgtctctagtgtgtgtatatcctctctagtgggtatgtgtccctatatgggttcctttgtcgctttaggtgtatc

SEQ ID NO: 680917 - DNA, 928 bp, Homo sapiens
aacagtggtatcaacgcagagtgcccagttacggccaggcaagagcacttcatgatgaggcacgtcgaaaatcatttgttgccagtgaggatagaccgcaagtgggtggtgagaccattgaaggcgtttatcaactgaagagtcacatgtaacagcataatttgtgggaggactggaatagggctgaataaatgtgtgtgaatctctaattttatattttcttgtgcctgaggaactgtgatgttgttctgtctcctggatccggccttgtcgataatggggtctgttccttgttagtaccaatcttgtagtcgcatatatgaaatcattaacagttggatgatcagtttttgttatcataaacagtaatatattttggtccaaggatagaaaactataagaaggcttagatattcgtgatttttggggtaaatcaataggtactctgggaatgtatatactgtttgtagttgtcccggcaacacttgtatttatacaatgcaaattttcattggttagcgaaaagctctttaaaggcatattgggtgattggcatgggatttttcccaaatgtcttctgtgtaatgtatgctgtgcggaacctgggaaagaaagtgattcggggagagcactagtggttcctttgattagaataaaacttctggtgtgttaggagtcatattaaaaatgcggattacggggaggggttctttcgtggtatccctgtagcatcttttgttcggagcggcgaaaatagttgttggtgctgggggtgggaggggaagggaaacgtaggtattactgtgacacacgggggtgcagattacagacgggtggggggagacatagaacacaattggggagagatattttagaggagcgcgattttgacaaaaaatgttgctttcaacacacggagcggaaaaaa

SEQ ID NO: 680918 - DNA, 100 bp, Homo sapiens
attctgctctatcttggattactccggtcgggacaggagcggaaggggcagaagctccctgcggtgtggcccccaagcacgcatcacaggtggcagcagt

SEQ ID NO: 680919 - DNA, 140 bp, Homo sapiens
acccctcggtgttgcgctctgtctcacccacatcacctttctggggtctgctgacgcgtcggcatcgtggcgccaatccccctggcgttcgtgttcactccctgcatgctgccatgttctgcttacccacacacgtggcc

SEQ ID NO: 680920 - DNA, 225 bp, Homo sapiens
ctttgctgtagaataatgcactttaaaacaaggaaccgtatcaggccagcatggtggctcatgcctgtaatcccagcatttagggaggctcaggcagacaaatcgctctagctcagaagttgcagagcagcctgggcaacatggtgaaacccgtctctaccagacaaaaagcagccaggcgtggtggcacatctgtggtcccagctacttgagaggctgagccag

SEQ ID NO: 680921 - DNA, 361 bp, Homo sapiens
aaaaatcaaaagggcccgggtggttttttcccctgggggggaaaaaaacccaacccccccattcccgaaaacccccggaatttggggggggttttaactttttttaaaccaaaggtggcctttttccccctttttaaaggggaaatggggtggggccccccaaaaatggaaaacccccccccccgttaagggggcctttaaaaacttaattttgccttttgccaaaattttttggggggaattccaattaaggccttttccccccaaaggggttagttttgttgcccgggcgggtttttcccttttttaaaaatttccccggtcctttttggtctaattttaaaattggcccctttttcca

SEQ ID NO: 680922 - DNA, 449 bp, Homo sapiens
gaatgaaaataaacgataactgtcatcaatgtaaagacttacttgcacatttaactgacttcagtgtctgcctacacaggtattgccctcttggaaggtttatccccaactcatggcttctgtctctgcagcaataagaagccacttcccaatagtttcctgatacccagtcacctttgggaacttacgaggaaagtttttccagtctctccgcagacccttgcatctcttctctttttgtttagacccttgaccaccaccccctattctaatcttaactcctctgctactcagttccaatcctaacccaagccctagtccctaaatttataatcctttaatcctagacctggtctctagatcctgagcccttgatgcttatcttctaacctcctaatcccaacctcaaatccctaaacctcaacccatcggacccatcggacccatcg

SEQ ID NO: 680923 - DNA, 675 bp, Homo sapiens
cccctcagacactgtgccccctcttcacaccacactcgtatactgtgccccacccctctctcctgtgtggtgtgtgtgatacactcatcccacaaattattgttttcgccccacgggagccggagacaagaagaaatagtggggtgagacagaccacacactactgcgggggggtgttttctcccccacagcacaattacagtggtggtgcgttgtagagtacacaataacacgttgaaacccgccccctcttgtgaaaatatatatttctctcatctacaccccacacactgtttcggcccccttgataagctttctatctatcccatccccactactcttggcaagataatatctccctctccgactctcgctcctcagagatagtagagcgcgataaatattcacccccgctctatcacctctctgtggtaaagaacacctcctggtccactcacgactactgtaaataaaacgaagctaccacctaactatgtgtacgcttgactgtctccttctctacatttctctgtcttctgtccagacgcgctctctttccgaactcacaagtacactttcgctcgtgatcttcggtcccggcaaccaccacttacattattatgtcttacattaataacttattcttcaccccaatcaacataccggacatataac

SEQ ID NO: 680924 - DNA, 241 bp, Homo sapiens
gctagccacccagctgctgtctttggcctcgcaaatcgttcgtaccccactgtaggcctatgttattcacctacagacatcttgcaagagaaactagacaataatttccacttggcagcccgtgatggacctggaatgcatcacgttagggaaacacgcctagctcttgagataagcgtgttaggtttcctcacgaggccactcgtggaagaggtggctgagaggcccaggagacgaatgc

SEQ ID NO: 680925 - DNA, 270 bp, Homo sapiens
tgttataaacgctggctaggttaaacggaatacacaggcagacatggtggctcacacctgtaatcccagcactttggaaggggatgcgattgggactcaagacatccaaaaacaggccgggtgaagtagctcacgcctgtactcccagcactttcggaggctgaggcgggcagatcacttgaggtcaggagttcgagaccagtctggccaacatgacaaaaccccgtctctactaacactacaaaaattacctgggcacacattatggag

SEQ ID NO: 680926 - DNA, 521 bp, Homo sapiens
tgctggaactacaggcatgagcatcgtgcccaactaatcataccatttctgagtgcgacacggatagccgcaaggtggaaaattccattgccatgaccgtcgtgtgacaggttgctatctacagacacagtcaagaatgttctcaactagcacaagaatattaaaaatatgatgtaaaattaccttcagacaattaagaatattgtgtcataattaccttcatatataaggtatatatgaaacaagtgaattttgtgctgagagtcgagccccatccccaagatagctcatatgtatctgcaaatatactagacttagacaaaagtctgcagtccgaaacattgctggtcccaagcgatccagatacgggatactcaccctgtaaggtagtagtaacagtaatagcggtgatgagaagatgctagaggaaaaccatgggaagtgctgcctgctttctggagattctggtctgagggatagcagacagtttgcccatagtttgtctctgggaggctgagagg

SEQ ID NO: 680927 - DNA, 144 bp, Homo sapiens
caccactcagcatcgaggtgacttgatgctgcagattgcagcatgctgtacgctgctctgctgcatcatgctgcagctgctgcccatgcatgccatctgctgagagaccacacagctcctgtggtgaggactgctggaggacga

SEQ ID NO: 680928 - DNA, 204 bp, Homo sapiens
  misc_feature (3)..(3): n is a, c, g, or t
ggnggggccccttttggggcccccaaaaaggggggcccccccctttttcctggtgggggaaaaaaaaagggttttttttggggggggtttttcccctttccggggggttaaattccccggggggggggcttaaaattttggtttttttgggggtttccccccccccccccccccttttttttttttttgggggggggggcccca

SEQ ID NO: 680929 - DNA, 204 bp, Homo sapiens
tttttttttgcaagttgacttttttgacttttgaagccaaagggaggtcgaaactgcggtgattggacaacatagttaattaatgattgagtaatcatcttagctgccttcattctatttaggtttttcctgctctgtgctgacgataaagccctcctttacagatttgtactgtggattaaaatgtcatgccacgcggtttcg

SEQ ID NO: 680930 - DNA, 324 bp, Homo sapiens
ctcccaaagtgctggggttacaggtgtgagctactgcgtggcctggcctcaatttggtttttagcatatctcaaagtaaattacatctgtatacttcttgcagaaacttaaattgcggacatctataaatgtagacttctccccaaatactaaggtttgcatattaaccagaattcattgtttttgggatatatttttatatgacatactcaggttttaagtgctcattagctgagtttcaacatacacatatatctttgtaactaatggcataattatgaaatagaccattatgttggaatgtttcctcaggcttccataacc

SEQ ID NO: 680931 - DNA, 1374 bp, Homo sapiens
atgtctgctcgtgctgttagacagtgtgctctacttacttttttttcgtttgtcatagttcctctcatctaaaatatacaatgtgggcagcatgtcgctgccatcagttaatttttgtcctggtagtcctcatcgggttttttaagtacaccccacctatgggagaacgtgtggggcgattacattttataccaggcggggacacccactactatgggggtactaatcaacttctgttcagcacacaccctatttggtgttttgatttcccccacacaacttggtttgtgatcaactcggggtgtgtgacaacacctttgtaggaagtgtttggccgcacaccagctcctgttcgacagtgggtcgtcattaaaccatagtggccgttgtctcaatgaaacgcaagaaagccgaatgtggcgttcagcaaaaccaagtgggccaaaaagatgaaacccacaatggaccaaacttgtgtggtgacttctgggtgaagggaacctctatggcgcacccagaggccgaacgaccaattcgccgggccacgccaacgagagagcccttcttgggaatgggccccctctccccgagggatacttgttggccttgattgcccccccggggaggatcttcccagggaacagttctatccgcatggcgttgtacaatggctgcttgccaaaaggcctgtttggacaaagagtctatctccctggagtcttgtgacacgggaagcggtctacaatggcactggcacattctcagtgtctcccccacagcacaaacagggtcacaattggtggacacatgtacacatgcacagtttataggaaaacacttgcccaaaatttgagtgacaatcaaagaacggttggtgaacacatagcgttcgtgagggccacaccatcaagggcaatctctggggtatcaacatgaggccacacaaggtggtctctcacatttgacatttctcacgagctgactacacccactctcatgccacccatttgacagactggggcctggcaattgcccatctaacagacccacactttgtctaagactctcatttccctggtttgacacaacaggatttggctacacagcaaacaagaggtggtggacactcaaatggccccacaatggcctccaaggagtaagacccctgggccaccagcccccgcaagggcacacagaggaagagagagacaccatcactgctggggaatcccatgccacaactcagtccccccacacaaacgtgaatctcccctcctcacagattgcaaagtagaccccttgtaagaggggaggggcctagggaaccccaacattgtcaagtacccatcatattaagttcccctgtgctctaac

SEQ ID NO: 680932 - DNA, 775 bp, Homo sapiens
cgctgtaccggccggaattatgggatgggcgggacttctccgggtcaaagccgagccttttccaggcgtgtttacttaaaccgtgggcgcagccagagcttttctccttcctgtcccacggccgttcccgcgacacgccatcgccgccatcgtcttctctggcatcgcctgtgtggcttacgccaccgaagtaacctggacccgggcccggcccggcgagatcactgactacagtggccgtccgtagctggggctgctgaaggtgctggagaccgttcgtggcctgtctcactcttcgggttcatcaagtagcccctacgtgtaccacaatgcggtcggccctggagtggtgcgtggcggtgtacgccctctgcttcgtcctggctgagcctcagctgtcctgcgtgacgcctgggtgcactggcaccaggcatgctgcccatccgcgttccccagtttcctgttggggctggccttgcatgtcctgtcctcctctagtgccactgctcgcttgtcctctggcccctctacgcagttcaactgagaagtatggtgtccagccctggcagagcgagagatgtgagctgcagctgacagaaacccctaccttgtgtgtatctgggaccggcgactggctgtgaccgagagctgactggccgtcgaaacttgctgggctatgtgggcgagctggtgtactctgcccacctggtttttgtcaaggtctaggactcccaaagggtcccgttatgctctacaatctcttcatcctgcccgc

SEQ ID NO: 680933 - DNA, 883 bp, Homo sapiens
cgcgcgtcgctgcctcctcagctccaggatgatctggccagaagacgctctactcctttttctcccccagccccgccaggaagcgacacgcccccagccccgagccggcgtccaggggacctggctgtggctggtgtgtgcctgaggaaagcggagatgctggctggtgcatcccagccaaggaatggccccgtgctgggcaggagtgagcctgggactgcctgccctcctcgccgctgagtgcctgagcagttggaccggatccagatggaacaatggcctgcgtgcctgctcagactcgcggcccgcaacgtgcccgtgggctttggaagatgagcctggaaggaagcaacctcatgcgtgggagttcgggaaaccgtattttatcaagctaattgggatttgttgcaggaagaaaggaaatgcataacacttgtttataccacccccaaaaccaaggtcttcacctggtgagccagaatgttgtgacataatacagatgtgacaggttggcatcctgggacaagagatcccatattcattggacctaatccaagctcacgggctctgctttaagtgtcaaaaggcctgttccgccttccggccagttggcgagaaccttttcattacagaggtggtctacgggaccttgcaggctttggtacaatccttggacatggcacgattaaatctggggtggggcccagccaagttgttcgtcttttcctaaggctggtctcaacggtttgtgtcccatccacgcaactctataagggccaggctgggcacagacaccgatgcgcatggttcgtggataatagcacgcatggctttttcgtcgcggggccttgtctcaaagtcccgcctgcatgagcgccagtaa

SEQ ID NO: 680934 - DNA, 124 bp, Homo sapiens
gtcctgtgaggccttcaacatgattgatcagaacagagatggcttcatcgacaaggaagatttgcatgatattgcttgcttctactaagggaagaatcccactagatgcatacctatgatgcca

SEQ ID NO: 680935 - DNA, 861 bp, Homo sapiens
gacccatctcatgggggcacggagtctggaacaacatggtgaaaggtcaggaagcgttacagatgaccagtgtctagttccttatcgtaccaaatacgtccgcaaggatctaaagtatggtacattcagggtgacataattcacagggacctaaaaccctagtaagtctagctgtgaatgaagagtgtgagctgaagattgtggatttgggactggctcggctgacagatgatgaaatgaaaggtctacgtggcgcactaggtggtacagggggtcctgagatcatgctgaagtggatgcgttagaaccagagagttgatatttggtcagtgggatgcataagtggccgagtctgttgagtggaagaagattgtttgcgttggtacagacacatatagatcaggggaagcgcattttaagactcgtaggaagcctaggggggtgagcttttgaagatagaaatctcgctcagagtcggcaagaaactatattcagtgcttagattcagatgcgcagaaaatgaacttttgagaattgtatttatttggtgccaagtcgcaaccatggaatgtcagagttgaatggagaagatgcttgtatggactcagataagagaagattagagcggcgaaggtcttgacacatggctagtttgctgcaggtaacacgatcgtgatgatgaaggcagtgggcgatccttatgatcagtcctttgaagtaggactccttatagatgagtggaaaggtgactagatgagtcataagttgggagacaacctttaacatgaagaggtggagctgagaggggtaggtatgtgaacccttatggagggaagggctaaaggaagcaaatttacggtc

SEQ ID NO: 680936 - DNA, 453 bp, Homo sapiens
tcagggcttagcaaatagccgacggaaacactgcatttaatcgacatccattgcgccactgctgcatggaatccactgcattcaaatgggattcattagggcctcactgcatggaatacactgcgttcaatcgagatccattgggccacgctgcatggaatccactgcattcaatcgggatccatttcgccatgcttcatggaatacactgcgttcaatcgggatgcattttaccatgctgcatggaatccactgcattcagtgatgctgcatggaatgcactaacttcaatcgggatgctttggaccatgctgcataaaatccactgcatttaatcgggatgcattgagccacgctccatggaatcaactgcattcaatcaagctggatggaatccactgcatttaatcgggatgcattttaccacgctgcatgcgtcggctactcttccgg

SEQ ID NO: 680937 - DNA, 326 bp, Homo sapiens
ttccggaggcggagggccgggggccgagggagccgggcctctcggacgcggggcagggcagcgcccgggctggagacggactctgggaccctaggatgcgggggtctcagcgacctgccccgcgggaagcgcggccacggagtggcctaccggggaccctcccccagagggaccggtccggcgcggagagatgaacggctacatcacgaatgaggacaaggcgaatcggcccccctacggccaagatgacggtgtctaggtctgctgccagaggtgctgcctaatcgaggacggcgagcgctgacaccggcctggctgcatctaca

SEQ ID NO: 680938 - DNA, 1763 bp, Homo sapiens
  misc_feature (235)..(235): n is a, c, g, or t
  misc_feature (1457)..(1457): n is a, c, g, or t
  misc_feature (1763)..(1763): n is a, c, g, or t
gagacgtgtctcgtgtcagaagtggtatcctgagagttgcggaaacctactgtgcccaatactcccatcatcctattgtgaactactctttgatcttccgtggatgatcaaagactacggatcgagacaactggataaagtgagaaagtaacgcttgcattacccatcatacgctatccgccagggtactagccgtatgggctataacgacgattgggtgctgtaataatatctngtgagtgctcagagggtctcagctcccacgacggcctcatacgacagtggctttgacgtaacacgactccgagacaagttccgtctgtcctcgaactcctcgatgtgacgaaaaaatggagaggatgacaagctcgccgtgacatgattgttaaaaatgttgctctaaacacgcatgtacgctagtcatttagggataccccatagttccctcgtttgcagagtagcccatactctagttatccagcgtttattggcttccaaagaaaagaaggacaaccaactaggattacaaataacaaacctagagatactacagagataatacgaaagtgagcagtaggacagacatctacgccccgatataagggtcggccgaaaattaaagctaagggtacttccgacagcacattcgatataccttatatcaactacaaaaaaccaaccacaatcaatttctggaaaaacggacaaaattgtacgaagaaaacataacatgaaagggtcctctagagacaattgtgcccttctcgaacataagtgttcgcacacagtaaccacgacaagcttaccatacaaattgccaaaacacaagagaacattgataaccgcccacacaaaaacgattcggagacacagagaaatctccatcaacaacaggcaattcctaagagtctatgaacaagatatacatagtcaaaacacaagcagacacgcatacctagtaacacaagcaaaattagctttgaacaaacgacagccagccaaaaacgaatcaaacacaaagaaaaaataacaggacatcgacacgaagctggagtaccacaacatcaaagaactagaaaaagcatatgagcaacaaaccttcagaggacacatgcagagcagccatcaatcaacaaaaagcaaacacaatgaagatcgacaacaaataaataaaacatctaaatatatacattatgactagacacaattgaacacaataaagatcaaatacacaaatacgcataataacaaaaacacaacaaacaattaacaacgaatcaaaaaaaatgaacacgacataacacctaaacagatcataattagcaaacaatatatccagataactacaactacaaacacacaatagatatatagaccaatataaaaatactacaaaaattacatcaaaattaatacaccatgagtatccgataacaaaaacaataacaaacacaganaatacaagacagtaaataagaaaagaaaacaaaataagaatacagagacgaactaaacacaacaaacaataacactatataacaaagaacatacacaacaaaaaagaacaagacgaaagaatagacaaaaagaaaaggacgaagacctataatcaatgtaatagataaataaatacaataacggaaaactaatacagagacaacaaaaaaataaaaatacgagcaacacagaacacaaacatcaaacacacatactaattatctacagatagaaaaaatagaataagaatatactacacaaaaaan

SEQ ID NO: 680939 - DNA, 482 bp, Homo sapiens
  misc_feature (212)..(212): n is a, c, g, or t
  misc_feature (286)..(286): n is a, c, g, or t
  misc_feature (463)..(463): n is a, c, g, or t
ttttcccccaagcgtttaagacggccccccttttgaggacacacctggtcaccctggcaggttcccggcacggaatctcccgggttcgactccgcctactcaaatcgccgccgcgctccaaacacagatatgagggagcaggattgttgagtaagttgaagaaaccaactcagaggagagagagaaggagaatatatgattgactgattagnccatgaaaaagacaggtgggtgggccttcaagttacttcactttctcccaagttttcagttccaattctgtttntcacttctctttacaagaagatccatatatttttggtcctgtccttgcaactaaataaacttgatcgttgcagctgttataaacaatgataagagatatatacatttaagtttttgatagtgcaatttccctttcaataaggtggtaacaatctatatcccagcctaggcagcagangaagactctgtctcaaaaa

SEQ ID NO: 680940 - DNA, 161 bp, Homo sapiens
aacacaaactccccccacccccttcttcatcagccccaagatgtgaaaatgacacggaagtccaggtggctctggcatttatagcactgacatacattcagcccagagaaagctctggtgacaggctctctaaacaagtccctgttcggttgagctgtaga

SEQ ID NO: 680941 - DNA, 260 bp, Homo sapiens
cgccgagctacctcgcgaggctgaggcaggagaatcgctgcactccggcgaggcaggaaagtcatggctgccgccaagtatgacaccacatgaactccagacgctgggcacccgagcgtagactccgatctcaataaaaaagaagtaagaaagtgactctcagagactaaccaatagtcattaatttgttcaaattagccaagtcataggataagcagggactgggatcatagtagcatattcaaagaaacaggaactgg

SEQ ID NO: 680942 - DNA, 319 bp, Homo sapiens
acgacattcaatgggcaggacagtctttcaacaaatggtgtcacaacaactggatatccacctgcaaaaatataaagttggactcttacctaacaccgtatacaaattaactcaaaataaaagacctagatgtgagagctaagactataaaactcttagaaggaaacacaggggaaaagcttcatgacattggatgtggcaatcatctcttggatacgataccaaaagcatgggcagcaaaagaaaaacagacacattagacttcgtaaaaattcaaaacttctggctcggtgcagtgctcacgcctgtggtcccagca

SEQ ID NO: 680943 - DNA, 355 bp, Homo sapiens
aacgtggtcatcgctcagttgccttatgttctctctacaccctctagtgctgaccgtttgtctgggagaatgcaggtagggggtgcactcatgcaggggatgctgtcgaggaacatacgtgtgtgagtgtggtttgctacagtcaggtcctctctggtcctggtggtggtggacacgaatgtctcatctctcgaagggtacataatatgattattcgtcaatgattgtgggtggttctggagactcagagattctttggatccatgcgtgggcctcacatgtctcttccatcgtcgaatcccatcacattgatggccggagatctagcttcaagcccattttctcttttctcttc

SEQ ID NO: 680944 - DNA, 329 bp, Homo sapiens
tgagtgagcctcttgggctcgaagtggacaaaggcataacccttagagccgttctcatcacacaccagctgacaggacagtatgtctccaaagagcagaaaaagtatcataaagtgccttgttatctatagcattggtccagtgttcttgtctgaatgacgtttcccacaccagcattttctcaatagagggatccctcgtgagaccacatgatgcggacctggctttccctataatcacatcaaagttcatggtgtccaaagcccgctcagcgtcggccggctgctggaagttgacgtaggcatagcccagggagcggcgggtgatca

SEQ ID NO: 680945 - DNA, 291 bp, Homo sapiens
  misc_feature (243)..(243): n is a, c, g, or t
ctggctgtcgtatacactaacagctataaccatgcactgggccgtcgtttaacactaacagctataaccatgcactgggccgtcgttgaacacaaacagctataaccatgcatgggccgtcgttgaccacaaacagctataaccatgcatgggcggtcgttgaccacaaacagctataaccagtgcatggcccgttcgtttgccagcaaacagctataaccagtcatggcccgtcgtttgccngcaaacggctataaccatgcatggccagtgcattggcctgcacagtta

SEQ ID NO: 680946 - DNA, 131 bp, Homo sapiens
  misc_feature (20)..(20): n is a, c, g, or t
  misc_feature (108)..(108): n is a, c, g, or t
gatcagacgttttacaaatncatgaagcgaattgctgcttgtaaggagcagattttaaggtattcctggagtggagagccactctttttaacctgccctacatcagangtcaccgagctcccagcctgcag

SEQ ID NO: 680947 - DNA, 116 bp, Homo sapiens
cccactcggtcgtgaggaagggcgtcgagctcgccgtcaccgcctggttggcggtgacgatgaagccctcgtcggggtcgagggcggcggcatcgactcgaaggggactagccctg

SEQ ID NO: 680948 - DNA, 186 bp, Homo sapiens
aattttttcccccccccccccccccccctggggggggccccccttttttggggggggggggggtttaaggaattttttgggcccggggtttttgcggggggccccccccccccattttggttttttttttttttccccccccggggggtttcccttttttttttttttccccccccccttttttta

SEQ ID NO: 680949 - DNA, 459 bp, Homo sapiens
ccattaattggaaaaacctaccgcgtttcacaaatcatataacctatctgttccagattacacatggcactcctggtctacaccaacaagacgcaatttcagaattctcaccactcaaattgtacatacgtagtctagtgtctgtctccttcagcattgagatcaccgcctccagcacacctgctcagcacccctgggcatggagggccacaccatctcccttaatctccgcatctgacctttatactccacatgtccttctgaactctgaccaggatgtccccagagcacttcccctgtggagctctggtgagtccataagccacacgggccactgatcacctgccattcaaatcagggagcagcgatcggaataggcagcattggcttgcactgaaatgaacacactatctcagatcgctacattgtaaaagtctcaaaagtagagaccatgtccca

SEQ ID NO: 680950 - DNA, 920 bp, Homo sapiens
ctcccgtggccactgtaatgtcagtagttcggtgactcgagtactgatgagtcttgctttcgtcttgtacttcaaccactcgtgaggccacgatgccactagtaccagaactgggaggagttagaagtcgtacagccgagaagcttaacccatctgcttgaccctatgaaggtacgtgtggctctcaatatattggcattctgatgggaacttgtgtgtaaaagataacacgattgatttacgattaccaaagggtcacggatgtatatgaggggattgagaacattacacagatcgactaatgcgatttatgataggcaaaggaaagcccgcagttgtaccaatgggaagactgacgttgaatggttcgaggatgacagactatgtcgtgtcactatagggacagtaaggtagtctcttgaattagcagaactgtgtcgggacagcagagtactgtatgtaactaagtgggctggtcatgaagcctatgaaggtcgttacgggtaaattgtctgtaacatcacttgatgagagctacgggatgcgaactgttacgagtgagaaggccttgattaactttgggaaatctgaccaccgagacttcatcatgtactttaggaaactggagactaataggatgtacagggatgaactggtactcgttctctggcacactgtggttttcgtgcactctcgaaactgaagaaattcaagaagaaaccaattctcctgacatgtcagtccaactctacttatatacgtgactttgtctgtcaccatttcggcacatccgagttattaggagcaatcaacgttagtgtcggagcacataatataagagtgttcatggctcactcgacaaagttgccgtgttactcggggcacctaatacagagagcgaatgaaagagcgaaaatagc

SEQ ID NO: 680951 - DNA, 150 bp, Homo sapiens
actgagtctcttatcttagggcataattcatacaacaattatcaatataaacccctgcatacccataccaacgccctttgttgatccgtcctatcaaagagtctatctctattcccagtctaggtgtggatatatatataaagcgcacta

SEQ ID NO: 680952 - DNA, 183 bp, Homo sapiens
gtctgattcagctgcgaatgaagaggacattcggctgttcgtgctggccaactggcagtgcgagatagttttcagcgaggggatcagctcttcgcgctatgcgggcatgtgaatcgacccattgcagataggtgttccaccgtgagttgctacatgtggtgccaccatcacgatggtccctcc

SEQ ID NO: 680953 - DNA, 910 bp, Homo sapiens
  misc_feature (886)..(886): n is a, c, g, or t
gagcacacccgtctatgtagcaaaatagtgggaagattataggtagaggcgaaaacctaccgagcctggtgatagctggtgtccaagatagaatcttagttcaatttaaattggcccacagaaccctctaaatccccttgtacatttaactgttagtccacagaggaaccagctcttgggacactaggaaaaaaccttgtagagcagagtaacacaaatttaacaaccatagtaggctaaaagcagccaccaattaagaaagcgtcaagctcaaagccattacctaaaaaatcccaaaatataagtgaactcctcacacccaatggaccaatctatcagcctatagaagaactaatgtaagtataagtaacatgaaaacattctcctcgcgcataagcctgcgtcaggattaaacacacgtgaatgaccaattaacagcccaatttatctacaatcaaaccaacaagtcattattacccctcatgtacaacccaacacaggcatgctcatagggaagggttacaccaacgagtcaacgggaactcggaaaatcttacccccgacggtataacaagaaacattaactctagcttcacagtataagaggcaccgcctgccagtgacacatggtaacggcgggaccctaccgtgcaggagcatatccattgtccttaatcaggacttgatgatggtccagagtccagcggccatacttaccaggatggctgcggaaggggctgccgagagagccaaggtattatacgaaggcgaaaccaggcaaacacacggaaatggggggcgagacacgggatggaggcgaagaaaacagaagggaagcagaacaagcaaaagacgcgcgcgtccgttcccgcccagcacacacaantcctgcacacgcagaaaaagaaga

SEQ ID NO: 680954 - DNA, 92 bp, Homo sapiens
  misc_feature (55)..(55): n is a, c, g, or t
tctctaccctgactaattggaagcgttttttggggtcggggtccgatttttgggngggggtcccccccccaggacaatttttaccccatttc

SEQ ID NO: 680955 - DNA, 327 bp, Homo sapiens
  misc_feature (45)..(45): n is a, c, g, or t
ttgcctggactagcacccagcactgagaaccacggaaggcgcctncggagcctgctgaggaaacacagcgtgcttttattgatttacttctgaacactacagttcctggatggggcggaggcgcgagttaatgtcggtttccctagaaatcactcaaggccggcctgtgtccttgatgccagggtcgggtctgtgactgccatggtcgctgcttgccaatgtgccatgtccgcagcggttgtccgtgggttccagctgtgggtccttcccgtgaaggcctctggaagtgactgctcggttcctaagcaataaaattgatcatggtga

SEQ ID NO: 680956 - DNA, 415 bp, Homo sapiens
  misc_feature (200)..(200): n is a, c, g, or t
  misc_feature (225)..(225): n is a, c, g, or t
  misc_feature (340)..(340): n is a, c, g, or t
  misc_feature (351)..(351): n is a, c, g, or t
cgtggtgaaacggctcctgctatctcccgaacacttccatttttttcaatttgtgtcaatgggagtggaaaccacaatttccaaatatattgaacgatttgttatcaatggaaataaaaaggatcgacgattcgtgtcaactttaattaatcagatagttgaaacagcagcaacatcaaagaagtggtctgttgaactgnaattgtatcgtgaacggcttaaatnaaaatcagtagctaatgccgacgataatcaatggttgctgaacattttatgtaacaaaattgttgaatagacttagattattttttatttttcataatttattgaatggtgcagnacagttgtgancgttgtaattttgatctcattttccaattttgtgatacaattctaataaagcaaattttacatc

SEQ ID NO: 680957 - DNA, 153 bp, Homo sapiens
tgagtaattgaggagtccgaggaggttagttgtggcaataaaaatgattacggatactagtataatgagatcaggttcgtgctttgatgttgtgtatggttatcatttgtttagaggtgacgtttgattagtctgtgcggggtggtgattagt

SEQ ID NO: 680958 - DNA, 312 bp, Homo sapiens
atgaagatagcatcattaaccatcagagtactgcaaactaaaaccacaatgagctcacacctgtaagcccagcctcccgaaatgctgagattacaggcatgagccaccgtgcctggccaacttgtgctttgcttgccccagccctgaagtcatcagctttttccagagattcttggttccttctggtggggaatggtagtaagtctgattgccttctcaacatattcccttaaatgtctcaaaagtaccttaagtagcgcggcacagtggcccatgcctgtagttacagctactcaggaggccaaagcagga

SEQ ID NO: 680959 - DNA, 273 bp, Homo sapiens
gtcgcttgaacccaggagacggaggttgcagtgagccgagactgcaccactgcactccaacctggacgacagagcgagactccatctcaaaaaaggaaataatcactattaatacagtgctgcagagccctttaggtggtggtgtgtgtatgaacataaatagaagtgggggctcggtacggtggctcacgcccataatcccagcactttgggacgccagggtgggtggattgcctcaggtcaggggtttgagatcagcctggccgacatact

SEQ ID NO: 680960 - DNA, 417 bp, Homo sapiens
ccggttgcttaaggacgctgtttttacatttactcttgccgatcgcgcgaacccagttgagctcggtatcctagggaacacgccttgcacgcgaaggggccatgagtctgacttccacgaacagtgagccaggcctgtgcatgctggcaatagacatctctactctgaggctgtgggtgaccagaatatggagaactttggtgtctccaacattgcctggagctgtcttgattggatcgcagcagggaccattgatgctgggtcagctaccatgggttatctagcttacgattttatgctaaagatcagcgagtccagcatgagaagccgtccgattcagaatgacaaccccaagatagcatgcttttgagatggaggtcatggataccgccgggtacagacgtcgattgtgggcac

SEQ ID NO: 680961 - DNA, 326 bp, Homo sapiens
tattcgttcagcaaaaggaagtatacatgtgcctatgctgaattcaatggattgaattttatactgaacattaacaaatgtaaacatttgtaaggctaatgtgaaaggttactgttaagggaagcttagttatcagcgaaatatatatccagattactagccatttctatccttgacttttctcctctagcaaccttttaaccttttaaagggggataacccccacacaagcatctgaacacagccactcatatatcacatctcttttggagggctgctttccgagtgacacagattgtggttagagaaaggatgacattcttgct

SEQ ID NO: 680962 - DNA, 320 bp, Homo sapiens
  misc_feature (11)..(11): n is a, c, g, or t
ctcgtgcgganaaatatggtacacatacaccatggaatagtatgcagccataagaaacaatgagatcatgtctcaggaacatggatagagctggaggctattatccttagcaaactaattcaggaacagaaaaccaaataccacaggttctcagttgtgagtgggagctaaatgatgagaactcatgaacacaatgaagggaacagacactagggtctacttgagggtggaagatgggaagagggagaggagcagaaaaagtacctattggtgattgaagtactctgtacaacaaacccgtggacaagagttttccctat

SEQ ID NO: 680963 - DNA, 392 bp, Homo sapiens
cccgtctctgctaaaaatataaaaattagctgggtgtagtagtcccagctactcgggaggctaaagcaggagaatcgcttgaacctgggaggctggagtatagtggctcgatctcagggcctggctaatttttgtatttttagtagagatgggttttcaccatgttggcctcaaattcctggcctcatgagatctgcccgccttggccacccaaagtgctgggattacaggtgtgagccaccactcctggccaaaatttatttcttgttaccaataaccagcagagtaattttttaaaaactcaaatacatttaggaacacccatagataaaagatcaataaaacaaaaattaagtcagttgtagatctatatgccagtaacaaacaattag

SEQ ID NO: 680964 - DNA, 135 bp, Homo sapiens
cccagacggtagaatgtcatgcgagctccaaagaggaacgaaaccagctggattcagatcattcaggacacaatcaacaccctgaacagagatgaagatgaaggaatcctagtgagaatgaggaagaaaagaaaa

SEQ ID NO: 680965 - DNA, 365 bp, Homo sapiens
cgaccgacacgtcgtacttcgacttgtcgtagccgaacgcaccggccatgccgcagcagccggtctgcagcgtcgtcaggcggtcgcccaccacccggcgaagggccgacgcgctcgacgccgccccccacagggctttctgatggcagtgggcgtgcagcagcacccgctcgccgccggcgcgcacgcgcggcgcacgcggcgttgccccccaccttgcatcgatgaactgctccacgagcatcgacttgtccgccaggcgcctgcgcacgtccggctgcgtcgagcaccgcaggcgcagccagtcgtccttcaccgcgctcaggcacgaaggctccacgaacagcaccgcctcgaccgacggg

SEQ ID NO: 680966 - DNA, 1021 bp, Homo sapiens
agcgggacggtgaacctgagagggtgcgcgatggcgccagctggagtgcggctggcggaggaaggagcctggcggcgggttgggggctggaaggatttgaaatttccctgcccaagaatcaacaggaactctgtatatagaccagaaatgtgacatctatctttggtacataaataaaggataacaatatttgatgaaacaaatcttcaatcaagtataacattttgatgcttggcatctagactcccttgtgccctcactatgccagcggcaacctgtagactcatagccaaagaatctcgtgaacgtttgggccttggccacctggagtagtgacaggacgtagtgaacgcaaaatgtcgtcaacgattactccgaacaactactcacttacgttgctactggacaccgagatttccaggtgctggttgcaagagccatcggagaattcacggagcaactgctgactatcaataccaactatcgcggtgtcaatgtcgactcgtcacacagataattcagcgtacggactgacatctatgacatgagcacggagaataccctccaggaacttcaaccttggcagttcaactctcacaatctcacatttgacggacggacatgtatgcccaggactctactaccgagctactaacaaccatctggtatccagttccaaaaacatgaggaggacacggacctcggaaacccagtaccttggcaagaaccacttctgaccccctggagcggccatctgcgacacggggtccaccgggcggccaagacaccacacgagcacgacatccgcgactaccattacacgaccacatcctaaaccacactccgacactggacctgcaagcaaccaacctcgcaaccatcggaaccaccccccgcaccgggcacaggccccccgccgacgccacgaccggcgaacgcaccgcagcgccaccagcacagccacaccaccccagacgcggcacacacagacagcgcgaccacacccaacgcagccccacgg

SEQ ID NO: 680967 - DNA, 439 bp, Homo sapiens
  misc_feature (396)..(396): n is a, c, g, or t
  misc_feature (416)..(416): n is a, c, g, or t
  misc_feature (436)..(436): n is a, c, g, or t
gccccacctcgtaataccatcacctatgggttataatttcaacataggaatttggggaggacaccagcatttagaccgtagcaaccctctgcttcctcttgtcttgctgggatggaactggcctgtcttccctactggaatataaactccatgatggtagaaaccatgttgctttgcccaccatggatagcatgaggaagacgctggactcttccttcaagagatacgtgtgtgaatggacagtgggctcatgattcacataagagtcaacagctccggaagcctcttggcgtcactcgcattgctcctctgctgactcccgaaggtccttcttgtggatggaaacggggtactccaccaccgaggctttggggtggcctgcccctttggcgtccntaaaagaccttgcccttttntttggggttggccaagaaanttt

SEQ ID NO: 680968 - DNA, 140 bp, Homo sapiens
acggtaacaagatttaccacttttcctggtgccaagaaaggacgacgcagtcccacagtctggagggagtccgaggaattaataagttatttaataaaacattttaaaaaccacattggggggatggggataaggaaggg

SEQ ID NO: 680969 - DNA, 1252 bp, Homo sapiens
aataaagccccgtgaggcccgtgtgggtctctccgtgtgccctggggcgctttcggggtgatgtcatggctttcactctgactgtcaccttgggcatatgacgtcacgcgcagaccaccacgcccagaggccagggccctcgacgccaaaaccgaggactttcggtaggatgccacgtaggaagcagcaccccacgaactgtgcgggtagtgggccttgggtgtgctgcaagatcccaggaataatcctgggaggtcatccacgcattccattctcgcttcctactccgctcagaccacacacagaagaaacccccacccaagcgagcattgcccgaggctgggagggcactgggaggatggtaggccagggaaaacacccatcgcagagggaaaccccgggacccacaggataccacaggccacggcaaaaccgaaccggaaggaggcagaagaagcagagagaggaaagaggcaacacgaccagagaggaacccagagagaaaaagccaaagcaaaaagaataagacaaagcggagacaagatcaaaagcaaacacggcagaagaaccacgaagaccaaggggaaacacacaagaaaggaggacaagagaaaagacgctcagggaaacgacgtagaacacaaaagcaaaagccccgacgcaaacacagagaaggaaagccaagcagaagacacgaaaggacccaaagacaccactcaaaaggcaacccagacacccaaaccaggagatggacaagaaagaaacgacaacagaaacacaagcaaagaccactgcacaaacggaaaccgagaacaaggaaagaaaaagagaaaaaaaagaaagcacacggaaaaacaagagagaaaaccacaaaaaaaaagacaccaaccggaactgaaaacagaaacagcagaaaaagagaaaaaccaaaaaagaccacagaaaagaaaaaaagagcaacaaaaaaaaacgaaaaaagagtacaaagatcaaaaaagggaagtgcaaacagaaagagaagaagacccagcacagaaacaaaagtgaaatgatgataacacagaagagaaaaagggagagacaaaagggcggggccagcactgcaaaggagaacaacagacaaaagagaggaagcaaagaaacaagggagccagaagagagaagaagacaagagaagacagaggcaaaggcagcaaaagagaaaaaaccaacaacctagacacacaaaacgagaaagccgagagaagaaaga

SEQ ID NO: 680970 - DNA, 370 bp, Homo sapiens
cttcaatgctgattttccttccttctcaccatctgtcagcttcccctggacatccacttcatataaccctaatcactctactctcatcattattcatacgacattttgcagaatggaataaactacagtgatgctctggagctgacctatgagcttggcagatcacagtaataactaaagcttagaaagtctctatcggtggccgggcgcggtggctcacgcttgtaatcccaacactttggaaggccgaggcaggcagatcacctgaggtcgggagttcgagaccagtctgaccaacgtggagaaaccccgtctctactaaaaatacaaaaattagccaggcgtggtggcatgcccccgtggtcccagc

SEQ ID NO: 680971 - DNA, 117 bp, Homo sapiens
ggtccttggttaaacaataacttaagtggagggagggcttcagcctggtggcctggggtgggagactgggagggcaggtgagggagcaggccacttcgtgaagaaaagagtgcttgg

SEQ ID NO: 680972 - DNA, 271 bp, Homo sapiens
  misc_feature (180)..(180): n is a, c, g, or t
  misc_feature (267)..(267): n is a, c, g, or t
tcccaggttcaagcaattctccccacctcagcctccaaagtagctgggattacaggcatgcgcaatcatgcccagctaatttgggtaattttagtagagatgggttttcgcttagtagagatggggtgtttgccaggctggtcccgaactcctgacctcaggtgatccgcccacctcggnctcccaaagtgctggggttacaggcataagccagcaagcccggccgaccttcttctatttttccattctcctttccaaagccatggncatg

SEQ ID NO: 680973 - DNA, 203 bp, Homo sapiens
tctaccacagcgggtgtgacgcgaatatacagcctgaggtcgtcctcactcactgtgtttgaggaactgagggcagctggcagtgtgatgaggctggcctcctactaccgatttagatcctggaggccttccgtagagctgtgggagctgcagctggcataacgttagaggaagtatctggatcgggcgggctgggatctctg

SEQ ID NO: 680974 - DNA, 342 bp, Homo sapiens
  misc_feature (121)..(121): n is a, c, g, or t
cccccggggaacccggcccgttgctagtcaaggggtttttaaaaaaaaggaattttcaaagggccccgtttttttgtttttttaaaactaaccccccccccaaaggggggggcaaggggtnggggttttaaatgtcttcttttggttcaccccaagggttaaggggcccaacccgtggttttattttttaaaagaatttgaccccccagggggtttttcaacttggaattgggggtaaaaagcccttggttttttttttggactgggttttttttttttccccccaatcaaaaaacaaaaatatgggttttgggcggtttaaaaaaatggttttccccccca

SEQ ID NO: 680975 - DNA, 183 bp, Homo sapiens
cagttttgccccagccttaaaaggggtgtttaggcagccccttggaccccaaaaccccaaacaagggggcaggcgggggaccaggccctttcctttgggattttttttttttttttaaccataatggttttgtattgaaccccttcatattttttatatataatatatatatatatattttca

SEQ ID NO: 680976 - DNA, 512 bp, Homo sapiens
agcactttgggaggtcaaagcaggagaatcatttcaacccaggagttcaagaccagcctgggcaacatggtgagaccccatctatacaaaaaataaaaaaaaattagccaggtctggtggtgcatgcctgtggtcccagctactcgggagcctgagatggaaggatgacctgagcctaggtggtcgaggctgtagtgagccaagatcataccactgcacttcagcctgggcaatagagtgagatcctgtctcaaaaaaaaaaaaaaattaaaatataggcttaatttgcttcatcatttcctttaaaaaaagaaagacagggcaacatggtgagaccccatctatacaaaaaataaaaaaaaattagccaggtctggtggtgcatgcctgtggtcccagctactcgggagcctgagatggaaggatgacctgagcctaggtggtcgaggctgtagtgagccaagatcataccactgcacttcagcctgggcaatagagtgagatcctgtctc

SEQ ID NO: 680977 - DNA, 1663 bp, Homo sapiens
  misc_feature (1)..(1): n is a, c, g, or t
  misc_feature (56)..(56): n is a, c, g, or t
  misc_feature (991)..(991): n is a, c, g, or t
ntgttctgagtcgtgttcttctcctcgcagtggggtgggtggtagcgcgcccgtcnttgtggttgctgcctctgctcgtttgttgactactctcttttgtgtgaggttgttgccttcgctctcccctctgagctgtgcgaccaccgatcgttgtgtctgccggcggctccctccccgatgagagcctcacttgcggggggaatatgtgttgtcactgacttatgagataagttgtggtggccgcgggatgctgccccacttggaggcctccgcagtagcgccgccgccctgtcgcccccgtgtttgttatgagtgggtggggccccccccccaaccgccacactatggtgggcgcttgtttggtgttgtctttttcctccaacgagaacctctggttttgcttcttgttgtgggcccccgtcgtcctcgctttgttgctcgtgtgcgcccccccggctgatggggggcccccccctccctccccgaccggcgccacaacgtctggtgcccaccacatctcctcggtggtattgttgtgtgggtgttgtgggtggtggctccttcgtctgtgatagctggcgtccgtcgttttggtggaggaggggcggctgtctttttgtagccacaccgccgcaggattgtttgtggtagctaccgttgtgaggagtaccacccccccgccggagacgtcctcccacggcgcgttagaggaggagttgttgcccccgtcgtcgtcccaccgtcggcgggagcaaacaacagtcggggcccaccacaatagtatagtagaaggagcgtgtttgtggtgttagaccacagaaaacccacagcgttgtgttgaggagcattagtaatagggtacataatatgctcgctgtttgtgtggtgagggctcacagcgcccgccaccacatagcccacagcaggataatatcgccgtgagagtagctccccgcggcgaagagtactccacccacagtgtgtggcgtgntgacccacaccatcatatagtattggtgccccaccatccgaggcgctgttgtgtccacaacggtgtgctctcttgtatatgtgctctcgagagagagagcggcgccttgtatatatatatattatagtctctcgtctatagtagatagagttgttattatatagagagcgcccctctcgcgatacgcgctactagagagagcgcacactctatagagggtgtgtgcacgctcggtgtctatatagcgctctgagaggagaacctcttgtctccacacatgtgtggtggtggtctcgccacacgtgtggtgtgttttggacacacaaagagaagctcacataagaagtctcaccagaaggtggtgtgtctctccgctgggatccacatgttgagagttccctgctgttggagaattttgtataaattaacacctctaagtgtatactatccttatataataaatcccactgtcaaattgctaagacacacatccttttagcccgcgacctcttttctataggagaaaaacttatatgtaatataatttccttttttaaaatgcccgctgccttaaccttaaactataaggggaaccttcccgagggtcgtaaccccttgctgggttttctggtccacataaagttttatctattgaatgacccctggaatata

SEQ ID NO: 680978 - DNA, 182 bp, Homo sapiens
cacgtctacacggttgaactcacagatttgtaccggctcattaatctaataccaaggtggaacagttatcttcaatacaaagtcaaaatcagcaataagttctataatccattgctgatatcagataccagcttcaaggacgatttcttttcgaaggcttattccacttcgtgggcagcggt

SEQ ID NO: 680979 - DNA, 337 bp, Homo sapiens
gagtatactaacacctcatacaccaccatagtacacacacacggacaaatatcacccacacatcacacaacacatacttcacacatacaccacataccccacaccacacactacacatcacacacctcacactacatacctcatacacaatacatacctcacaccccacatacctcacacaaccacatacactacacacacatcgcacactacacacacacacaatacggctctgcaaggaaacgtgtgaggggtgtggtgtgtgtgcactgtgtgtgagatgtgtggtgtgtgtgaaatgtatgtgtgaggtatgcagtatgtgtgtgaggtagtg

SEQ ID NO: 680980 - DNA, 536 bp, Homo sapiens
  misc_feature (323)..(323): n is a, c, g, or t
  misc_feature (383)..(383): n is a, c, g, or t
ttttaataaccacaggatatttctttacattgatattctcacaaagaagaaatagaatataggctgggcgtggtgtgtcacacctgataatcccagcacttacggcaggccgaagccacgcggatcaccacgaggtcaggagcttcgacgaccatgcctagtaccaacatgaatgcaacaccctgtctctacgtaaaacatacaacaaattcagccagcgcatggctggcactgcactctgtacatcccagtctcactcagggagcgctgacgacagcgagaatcgcttcgacacctgggacggcagaaggttgcacgtaagnccaagaatcgcacctattgcgactaacagccctgggcaacaacgaggacgcgaaactctngtctcaaacaaaaaaaaaacgagaaagaatataacagtgacatctgaatctccactcaaggggatggccccaaggatatggtacctggtaatctcttcatgccactaggtgtccccagtgttcaacctccatgactgagcatggaagaagtag

SEQ ID NO: 680981 - DNA, 159 bp, Homo sapiens
tgtgataaaaattatatggctttcatttaagccaacactagtgcacaataaaaaaaatagctacttggagttcccattgtggtgaagcagaaatgaatctgactagtaaccacagggttgcaggttcaatccctggccttgctcagcaggttaaggatc

SEQ ID NO: 680982 - DNA, 779 bp, Homo sapiens
ggccatggagcagcgcctgctgtcaccgacttcttcgcgcgccgcgacccagtgagtccggggactactacttccagcctacgatcgccgtccgatttcatctccgcttgcaacctccgcgaccatcttctcggccatctcctgcttctgggaccagccagcaccgctatttgtggcttagctcctatcttgtccaaccaatccatgagctcccagattcgtcagaattatatccaccgaccgtggaggcacgactgtccacacgcctgcgttcaatttagtacctgcacggactcctacacctacctcgtctctgggcttctatttatcgaccgcgatgatgtggctctggaaggcgctgagcccactttcttcctcgcgacctggccgaggacgacagcgccgacgggctacgagccgctgtccccttcacggatgccaaaaccactgcagagcgcagactcgacaccatcctctatcccagggaccatatcaaacaaaccacagcctagtaatagacttaccttggaggataacatactccccactaacgaccatataaaaacgccattcgtccaatagggacccactgcgcacaaaacacacaccctgacacacagtgccactctctaatggcattcattacactgccaccttggcaatctctgccccgcaacagtgaagcccccactactcctggtatcacctattcccagggacccacatcaccttcacctacacctacagtgacacctgcacgactaaatcacaaaaaataa

SEQ ID NO: 680983 - DNA, 701 bp, Homo sapiens
caagtcttatgaaagtgtagaattgtggctttgtgtaacgttatgtcgttatgacacaggacacttccttgttgtcttctcgtagtgaaagggcgaagtaccactaatagggtgtatctcgagaaactgtagattgaagataagaggagacctaggattgttctgtcctgccttatttgaagattgttcttgattcccttgaattcccaggagagattctctgacattcacgtgtcagccactttggctctggagcctttcagagtggggacatgcaaaaacttcgtgtctccttcttatccccgaatgccgtcagcattacacttgacttccttaaaaccgaccatgattatgaatgtgagcctgtggacgaaccccgtagacataggtcagcttgtcggttacgtggtaagcaataaccgtcagggcttctgctgttgcatgcacaatctgagatggtgtcatcttaaaagagccaagtattcctcgtgctatcaggtgaagtggattcggtcctgctgggttttactttagtccctccatgtcaaatgttggagcctgagaaaaagctcatacatgtctcatgtgaagtgtccatccctctctgatgatctgtcttgtacataacagcaacgacatatcttgtaaggttttacggggactttcggaggaggggagtttggaacatcgtcaccacatgt

SEQ ID NO: 680984 - DNA, 171 bp, Homo sapiens
tcgcctcggtcacagatgatcgccgacgatcaccgcgttttgcacttctttggacaagcgcaacataccggccacggcgccaccggaagacacgccgcagaagatgccttcttcacgtgccaggcggcgggtggtgtcttcggcttcacgctgggccatgtcgatgatgcg

SEQ ID NO: 680985 - DNA, 271 bp, Homo sapiens
caggattactgtactcactcaggtctgcatctcattcccatctatagtaccactcaatagggaggacagctaaaatccacagagagtacaagggaaaccagccatgaacccaggacaagatcagtgcagacaggtcctgaggcccagcaccggacacacaactatgtaatggcagaagttaataatacatatgtgagtgataccttaactgaacacacccccaaatccatttcctctgcacataacccagatagtccacactcttaaaaac

SEQ ID NO: 680986 - DNA, 325 bp, Homo sapiens
ccatccgtagggggggctttctccgtttcgagcaacaatatgaggttgacaggtcctagggtcgcatttatggaggctaattggaactctaactaagtctggcccatgtttcgttgtcgtatagtagtcggtatagacttgtctcctagcctgatatgtgccctcggtgggctcatagcatatctcactcttctgctatcttgcaggctttgcctttcccgtgttcaggttgtggtatagaatgtggtgcgcactataggccttgtagtatgtgtagcaagacacatgtaaatcatagtgacgccccattggcggaaagtttgct

SEQ ID NO: 680987 - DNA, 265 bp, Homo sapiens
  misc_feature (83)..(84): n is a, c, g, or t
  misc_feature (141)..(141): n is a, c, g, or t
tgtattatgtaatgagatgccgggggaataggttatgtgattcggagtagggttaggatgagtgggaagaagaaagagggaanntcgcctacaccgggccatctgcggggtcagtgggggctgctgtatgtcttggctgcngaacggggaaggtgacataggcatcatagccaaagaggcacgtagcgatgcgggaccagtacccctgacaacgattattggagtgctttcctgctctcaacaaggacaacaatgtgaggtgatc

SEQ ID NO: 680988 - DNA, 249 bp, Homo sapiens
  misc_feature (67)..(68): n is a, c, g, or t
  misc_feature (125)..(125): n is a, c, g, or t
ttgttggggtgggaaggagttatttcaatggaggagttatttgcagattgcagagagatgagggaanntcgcctacaccgggccatctgcggggtcagtgggggctgctgtatgtcttggctgcngaacggggaaggtgacataggcatcatagccaaagaggcacgtagcgatgcgggaccagtacccctgacaacgattattggagtgctttcctgctctcaacaaggacaacaatgtgaggtgatc

SEQ ID NO: 680989 - DNA, 440 bp, Homo sapiens
ttctcatctgttgagaaatagagaggaagggtaataatatctagctttgtgaattcttgtgaggatcttctcccctcccccacctttaattataatatagggataatggcctccaattctttatttagtatggtaggagatctttcaaatgatattgcatataaagtagctggcacttaagagctaatatttacaagggcctgttttctcttccctccttaaaacagatttattgtccatcagctaacttgtttaactttttaattacaataagtccttagtggagaccagattattaggtgcgagtatatcatatcaaatgctattacatttaaaatatctgaatgagagagatatttccaaatcttgtataaaaagtaataatagctagatggcagagtcacagtacattaaaattatatgtcccaaaaagtaaaaaa

SEQ ID NO: 680990 - DNA, 126 bp, Homo sapiens
catggtgcgttctgctgtatcccagtacttatgaggaggcagaggccggcaggatagcttgagctacaggaattcaagaccagcctgggcacatggcgaaaccctgtgtctacgataaatacaaaa

SEQ ID NO: 680991 - DNA, 550 bp, Homo sapiens
  misc_feature (161)..(161): n is a, c, g, or t
agtggagaccagattattaggtgcgagtatatcatatcaaatgctattacatttaaaatatctgaatgagagagatatttccaaatcttgtataaaaagtaataatagctagatggcagagtcacagtacattaaaattatatgtcccaaaaagtaaaaanagaaaaaaaattatttgtcccaattcccccacctttaattataatatagggataatggcctccaattctttatttagtatggtaggagatctttcaaatgatattgcatataaagtagctggcacttaagagctaatatttacaagggcctgttttctcttccctccttaaaacagatttattgtccatcagctaacttgtttaactttttaattacaataagtccttagtggagaccagattattaggtgcgagtatatcatatcaaatgctattacatttaaaatatctgaatgagagagatatttccaaatcttgtataaaaagtaataatagctagatggcagagtcacagtacattaaaattatatgtcccaaaaagtaaaaaa

SEQ ID NO: 680992 - DNA, 149 bp, Homo sapiens
cgattcgcggctccttctcacctttccctgacaatacagcaagagcccactgagccagagaatgccacgacgttgactctttccacttagtcgaactcatgctgcggttgtcagcttcaccagaggaaagtgattaccaccagtagtgt

SEQ ID NO: 680993 - DNA, 847 bp, Homo sapiens
gagactcctcggtggtcgtgtcaccgtgtcttcccaggagactgagaaggaggagagcccggaaccaatggtccggagcggcgggcggagccgaagctgcggggagccgtccctgggtgcccccacccctggtgcgcctcagtggtgccgggcgaggtgcggggtgctcgctggtgtgcggggctcgccgcctgctgtcattgtgcggcggggcgcgctagcggcgccgagctcgtgggcatggggaacccagagaagctgagggggcggtaccggctgggccgagtggggaccgacgacggactccctgcgcgtgtgcccagcctcttcccgcgcagcgcgccctttgcctccctccggtaacggttccgccgagttgcgggcaggtaccgcctcgtttccccaagctgccgcgggtttcctccgagagctcttcgggcgcggggttgaggcccctatccccaaagaagagcaagcgtggctggctagacgcgtgtgtaaccccaacgagggcggcgaacccacgctggagttagacgctccattccatatgtcaacctggactgggagcccaatgttccctatagaacacctctaccgagcaccaaacaggcaaatggtaacccacacgacagtaattgcacccccaaaatgtcccatcaaactcctccgacacccttcattagcagagaacctacaacacaaacctctgggtgaacgacacatcacgatgttggaagaccatcttcttctaaaactatggccagtggtggcccggctgtcctgtgcaccagggcttatgccttggtccagactccaagatcgcccatcctggcatgttccaaga

SEQ ID NO: 680994 - DNA, 365 bp, Homo sapiens
  misc_feature (39)..(39): n is a, c, g, or t
  misc_feature (44)..(44): n is a, c, g, or t
  misc_feature (104)..(104): n is a, c, g, or t
  misc_feature (129)..(129): n is a, c, g, or t
  misc_feature (248)..(248): n is a, c, g, or t
  misc_feature (299)..(299): n is a, c, g, or t
  misc_feature (344)..(344): n is a, c, g, or t
tgcagctaacttccctggcattatgacttccagagtggnccagnctgctggctggggcatttctgcaaggcaatgggattgggcagccttggattcttggtggnctcctcggcacccctatgtgcgggntctacctgtctgccggacaaacggagggcggtacgagcaccaaggtgcatcggcagacgctgtaaccctcactttggggagaccttcgccttcaaggtcccctacgtggagctgggggncagggtgctggtcatgggcggtgtacgacttcgaccgcttctctcgcaatnacgccattcggggaggtgcgggtccctatgagctccgtggacctngggcggccagttcaggcctgg

SEQ ID NO: 680995 - DNA, 529 bp, Homo sapiens
cgttcttatatatcgtacatactagatcatcatagcagtgtataatgttgcaagtttttcaccgaggtgtgtagcatagtctttcattaacagtgtcttcttgatcccaaaatcttgttattggtaatgaacgtccagtgagtctattgttccttttcttgcctgtgctttaagtgtcacatctaagagaaagcattggctaatccaaggtcacaaaagtttacccctgtgacttcttctaagagtttgatatttactcttacatttaggtcttcgagccattgagttcattctgtgtatgagggacaggtccagatcagttcttttgcatgtgggtatccatttgcgcagtacctgttagttgacaagatcattcttccctcatcattagttatactttgcacctcagtagttgtgtattgaagtatgtctagttaaatcttttataggcaagcttgcatttgcagctttgtgctctgaaccatctaactgtattcaggctgcttgtggggggtcaaacctgtaatcg

SEQ ID NO: 680996 - DNA, 159 bp, Homo sapiens
cctgactgcttttcatgtcagtgcttttatcttcactgagaagccagagtgatctctgagctccctagcactgtcgtcaaagaccatctgtatgccatgctccctttgatgggtccataccccagctccgtgtgatgcccagtaaagcctgaaccttga

SEQ ID NO: 680997 - DNA, 192 bp, Homo sapiens
  misc_feature (182)..(182): n is a, c, g, or t
ggaactgtgacaaggaaggatagtgacaagatctgaaaaaagcagccctcttcccacactcaacacatgcagtaaacccagacatgcagggcaccattgtctgagctgtcactggagggctgggaggagacaggggatggggcaatggcagcctacccacccctcctcatcactgtccaggngcattcagga

SEQ ID NO: 680998 - DNA, 114 bp, Homo sapiens
ttcaatttctacacattgaagggaacaacacccttgatgcagaagatttagcaccactatctccgttccatctgggcttatatgtacttttattttttgggtgtagaaattgaa

SEQ ID NO: 680999 - DNA, 874 bp, Homo sapiens
ccacacaacagaaaacttaatcaacaaacgtgtgtgtgtactggctgctccactgagtggccattcccctgtctcaaaatcccttgggccttcctattccctgagacataacaatattgaaattaggtcaagttaaataattctacaagggtctctaagtgaaagaaaaagtcacaattctcttacttcaaaacaaaagctaggaatgattaagcttactgaggaacccatgtcaaaagctgagataggctgcaaggcctcttgtgccaaatagttaaccaggttgtaaatgcaaaagaccaattctttgaagcaaattaaaagtgctacttcagtgaagcatacaaagcgataagaaagcgaaacagccttatgctgatatggaaaatatgggtagaggtctggatagatgatcaaagcaagcacagattccctcaagccaaagctaatccagaacaagacctaaatttcttttaattctatgaagactgaaacaaggtgaggaagctggagaagaagaggtcgcagccagcagagagatggttcatgaggcttaaggaaagaagccgctccacttacctacaagtgcaggtggacgcaccagggcgatgtagaagcgcggggggtatccagaagactgccacgataagggctgggcggggtacaccaaacgagaatcaggtgtgaggacagccgaaggagcacaccggcgagatgccagcagagaagcggccactcccagccggaagcggcatacggcggcggggactaacggcacccgcaatcacgacaacggcggagagggaccccgggaagaagcggcccacaccaggcacacagcgggggagcacaacaccaggggcccgcgagtaaa

SEQ ID NO: 681000 - DNA, 191 bp, Homo sapiens
ctctaaagccaatggaaggaaagactcttcacatgtcgtcttggacacgtgattcggcagtcaccactactggccatctgatctataaatgcggtggcttcgacaaagaaccttgaaaattttagaaggaggctgctgagttgggaaagggctcctccaagtttgcctgggtctggtaaaccgaaagctga

SEQ ID NO: 681001 - DNA, 152 bp, Homo sapiens
tatctagaggatcccgacacaatgctactgagaggtcacatccctcttttcccaatcaatactaacttgcaaatattaatactatattatattttttcccaatagaatagcaaatggaggtatgttaacacattaaaaacttcagtagcttc

SEQ ID NO: 681002 - DNA, 296 bp, Homo sapiens
  misc_feature (16)..(16): n is a, c, g, or t
  misc_feature (190)..(190): n is a, c, g, or t
  misc_feature (218)..(218): n is a, c, g, or t
gtaattacagtatttncacgtagagacgggtttctccatgttggtcaggctggtctcgaactcctgacctcgggtgatccgcctgcctcggcgtcccaaagtactgggattacaggtatgagccaccgtgcccagccggtttttttttttttttttgtatagcaatggaagaatggcctcgtacacacgntagagtggaaagtcccaggcaccaaggnttcccaccctagaagcaagctcagggctttctcttcatccttccagggagagcactgagagatgatggggggttggca

SEQ ID NO: 681003 - DNA, 631 bp, Homo sapiens
  misc_feature (327)..(327): n is a, c, g, or t
  misc_feature (610)..(610): n is a, c, g, or t
gcacgaggggtgtccaggcggagtgcagggcgcagtctggctcacgcaagctctgcctcccaggttcacgccattctcttgcctcagcctcccaagtagtggcaggagacagatgccttcctcttatctcaactgcaaaaaggccttcctctttttctaatcctcctcagcacagaccctttacgggtatcccccggtgtcacgctgggggacggtcaggtctttcccttcccacgaggccatatctcaggctatcacttgggaagaaacctgggacaatacctggctttcctaggcagaggcccctgtggccttctgcagtgtgtngtgtcccagggtacttgaggttagagaatggtgatgacttttaacaagcatactgccttcaagtgcttttttaacaaaggacattctgcatagccctaaatccattaaaccttgagtcaacacagcacatatttctgcgagcacagggttagggctacggttacagattaacagcatctcaaggcagaagaatttctcttagtacagaacaaaatgaagtctcttacgtctacttctttctacatagacacagtaacagtctgatctctctttcttttcccanatctgacacagatagtggggt

SEQ ID NO: 681004 - DNA, 999 bp, Homo sapiens
gcacagattatcgtgaaaggccccatgaggaaccctgcggagggatttcaatcacatcaagtgtaaaactcagacttcttggaaagaaaacaaagaggctccgggttgacgaatatggtggggtaccagagagaggaactggctacctgttcggactattctgtaggtccatgtacagaacactgtagtcacaaggctgttgacattgcgtgcttccgttcacgaagatgtagtgtctcgtagtatgcgtctacattcgccctgtcaacgattgtttatccatggcagaatggagtctcttcgtatgaatcctccgcaaattttctcgaggtgaaataatattagtccgcagggattcgggacttagacccaggagtggttgactgtgtttgcagatactctcaaggaccccaggaacaggatgacacttcaagtccttgaaacggagaatgcacactttgagcttagtgacaacattcatgcgcggctttgcatgtcagctaatgaccaagaacaagtctacacatagacaaatggatagtcagggacacatcttttggcgatggtaatctactgttctcttgtaaaccaggaaccttgttcacgcagagctgtatgaataagatctaacgagtttatcctgggcttatcggcagacgtaagaatgcccagaatgtacatcttaagcacctacttggtgatattttcacgactgatggccaataaaagaccttattgactttggcacctgaacgcgcacaaagataaatcccaaggactactcgaggaggattcatgggaaagccgagtaccccaaaagtaaccggacgcacgacaaagcgatcgcgtggagaaggtgccgtttcacccagggaccacgttgctccccatagttaacaaggtcggcatcactggacgctggacgccccaagaacaggggggcaagcttacatgttacataaggcagatttagaggcatttattaggtcagacaaacaa

SEQ ID NO: 681005 - DNA, 597 bp, Homo sapiens
gctaaggtatgaaaggtagtatggggggtactagaccagtagggaggattttactttactatggccatatattaaccaccaacacctagacttctagaagtccagggcaccacacattagcagcatattttctaccatactggtgagggcatttcataacccatgtttccatgcaggggggtcgaaccacaaatcctaatggggaaaggtagaaacctggtttagatattggagagttacttagaattaaggaattttagagctggaaggcagttggactcagggcattttagatcatattactagtactttttggggacatactgagaagaaggttaattcccctaataggtaggtacctttggaccaaggttagaccatagattcagatccagtgagatgaaaatatcctaatttcttcaaaggaggggaatgatagccctgtcttttcaggatatcctttaaggttataattttatgaccactaaatagcattaccagatttagcaattttataggatatctacttcaattatatttgagacataaccgctaaaccatggttggttgttaatctgattttggacctgagtccct

SEQ ID NO: 681006 - DNA, 315 bp, Homo sapiens
  misc_feature (150)..(150): n is a, c, g, or t
  misc_feature (177)..(177): n is a, c, g, or t
  misc_feature (210)..(210): n is a, c, g, or t
atcagcggatttgcgtcgtattgggcgcctggatcaccagggctgcttttatctctggtaaagtggatattgttgacatcactgacccccacattgaccacatatacatggtttacatgttccaatatgactccacccatgagatattcnatgacaccgacaggggtgagaacgggnagcttgacatcaatggaaatcccacaccatctncgaggagagacatcctccaacatcatgtggcgagatgttgcgctgagtacgtcgtggagtcactgtgtctcacacatgagaggtgtgctcatggagggggagcaa

SEQ ID NO: 681007 - DNA, 651 bp, Homo sapiens
ccagaaagagggactcatatgtacgaaggtttaggggtgagagatagcttggcatggccaaggaaccaaaggattggtgtaagggaggaggctaaaggaacgtgctgaggtggaagagacaggtggggaccatgccacatgtggaggctccagtaaatatctctggttttatttgagacacattgagaaaccattgacagttttcatgtagggagtgacatgatcacattggatgctatttggagaatagatagaaggaatcaagattagaagcaatgttgggatgatatggtagtagtccaggtgagaagtgaaattgatgaggtagaatgcacagaacttgcgtggatgtctcatgggtttctggttcaagcagtggaattcacagtttaaagcaatggagaaaattggaggaagaagaggtaatttcttcccaatctccaccccttctatagatgagttatacatcggagaccacaggtttttagaagatgtaattctttacaaagagacattcattctagtatttcttgcttgcttgcatagtaggaagcttcgggccctgggacggggttggcaattctcagtctctgacacagtccaagtacttatttttggagacactgaatatgatgaatgattttctgcagt

SEQ ID NO: 681008 - DNA, 1339 bp, Homo sapiens
ctaagagcccgtgcgccgatgcattccgcgtccagacacctacgtacccgttggcgtcgtcgccgccagcatgcccaagagaataggctgaaggggatgctaagtggagaataatggcaaaggtgaatggactgaacctacagcagcaagatccgcggaggttgtctgctgatacctgctcctccatgagccagtagccctaagccataaaagaggcctcgctgccaaggaagggtagagacggtatccctgagggaagaaagggaaaagctgtatgctggaatacggtaggggaataatgcctgcagaaaatgtgagatgctgaaaagagagccaggtacagaaagctgaatggtggtggagatgccaagtgaagtgtgtggatttgtggataagctgtgtacttcgtggtggacgtgtacagtttgaacatacgtattttattatcaatgttttatagaaatatgctagaattgttgttttacttatttattattttttataagaggcatagtggtgtgtaggacagctacagatgaaaagttgtctacttggtgggtgaaagggggggaaaaggggcccttggtggtcctataagtaggaagtgctttccgaaaacgcgggattgcgcggtggcggggagaatagggcgccttgtcctcgttcgtagcttgggggggaggaacttcctgggtgggggcccgcccgggggggcggggggaatttccccgtggaatttgtgccccccacctttgtgctccccttgtgggtcgaaaaacgccttgtgtgccgttgtttttgatgcccgcacggtatgggggtcctggaggggccccgctcttttcgcccctttgcccgttgcttttcacggtatccgagcgtatgcagtcccctttaagggccaggacaatcttggtgggggaaccttggcccccgttaggttctggggtgtccccggtggtttctgcgccacggttgggagttttacccggtggttttcccccgttaaaaattggtgcccgtggttaaaaaaaagcaggagggggcccactttctagaaggtggggggcgtctcaaaaaaaaccggcccagagcatatatcgaccccgcgaagaaagggaggcggcaccgttgaaacaatggttgttaacccagcgtcttctgcgtagttgatgcacccccgccgaaataccgtgggtggaagtcacagagaaagaaatgcgggtcaggggaagagtgaatgagcaccgtccaaacggcagacagggtgagatgtcaatggaccacgccgccgaccacactgcagaggattcaacagaacagcgctgcgtcgacacaa

SEQ ID NO: 681009 - DNA, 867 bp, Homo sapiens
gaaatcatgagaatggcgataggtacttgttgctgtatgtaaatatcatatgcgctccaatcgcatgatgcaactatcgtcgtatcgtggtgctattgggttaatttggtaggcgtttcattagctggatcctggcttctgtgtctggtggatcataatcagctctcgacatcgtactactagcattggtcgtgcatacgatggtcgattacatgagtgtcttgtatagtcgagtacgttcacgaaggacgcagcacttctctactagtccatgaatgtcaggcctctcactcgttgcacgtgagacaacagaccttgctgatacttggcagaagagagctactacttgacgcacacattatacgcgcaaacagcgcccaaagctctgcgcgctccttgagcggggcactgacacagtgcagaccactacgtagctaattattccagtgcatggatttgtcatgtaggtgatcatattcaccctgctttttaaaatcgccatataaccagcaagaggattcgtcacttaagtcaccagttgttctcaccatctgcagcagactagctagttgaagtggcccaacatgaacgcaacgaaagactctctcgttgtctagcgccctcagtctgtctttgacaaaatccatcgttggctactcagagttatgccacgtccaacagcgcacctcactgcacgcggcagactgggcaaccaaacactgatgctgtcatgacagcacctgttctctaggcgagcacacctcactttgctccccaagtcctacactgagagtaactcgtcaatgaggtctcccctgaaacggacgggcacatgaataataagacagctgtcacttcttaagcata

SEQ ID NO: 681010 - DNA, 392 bp, Homo sapiens
tctcaacaccgcatctcaggagtttaaacccgttcctgggtggaaaaatatcgcccaaaatgtgtggatgaagttgctttccaggaagaagtggttgcagtgctgaaaaaatctttagaaggagcagatcttcctaatctacttgtatatacgagaccaccctggaactaggaaaacacatccactcattattggcagcagcatagagaactcttatgggcctgaactctttccgacttacagagttcttgcagttaaagtgcatctgcatgacacgtggacattcaatgtatgttacgagagcaaagtgacaaaactttgtgctcacattaactgctgtcagagaagtcgctacagatgggaagccgtgtccagccattttaagattgcgg

SEQ ID NO: 681011 - DNA, 157 bp, Homo sapiens
agtgggagtgctcagttctctctggtcgcctggatatttatgaaaaggacgccagtggaaagggctccgctgtagaccgaagggataagggttcgatatcagaagggagcgcttatttgtatccctctctccacattaactggaacgatttaaagtg

SEQ ID NO: 681012 - DNA, 215 bp, Homo sapiens
ggggttggggggggggggtttttaaaaaaattttttaccccccgttttcctttttggggttgggttcagtttttaagcggccccaggcccgggtttttttttttggggccaagccccccttttaaggtttttttccggccggttcttttcttgggggggggagggtttttaaagccccttttgttttggcagggaaaacaagattcccaacccca

SEQ ID NO: 681013 - DNA, 91 bp, Homo sapiens
  misc_feature (47)..(47): n is a, c, g, or t
ccttcttttttctgtttgtttttagataaaaattttgatgaaaaaantgaaaaaattctaataaaagaagaaaaatggtaaaaaaaaaaaa

SEQ ID NO: 681014 - DNA, 142 bp, Homo sapiens
cgtctcgatcgcggagaatctcctgggaatgttgcttcttttgattttcctgtcctcctctccttcgttggatctgtttctctgtgaggaaacacttctgcgtgaaatgtttcgcctacggatctgaattctttctccacag

SEQ ID NO: 681015 - DNA, 789 bp, Homo sapiens
caagcaagaattctgtatttgtcaaaactgttaaagaataggggcactcaaggggacattaagatatttccagataagcaaaagctaaaggagtttgttactaatagatctgccctacaagaaatgctaacgggagtcctccaggctgaaataagatgctagatggtaattgaaagccatatgaagaataaagaaaactgatgaaagtaactacatagaggttgaaaggatggaaaaagatattccacaccagaagagagctatatagctgttttattatccaaaaaaaccaggtttaagtccaaaagggatccaagagacagaattatatatatgtaaatataagatattaatctttcagaagatgtagcattataaccacatatgtacctaaccacagaatcctatatattagccaaatgaagactggagagaggatagcagtgtacattatcatttgagactaagtatcacttcatatgattagcacacagagagatacaagagcagaggatgacagtcatgaccactgcacctagcagatatgtacagtacactcacacaaagatacacatctctcaaagtggcccatggaacaagtctcccagatagaccatatgtttgatcacaaaacaagttttatacatttaaaaaagattgaaatcatacagtgtgtcttccctaaccataatggaatgaatctggaaatcaataatagaaggaaaattggaaaatacacagatatgtagaaattaaataacagagtcttgtacaaccaatggcttatag

SEQ ID NO: 681016 - DNA, 1208 bp, Homo sapiens
ggtcctcagaggatgcctggagggtggagtgaatacactattgtctgcagcctaaggcgtgagcgggctggggaagctgcagtaccttctctcgcatacagcactcgtagatcggacggccggcgtcattgcctgtgtggtctctaacgcgggtgtgcctgtgcaagtttccccagagaactgaaaacactcaggggtgggccaggagtgcccctgtccccagaaaaaccctttgcatgccgtgacggtccagagcatgtggatgcaggagatggatgtgctggcgtactgactcatctgaggcagctctcttttctggaacgtgagttccagcggatggtctggagatcccgctggcaggatgacgaggggcaggatgttgtctggagggatcactgtgaccgtggtcagaagcgagggacggggaccgagaccctggcacaatgcaggacagtcgctggcacacgaccacatgggagaaggaggggcatcatcgcgcgtggctcgcatacagtaccacgagacaaggacacagacgaacttgaacgagcagacgaaaaccgaaggcagcatcacaccagtaaacatcggggaaggaaggcaagcagagggagcaacatgcgaggaagagtcctgcgggcagagcagcagccgacaggagtcggagggctcccaacgccccggggatactaccatcgcggagcgcactcgtggccttggttcgaaaggactggagagtattaacgcaacacgaaccaacaggggggccaagaaagccttgaccttcataaggcctggacacaacaaaaccatgggggcacgcacggattactacacacgagcagggaagaagattccaaagcaacagcagctcaagggtttcgcaaccacgggggcgacgggggcacaagcaaggatgacatggcggggaaaagatcaaggaacaacacttggtagaacccaaaggggaccaacaagaggttctgacggggagccacgattgaaaacgcccgtcaggaaggggacccaagagacggaaaacggggaaaggcgaagaaaaagtactggaggctaaggaaagagccagcaagagtaacaagcacacaaaacttgtacagagcaacagagggatcagcaagagaacacggggatgagtgagcagaacctatacaaaaaacgcacaacagatggggaactgagaagaaccc

SEQ ID NO: 681017 - DNA, 521 bp, Homo sapiens
cctctgaagaaaatcatggaagcatgtgcaggcggtttttcctccagtgttggttacccaggacggcaatactactttaatagttcaggcagctctggatatcaggattattatccgcatgcaggccagatcactatgaagaagcacccaggaactatgacacgtacacagcaggactgagtgaagaagaacagctcgagagagcattacaagccagcctctgggaccgaggtaggagtcttgcgcccttcagttattttaaagcatacctcatgtggtaaggtagtctgaaaaagagctatttgttgctaattaaattttaaacagttcagaaataggatatgtagatgtaatatgtgtgcagattgtgattactaagtatggggtgtgatgccttattcccagcaacctaagcttattgagtgccagactgatgtatgtattgattaagatagagatctaattttattcctgctgtactagaagcttttgaattaaagaaaagaaacttataattctta

SEQ ID NO: 681018 - DNA, 806 bp, Homo sapiens
  misc_feature (420)..(420): n is a, c, g, or t
  misc_feature (490)..(490): n is a, c, g, or t
  misc_feature (672)..(672): n is a, c, g, or t
gtgaaggcttgcaggacgtactggatagatgttattcgactccgtcaatgtactttgaactacctgactcattccagcactacagaagtgtgttttactcattatgaaggaacagcacatcagctgcgtcctttacgtggacaataggtactttactttgacggcgacaagtcttcacctggcgttacagatgggagtcatattcccacaataagcagcccttagtaatccgagagatgtgattcctgcaggcaggacctataggcaagtgaagatttgaatgaaagtacagttgcatttggaagcccagacataggatgggtcagtgggcatgggtctattcctattctcaaaccatgcgcaggggcaacactgtgtcgcatgtctgaagacaagtggaccacacgttacgtgtgacancgtacacataacatgtgcagcacatgccgggagtgatcagtcagacattttaattcgaaccacgcatgtntgggtagctgcttgctcacggatttcattttgcaggcatgtgtctgagcttgtatacctgctcaaggacattgacatctcatgagtgtagctcatccggtgttaccctggtttgaatgaacctaacctcattcgatgtgtcttcagtgttggcttgatgtaactgatccatctagaacacangaagggtacttggctgaggattgtatatacaaccaccaactgatgttgcaattggtaacccgcttgactgctttgatagagaagcccaggccttagcctcaataggtgcaagacttaggagaacacactgaagc

SEQ ID NO: 681019 - DNA, 244 bp, Homo sapiens
tccacttcattttaacatgtttcttgcacaatctgaacttaatcctgtcgcttaggctggagtgcagtcctgtgatttcagctcactctagcctctgctttacaggctcggatgattctcccacctcagccacccaagtagctaacaccacaggtgtgcaccactaatgcccagctaatttttgtatttctgtagagacgggtattcatcatgttggccaggctcagaagtgcaggaaacaaga

SEQ ID NO: 681020 - DNA, 224 bp, Homo sapiens
  misc_feature (59)..(59): n is a, c, g, or t
  misc_feature (118)..(118): n is a, c, g, or t
ctcatgagagtgctaagataacgttgcctggcgatgtgctcgcagcacacacgataccncactgccgcgcatgattgtctcagaccgcgagcatacaggtcactcatgtgactcgtanatcctcctgtcgcgagtcctgttgccactgccaccctgctctacactgacacagagccaccatacgcgatcgtacagtcctatcctattcctctcagtacatcatc

SEQ ID NO: 681021 - DNA, 867 bp, Homo sapiens
ggaatttatataggccgcttcatagccccacaatttgtcccactttttttggtggttgtacccctgggatgggttattaatctcccccccaatatttttttgaaggggccctctcccccatagattctctgcgcaaagacaattcctgggccccaaatatatgatccgaatccttgggcttctgggtatgaatccctcagaaggggtggcttaagacaacagatgtcttgggttctccaaaccggactttgtaggatgagtccacaccacccaagtggggcacacaaccacgcagtctctctgtaagtttggaacctcgtctgaggtcgacggcttatcagatgctgaggaacgttcacgtcccgtccttggggatcgacctgtggctccactgagggaatttgtgaggcccgcctctggaggtatcaccccttatgggagggtggagggccccgtatccccctttcaagatggggcacgctccaacggggtcctttctgcacaccctgatgtcacgagcgtggcacaagaccacgggcaagagggacatgctcccggccccaggaggtatgaggcccctgctgaacatcagagggcaaacatggagggctgaggagtctccacctaccacgccgcgctgtcgtggaaaatcggcgagggagcactttaatctattggggaatgcccttggagcagcagcaaactcccatgcccaaaccatcccaaaggcccccaccccccggattttggatggcaaaatggttttgagacccagacaacccaaaattttggggcatttaaccaccagaaccagggtaaacctttggggaacaagaggcccaattaaaagttcagagttcattggga

SEQ ID NO: 681022 - DNA, 787 bp, Homo sapiens
  misc_feature (41)..(41): n is a, c, g, or t
  misc_feature (44)..(44): n is a, c, g, or t
  misc_feature (55)..(55): n is a, c, g, or t
  misc_feature (134)..(134): n is a, c, g, or t
  misc_feature (379)..(379): n is a, c, g, or t
  misc_feature (382)..(382): n is a, c, g, or t
  misc_feature (387)..(387): n is a, c, g, or t
  misc_feature (397)..(397): n is a, c, g, or t
  misc_feature (401)..(401): n is a, c, g, or t
  misc_feature (404)..(404): n is a, c, g, or t
  misc_feature (417)..(418): n is a, c, g, or t
  misc_feature (484)..(484): n is a, c, g, or t
  misc_feature (511)..(511): n is a, c, g, or t
  misc_feature (548)..(548): n is a, c, g, or t
  misc_feature (566)..(566): n is a, c, g, or t
  misc_feature (578)..(578): n is a, c, g, or t
  misc_feature (602)..(602): n is a, c, g, or t
  misc_feature (611)..(611): n is a, c, g, or t
  misc_feature (613)..(613): n is a, c, g, or t
  misc_feature (623)..(623): n is a, c, g, or t
  misc_feature (629)..(629): n is a, c, g, or t
  misc_feature (633)..(633): n is a, c, g, or t
  misc_feature (638)..(639): n is a, c, g, or t
  misc_feature (769)..(769): n is a, c, g, or t
gggcggcgttgcggccgcaggtttgactcccgtgctggtgnggnccagcagccanaaagctcccgctgccattgctccctgtactcccgccgtcactgccgctgtccaatcccctcccccggggcttgcgcggnggctcccacacccctcggcccgtgtacgcgctctgcacctgcctgcccgaaaacatgttgcagacaccagagagcagggggctcccggtcccgcaggccgaggggggagaaggatggcggccatgatggtgagacccgggccccgacctgcctcgcaggagcgccccaaggaggagcttggcgccgggagggaggagggggctgcggagcccgcctacacccgggaaaggcgccgagggccttgncgncaaanccttggaaangcgnagngcctaccgccgcnngaatcggacggtggcggagttggtgcagttcctcctggtgaaagacaagaagaagagtcccatcanacgctcggagatggtgaaatacgttantggagacttgaagattctgtcccggacatcatcgcangggccgcagagcatctgnggtatgtctggntttgagctgaaacagtttgaccgnaagcaccananttacatcctnatcaanaaantaaannctctggaggaggaggaggaggaggatctggaggagatggcccagattgggtctgtaatgatgatctgggcttatctatatgagaggtaatagcgccaggaggccaggtctgggagatgctgcgtcggttngggggtgcaacctctaaa

SEQ ID NO: 681023 - DNA, 1665 bp, Homo sapiens
  misc_feature (341)..(341): n is a, c, g, or t
  misc_feature (406)..(406): n is a, c, g, or t
  misc_feature (548)..(548): n is a, c, g, or t
  misc_feature (1427)..(1427): n is a, c, g, or t
gtagggaacagcaagcgccttacgagaggcggcaacatagggagcctagagaagtaaagtggttgaatccagttgttcgtaacgaaagcattgggtgtgagtgtggaaagctaccctgctctagtggttctgcaattagtccagagacagtacttggcagaagacgctgtcggtgacccagtgactccaatggagacccacaaagtcgcaaatctggatgggtctgtcgaaggcgtatcgatggtgctaggtgcagaggtggaggtcttcagagctgtgaatgtataggcaagcaagtggatggcagagagttgactcatatctgagaacacacaatgtcnaagggctgaaatgtcactgtgggagaggcatggtggtctaggggcattaagagacacttgacgcntgggatcgtgaaaccctgtgcgccactggtgccagtgtggcactcatttactccgtgtagcacgtgaatagcagtgcctgggtgctcccctatggaatcgaatataggatacattggtccagctaagaaactggaagtctgnagaggcgtccaacggtgtcgcagtgctgcagtggacactcacacggaaatagaggtcataccgtataggcatatccgcgtacttggattcccttggttggtttgtggcgttttgtcaccgtaccagaagacatcggtcaaacaaacgtccagggattgagccgaatacgtaagcactatctctcagtagacttccaaagagattgcaaaagcaacgaggttcgtctggctcggaagatattccccggggaggatctggacaccgtgaccttgaactggcgctacaccactctaattgtaactcgccggaacgtaacggggattggcatggaactgaacatttcgcgacctttttggataacgaacatgctctgggtgccaaaccctacacaatttgtggaaattacccaaagaaaggaagggcgacttgtggggaacgagagcgggactcacctcagggtcaccaaagacggtggtccgtttggcgccacaagacttccgtagagtatcttaagtcgaccttgcattccccgactgggaagatgtggtgtcgttctaccggaattactgagcaacacgagagaagcgttcacacaccacaattggccctgggcaacagagtgaacagcccccccaacgggtttttgtgggaagattccggggagggtaaaagcccttctcaatggcggagtccatctcaccagtgagtctggcaaacggggcccccagttcatgatttcactggggcgaaaaaacaaccgcgccagacatggcgcccgcaaaccgacagacaacccggggggcgcgccaacagaggtatagaaccgcaagcgactgagctgtgggaatataggcaacgcgcaaccacagcgcgcccaanagaaacaccgcggtcaaacggggtcgcgacactctaaagactacgcggcaacacgctcaagaaggggggcaacaggggaaggggcaacagagcaaacaaaaaaaaagcaccaaggcgcacatatgaggtgcgtagaacgacacggtcgagaagtgcgccgaggcacagggggccaccaccccagccattggccaacggcacaagtcaggcacccaacaagaccactactgaagcagac

SEQ ID NO: 681024 - DNA, 758 bp, Homo sapiens
ggatgagccaggtgtgctggtgcgtgcctctaaatcccagctgctcgttagactgaggcgggagaatgcttgagcccagtatgggagggttgcagtgagccaagatcatgcatcgcactccagcctgggcaacaagagtgagactctgtctcaaaaaaaacaaaaaaaggaaaaaaaaaaagaaatgtagaatcccggctgagcgcaggggctcaggcttgtaatcccagcactgtggggggctgaggtgggcggatcacctgaggtcaggagttcaagactagcctgacaacatagtaaacacggactctacaaaaaatacaaaaagtaggcgtggtggatgtgcaccggtagtcccagatactcaggaggctgaggtgggaggatgctcgagcccaagagatggaggctgcagtgagccaagactgtgccatgccctccagcctggatgacagagcaagaccctgtctcaaaacaacatacataattcggacgaaagaaagaaatggcagaatcccagtccccaccccggacctccgtgagtcagtctgcattagaataagctcctcaggcaattctcactgtgtgtgcgcacgttggagaatccgtggcaagcccaccattgcctcgtggcctaattagcaggccagggttggcatcatgaacggacggcctttctctctatttcccattttgtgttacaggcctggggggtaggagatgaagtttttggcggaatgtctggaggaatttgtcca

SEQ ID NO: 681025 - DNA, 404 bp, Homo sapiens
  misc_feature (1)..(1): n is a, c, g, or t
  misc_feature (20)..(22): n is a, c, g, or t
  misc_feature (40)..(40): n is a, c, g, or t
  misc_feature (89)..(89): n is a, c, g, or t
  misc_feature (92)..(92): n is a, c, g, or t
  misc_feature (94)..(94): n is a, c, g, or t
  misc_feature (103)..(103): n is a, c, g, or t
naaaaaaaattttgttaatnnnaaaaaaaaaaaaaaaaanggaacgccttttttaaaaaaaggggcgccccccccaccaaaaaaatacnttnanaaaaaaaanccacacatactatgacctaatcccaaaaaccaaacagcgcttaaactgtaaaatcaaccaccccaaaaaaaacagaacaaaaaccgccactaacctatcaaccataaaaaaacccattcaaccaaccacaaaacaacaaacaacctaaaactccataaacagcaccccacaaaaaaaaaaaacttaatccccccccccaaaaaaaaaaaacaacagataacaacacaattacctccccaaaaacaaaccattttaaaaaaaacacatacccaaaatcatactccccaatataaaacaccca

SEQ ID NO: 681026 - DNA, 912 bp, Homo sapiens
atgacgctgttccccaaccgttttcctccgagcccctagcaaccccgcgtcctaatactagctacctgactcctacccctcacgtgtcatggcaagccatcgccacttatccagtgaaccactatcacgaagatagaaactctacctcgtctatactaatctccctacaaactctcgcttaacttataagcagttcacagccacagaactaaatcatatttcatatactctcttcgaaagcacacttatccccaccttgccctatcatcacccgatgagggcaactccaggccatgcatacgcctgatactgcaggcacatagtttccttattctatcggccttagtaggctcccttcccctgactcatcgcacgtgtgcatttacacgtcatcaacagcctaacgtgattcgctatagcgattctactactcactctctactgcccatgaactatcggactcctgtagcctagtaacgttcatgagtggactaggcttacacggatgagcgttctatagtactagatacctcttttcacggactccagttcattgactttccttaacagccccaatgttcgtaaaggcccgcatcggtggtgtcagtatgtactatgccggcagtactcttagaaactaggccggctatggatataatagcgccttcgaccactcatgtctcaaactccctgtactatcatcacgtatgcctacccccgttccttggttctgatcgcctgatgaggctataacttattgacgaagtttccatcttgaccttacggaccaaaccttgaaccctaagaattcgctcaattgcggtaactctttcaactccagccattatttggccttcgtaagtcaccagggcagtactccatttccaaaaccaccctgaaagggtttcaacc

SEQ ID NO: 681027 - DNA, 119 bp, Homo sapiens
  misc_feature (3)..(3): n is a, c, g, or t
ctntaactacgaggactatgtacttcacctacctcgagatcaatcccctatcacgtgaccaaagatggagtctatgtccttgactaggcggccaaggtggacgccactgccgagtacat

SEQ ID NO: 681028 - DNA, 378 bp, Homo sapiens
gcgtaaggctaccagcagtgttggcagagtggaaggcctgcagaggtggtcggtgaggcagcgcggagacgaggtaggcacaccccagccatcacgcaccaacctatcctcctcaggcaccagcatctcacagccccgtccaccgcctcatccaccgagtactccaccatcagcaatccatgtgtctctctcagtgcatgatctgcaacccccggagccccatgacccctaatattccagacccaaatcctgagcacgacgcacgatcccgggactccgggcaccgccgtggtggaccagcagcattccgtggagttcgactccccagactcaggactgccctcctctcgccattcctccgtggcctccggcatccag

SEQ ID NO: 681029 - DNA, 499 bp, Homo sapiens
gtccggggtcggccagagagagtccagagcttctgtgaacctggagctttcctaataaagtgtgctccctgggcatgtgagagtatctacagaatgcgtggtgtggcctcggactcaggtgtgtgcatcctccctgtggacagatggatgaagcggaaactccagacagacggaagcgcggtctatgacgaaggcctagccaggacacagtcgcacgtggagatgtcagcacatgcgggggtatgggagaggctcacgggctcttcgctcattacttcctatgacctgtaagcccccgtctgcttcgagacttcctgcctttgcttcgagttgtcccgcctttccagaccgaaccaatgttcatcctacatgtgttgattgatgtctcatgtctcccttatcatgtggcgcgtgccaccgagcgctcatcagaatctcaggaacgtcacgggtgctcaccggttgcctctcccaccttctggggcacatccgtactggg

SEQ ID NO: 681030 - DNA, 205 bp, Homo sapiens
  misc_feature (13)..(13): n is a, c, g, or t
  misc_feature (16)..(16): n is a, c, g, or t
  misc_feature (22)..(22): n is a, c, g, or t
  misc_feature (33)..(33): n is a, c, g, or t
  misc_feature (37)..(38): n is a, c, g, or t
  misc_feature (40)..(40): n is a, c, g, or t
  misc_feature (60)..(60): n is a, c, g, or t
  misc_feature (88)..(88): n is a, c, g, or t
cacccccccaacntgnactggnacacagacccnaacnncnacacccatcaccaccaccantacggtgaccccaacccctacacccacnggcacacagaccccaacatcgacacccatacaccaccaccagctacgtgtgaccccaagcaccacacacccactggacacacagaacccctaaccctgagcacccatagaccaccac

SEQ ID NO: 681031 - DNA, 154 bp, Homo sapiens
tctagaggatccctcagacagctggaccccccgtacacctaagactttgagtattcccggaagctgcccgggtgtcatgggaataacgccgccagatcgctgttcgcagtcgtatactaggtcggaactactgaccggtatctagatcgtcttg

SEQ ID NO: 681032 - DNA, 405 bp, Homo sapiens
  misc_feature (392)..(392): n is a, c, g, or t
atggtcgtctctagcaggatcccctcttctccgaaaggcaacatgaggagagggctctgcagcctgagacggggcctgaggactgtgcggaccgagagctacgcagacgcacttcagtgtgcttatagctcttcctgctggaggaggaggtggtggtgtacttgatggtggaactgccgcctccaagcagagctgaggccacccccaatggctcttgccactgctggaactgaagccacctccaacagccaagaccactgccataggagtagctgcttcctccacccaggcctagagccactgccgacaccactggcaccgccatagccactggagacggtggactgcaccacagagatgttgcctttcggagaagaggggatgctgctagngtcgacctacaag

SEQ ID NO: 681033 - DNA, 625 bp, Homo sapiens
  misc_feature (4)..(4): n is a, c, g, or t
  misc_feature (248)..(249): n is a, c, g, or t
  misc_feature (269)..(269): n is a, c, g, or t
  misc_feature (272)..(272): n is a, c, g, or t
  misc_feature (274)..(276): n is a, c, g, or t
  misc_feature (278)..(278): n is a, c, g, or t
  misc_feature (281)..(281): n is a, c, g, or t
  misc_feature (287)..(288): n is a, c, g, or t
  misc_feature (297)..(297): n is a, c, g, or t
  misc_feature (308)..(308): n is a, c, g, or t
  misc_feature (320)..(320): n is a, c, g, or t
  misc_feature (323)..(323): n is a, c, g, or t
  misc_feature (325)..(327): n is a, c, g, or t
  misc_feature (330)..(330): n is a, c, g, or t
  misc_feature (336)..(336): n is a, c, g, or t
  misc_feature (346)..(346): n is a, c, g, or t
  misc_feature (351)..(352): n is a, c, g, or t
  misc_feature (358)..(358): n is a, c, g, or t
  misc_feature (366)..(367): n is a, c, g, or t
  misc_feature (378)..(378): n is a, c, g, or t
  misc_feature (383)..(383): n is a, c, g, or t
  misc_feature (389)..(390): n is a, c, g, or t
  misc_feature (392)..(392): n is a, c, g, or t
  misc_feature (469)..(469): n is a, c, g, or t
  misc_feature (477)..(477): n is a, c, g, or t
  misc_feature (512)..(513): n is a, c, g, or t
  misc_feature (517)..(517): n is a, c, g, or t
  misc_feature (532)..(532): n is a, c, g, or t
  misc_feature (549)..(550): n is a, c, g, or t
  misc_feature (616)..(616): n is a, c, g, or t
gtgnccccacagagtcttccaggccagcaggagcagcaggccccgattcccggctccctgtggcccagggtgcgtgagtctgggactcctggccctccaggcccctcctctcccagagaccctgatgcagcttgtgagctggaccctggagcccagctgccccctggatgggtcccaggacggctgaagccagcgggctcagggccgtgtgcgtcatggcctcggggtcctcccatctgctcctgggnnatggggggggttggtgggtnagngnnngnggngggcgnngaggggggnggggtgggggngttagtgatggnggngnnnggnggtggngtgggggggnggtgnngtgggngtggaggnnggggggggtcnggggnggggcnngngggggggggggggggggcgtgtgtgtgggggggggtgggagaggggggttggtggttgggggggtgggtgggggggngggggggngggggggggtggtgtttgggggggggggggggtgnngtgnggcgggtggtggggngtggggttggggcgtgnnggtggggcggggtggtggggtggcggtggtgtgggggggtgggggggtggggggggaggggcccgnaagtggccc

SEQ ID NO: 681034 - DNA, 419 bp, Homo sapiens
atggtcgtctctagcaggatcccctcttctccgaaaggcaacatgaggagagggctctgcagcctgagacggggcctgaggactgtgcggaccgagagctacgcagacgcacttcagtgtgcttatagctcttcctgctggaggaggaggtggtggtgtacttgatggtggaactgccgcctccaagcagagctgaggccacccccaatggctcttgccactgctggaactgaagccacctccaacagccaagaccactgccataggagtagctgcttcctccacccaggcctagagccactgccgacaccactggcaccgccatagccactggagacggtggactgcaccacagagatgttgacttgtccaacgccttcgccattcagcctgcactcctcaccctccagcagccttgc

SEQ ID NO: 681035 - DNA, 194 bp, Homo sapiens
tccgcaggtagagctgcccctctctgtcactgacttccattcttatttctaagtagtcttcactcataccacttctgcgattctgtttttcactattgtagtttatgaaatagggactacttttcagccgggttcggtggctcacgcctgtaatcccagcactttgggatgccaaggcaggcggatcacgaggt

SEQ ID NO: 681036 - DNA, 554 bp, Homo sapiens
  misc_feature (10)..(10): n is a, c, g, or t
  misc_feature (64)..(64): n is a, c, g, or t
  misc_feature (108)..(108): n is a, c, g, or t
  misc_feature (110)..(110): n is a, c, g, or t
  misc_feature (129)..(129): n is a, c, g, or t
  misc_feature (173)..(173): n is a, c, g, or t
  misc_feature (370)..(370): n is a, c, g, or t
  misc_feature (453)..(453): n is a, c, g, or t
  misc_feature (460)..(460): n is a, c, g, or t
  misc_feature (479)..(479): n is a, c, g, or t
  misc_feature (538)..(538): n is a, c, g, or t
acaaaaaganccctttcaattcaaatacattcctcatttacagattaaacataaaacatcaccnacagtcgccaagcatatcgcacatcacagacaagcatttgtctntntccgtaagtcttcccagantttccaactttatacttttttttgtaaaaagatttacctttctnatgcaaaaaaaataaaaatgcagccggtgtttggctattaaaaactaaaacaaaaaaacctttaaaaatattattcctctgccttgcagaaagaaggaagagggtatagaatcagggagtcccacagggacttgaaatttttaccagattcacgtccagattcaagcgggaccctaaccctgacccctgtaaaaccngggacaaagggcccagcgcgtcccacccccccgattccccaaggggtccctgcgctgcaggaagaggcactagaataggagcnggatgcngggaatggacaggaaaccncaggattctctcctaaagtccctgcccagccaccctgtcgctaaggtaatcactcagcnctacctctccaccagc

SEQ ID NO: 681037 - DNA, 994 bp, Homo sapiens
ggggagcgggatggagcgggcgcgcgggccggaggcgaggccgactgcgcctgaggaggaggagtgaggcgggggcggccatggctgctgtggtggtggcggcctgcgggtggcgcgggaccggcggtcctgcatggtggccggtctctaccggggctgtgcgcggtgcgcagccggcccctgggcctggggctcgtgtaccccggcagcatgagcagtctacccaagtggagccacggggatcggggcaggcccgaaggggggcagcctgacgggaagcgggggtcaggggccgaggggcgaagctccagggccaacgccctttctacgaaccggtaacgagaacaaggatccagctgctggggcaagggtcagaaccccaggcgtggctttaggcaagtcgcggccctggaagaaaagcggccggttggaatttcgggaacagcaagcccatgttgggggggcattacccagggcgaagggtgaatttgttcacttcacgactggtggtggacaacaggaaagactagtatggcattgggggaaaaccaggtctggtgaacacagaaggggattacacgattaaagggggaccgagagatgttctacaaagtcacagagttttataaaactatttggaaggatgggtaaacagaaagagaaagttggcgagatcgaatgttagagacaaggatttggggcaagcaatcaatttgtggcaagcaaaacaggaatcacatgtcctacaacgcatgtgattaacattggggcagaaacgttgggatgtggatctgggaacggggggctacagtcctggtaccaaaaagtgcatatggtgggcttggcaaggaaaggtggaaggggataaggagtttaatggaagagagaaagggacagggttactggagcttcaaagtatagatggagttttttaagtttcgaaggacagagaggtgaagattgaggcaggcagagtgattatatatcaatgacc

SEQ ID NO: 681038 - DNA, 434 bp, Homo sapiens
ctctctaccatgcatcgctggaacggtaaagagtggaacaggctcatcactatgtagaatgataacgaaagggagaaagtggagtgtagggaggggtgtgctacatatttattaaaccaccagtatctcatgttgaactctgcagagtctcaccatcaatgggatcgcccaagtcattcatgaagaatctgctcccatgatccagacacctctcaccaagccccaacttcaacactggcaattataatttaacatgagatttggtaagggtatactttctttcttttccttttctttttttttctttctttctttcgttctctttctttcttcttcttcttttttttttttcccgtaggggggaattggtcccattgggttgctttgaaaagtcctttgggggatttccgcgtttttgacgcaccttttatttg

SEQ ID NO: 681039 - DNA, 435 bp, Homo sapiens
gttttcataattttagacggtgtgagatcacaagattaacacaaattatttttgccgcctaaactttcaaaatcgaaacagcccgtgacaaaaaattcgacggattgattgccagtttgatgccggctaagattcaagttttttttatcaagctgccctgaaaaatagcagtttgttccgaccaagtgttctaaatccgaacatatttttatttcattattttttataatttcgtaaaaacttttattttgtttaacttaaccgggaacgcttacgtggcacgttcattgcttaatagtattccaggctacaaagctcaaaatatcaaggaggaaatttttatgaataacgatggatcaggaacagttcgcgaggaagcttcggcaatcggcgacagaatcgaaggtaatgtaaaagacgcttacgggtcgacgc

SEQ ID NO: 681040 - DNA, 1136 bp, Homo sapiens
ctgtcggctgtaattaaatttggttctgatttgtcacaacttgtgtgtttcgctctctgctatgtcccctgtgtaagctacggttgcatgttccccttctttgtgtgcatttctcgctgtgtcctctgtttacattcacgctctaattccatcacccatttttggtgcgtttatctatatgtgttcttcacctcatcgcgttgttcccttgggtttatatgtttgttaatgactcttactctattgaatggtctctctcgttccccatttgctcgagtgtcctccctctagtggtgttcttcccaatgctctccctcttttcctaccccgcaatggtccctcaggtgcctcaagtgttaatggggccccatggccgataatccggtccggtggtgctgtatcgtctatcctttccaatccgttgcttggtggggtcgctgtgttacatcgtgttgtggtcatcccttcgcgctaaggtgtgtttgttgggaatcatctcatgtgtgtatacggacagtacttctatactcggctgcgtcactcgtgaacacacattggtgtctttgacgctttttgtacaagtctccttgctcctccgtacggttggtgaatctatggctctcaagatgctcttgtgtcttgtctctctattctactcctggctctcctatctcctaattccatatgtggatatgatatgtgatgtgaattgctttgcgaacttgtgagtgcaccacttgaaagccagactggtcaatgatgggtgacagcttcctattcctcgtgtgtacttcttgtccagttccttttagaaaaacaatggatgccgcatgaggacctcccaacctctggctatggggtcaagaaacagccagcaagagttaggggccttagggcactgggctgttgttccattgaagccgactctggtcctggccctgacttgcttctctagctctcaaggcctctccagtattgcacctgtccccaccatccactcagcctgtcctgcagcaaacagctcacaccctcgcacctgtccatgttcccaaagctactgcagcacctcaaggcctgttgatataccgccctacctgatgtcaaaacaagggtgtttggggggcggctgtgtgttg

SEQ ID NO: 681041 - DNA, 224 bp, Homo sapiens
  misc_feature (191)..(191): n is a, c, g, or t
tccttcatcatacctaccttccttccttctttctttctttctttctttctccttccttcctttctttctctctttctttctttttcttttgagacagagtctggtctgtggcccagcgtggagtgcagtggtgcgatctcggctcactgcaacctccggctcccaggttcaagtcattctcctgcctcagncccaatgagcggctgggattacaagcgcacgca

SEQ ID NO: 681042 - DNA, 325 bp, Homo sapiens
  misc_feature (15)..(15): n is a, c, g, or t
ggccagaactttatnctaagagacttgaagctgggtgtgacggtgcacgcctctggtcccagctactcgggaggccaagacagaaggatcaccttgaggccaggagtttaaggccagcctgggcaacatagcaaaacctagtccctaaaattaaaaaaaaaaaaaaaaaaaaaaaaagggaaaataaaggagacttgaaatttttgaactaaatagtggtgatggctacacattgtgaatgtaattaacaccactgagttaaacacttaaaatggttaaaatggcaaattgtatgttatacctattttactacaataaaaagtat

SEQ ID NO: 681043 - DNA, 266 bp, Homo sapiens
  misc_feature (33)..(33): n is a, c, g, or t
ttcaacggagatattgtcagtacaagatctagnaatatgcatataacttgacagcttgtatagaaaacactctaaagttccagaactgtaaagatattgtctgtgagtataacagaactgatgttgcaggcgaaagcctgataaaaatccaatcggaaagtgccccatattgtgaaagcgctgcgttccaatgaggccctattgagctgtgaatgtgctatcaaccagcttacgctttctacgtataccccaatgtgtctacagaa

SEQ ID NO: 681044 - DNA, 523 bp, Homo sapiens
  misc_feature (414)..(414): n is a, c, g, or t
taataatgctgagtaaaagcacaccaataaaaaatttgttttttaagacggagtctcactctgtaacccaggctggaatgcagtggcgtaatctcagctcactcactgcaacctccacctcccaggttcaagcgactctcctgcctcagcttcctgagtagctgtgaccacaggcacacaacaccatgcatggctaattttggtatttttagtacagatggggttcaacatgttggccaggctggtctcgaactcctgacctcaggtgaactgcctgccttggcctcccaaagtgctggaattacaggcgtgtgttaccatgctctgccaaaaaaaaatttttttttttggagccggtgtctggtccttgtggcccaggctgaagtgcattggctcattctcagctcactgcancctccgccgagaaggctctcttttggtcttggcccctagctacggatatggcacccacggggcaggatacttactgcgtattgaagagaaatcccagtttcctatccgg

SEQ ID NO: 681045 - DNA, 377 bp, Homo sapiens
tagatccccatacagagtatcgctttaaaacatatacgttgaccctgaacaacacaggattaaactgtaaggtctactttatatgtggatttttttcaataaatatattgaaatattttttggaggtttgccaacaatttgaaaacacttgcggacaaaccaaaattaagaaaaagagttgtcatgaatgcataagacatatgtagcctatcttatgatttactacgataaaatatacataaatctattaataaaaagttgagatttatcaaaacttatgcacacaaactcttacagaccgtatatggtaccattcacattgagagaaatgtaaacaaacgtaaagatgcacacggtactctgtatgggggatctcg

SEQ ID NO: 681046 - DNA, 756 bp, Homo sapiens
aatgaagcatcttgaagcgggtggcagctccaaagcattggatgctggataataatttgatccggtgtgtttgataacaacgtccatccagcgttccccacaagtggagagagtgtctccccctcatcattcacctgaggaaccagacgttgagtatgccctgagaggacgactgaaggtagggaagagtttgcatgcatgcggcttcattaataactcgatggcaatggtccggagacgtgaatataacgcgtaccccgtgctgccctccactggagtgtcatcagcatttgacgaaggacgggagagaattttccgtctgactctagtgacaccaagggttcgctttgctgtaacaatcgtattacacctgagagaggccaaagtacaagtttgtgcaaaggtgaggacacagatctatatgtggcgccacgaagagagggaatacccttcatctggtgacctcatgatgtccgcgaaccatggcggtaccccgatgcccctcattcaaggtgaatgataccattcagattgattaagagactggcaagattactgatttcatcaagttcgacactggtaaacctgtgtctggtgacgtggcggtgctaaacctaggaagacatcgctgtgatcaccaacagacagcaggcaccctggatctttgacgtgcttcacgtgcaagatgccatggcaacagttttgccactcgactttccaacattcggttattgggcaagggcaatcaaaccatgt

SEQ ID NO: 681047 - DNA, 228 bp, Homo sapiens
taaattaacctttttttagaaaaaaaacaatgtatattatgttcctgtgtgttgaatttaaaaaaaaaaatactttactgggatattcatggtaatatataaagggtttgggtggaaatggaactttagttaggaaaaagctgggcatcagctttcatctggtggtaagtggacaccaaggtgtcataatattctttatttggggaaattagtggtattttataaaaa

SEQ ID NO: 681048 - DNA, 132 bp, Homo sapiens
atgtcttacgtattggcacactgaggaaataacacacgatctgttgtcattgtttaacaggaagatcacatttgcaaaagagattctgaggaggccttaggacacaacttgcttataggttttttttttttt

SEQ ID NO: 681049 - DNA, 1032 bp, Homo sapiens
cagagcggctgctatcggtgcggcgaaagaggggcactggtccaaagagtttccgactagcatcgtctcaggccgcgctggccagactcgaccgcagacaactactaactgcagcaactactggacgcagctgcagtacagccattacaccatgcagctatggggcattcattgctacttacaacaacgcgctacggagcgctcgatgcctactacaagcgctgccgtgctgcccggatccgtatgcagacagctgcgcagcctgccagcctgcgctccgctgtactaacttacgcagagcagaccctgtcccagctgccacaagctccagcaatacagccatggcccagctcaccatcacctccacactctctcgatccctacgatagacacctgcttgccgacctcaggcagctgcctgccacagcctgcctgctgccgcacgcacgccgctgctgctgctcacctgcacgcttccacttcatattacgggcgcggatcggacccccctgcgtcgcgctacagccccagctccccacctgtcggacgacgggctaccggttacgcggcctgcagacgtgcagattgtcccagagccttcagcagcccagcgcgacaacttctcctgtacgaccttggcccggctatgagccgggacccagctcatgccgcatcgggccgcggcactcagccttcttcaacgctgcgcggctggcactgtgtgtgggctgaccctccgcgctgcgcgcatgcgcactgcagaacataccccgctattagacgggtacgccccattctcgcgagcacgacactcacacacctgcgccgctgcaacatccatacaggacacccaatgcaccctcacgttaacccctttgcataacgattctaaacattcctattccatatccatttccccttacatctccctttcacaacatatcactagtacctcatgaccttcacataactactttaccacccactccacgtcaacattcccacacagcccacagcgatcacacactccta

SEQ ID NO: 681050 - DNA, 287 bp, Homo sapiens
caggtacggatcatctaagcgcatgacagtaagcatgacctagctttaaaaggacggcccacgtgccatcccagacgagtcatgaggccccaatggggttttactccgtttctcgcagtctggaggggcagccatgaaaactccaagcgccccttggcataagaaggagatgccccagactctccacgtccagaaactggtgggatctggctcatggggaggggcagagcggcagtgataggacttcaggtgagcccaaggggctgggggaacagacccagctactg

SEQ ID NO: 681051 - DNA, 265 bp, Homo sapiens
cctggtagctcaggtctgcctcataaaagccctctttgaaaataaggaagtacaggctgaatatccctaatccaacaatcccaatctaaaacttttccagtgtcaacagtatgctctaagaagcattttggattttcggattaggaatgttcagctgttaagtataatacaaatattccctaatctgaaaaaatctgaaatctgaaacacttctggtcccgagcattcatttctttcttttttctttcatcattttttttttttt

SEQ ID NO: 681052 - DNA, 991 bp, Homo sapiens
gaggaacgagatggtggtgctctggaggctgagtgcccgttggctgtgccctaggatgccgatgctctgttgactatgcgaactccaggtggctcacgtaccgtgctcatgatctcagcgatttcttcagagaccgagctatcccatagagtggtgatggacgatgcgagcatatactaactggtacatcgatgcctatcattgcatggctctcataggggtgcatgcatttccagctggtacatacgtcggtagagcggatcagtacaaagctcgttggtatgcatccctgtgtggtactgctttatgctcgcggacgtagcttatacttgtgaaagttaccgcttggcttgcatgcggaatgtgatctaaattcctcatggtcatgacttgctccctgtcaactcgttcagtaggtgcaaactggagtgtctctctgagcactatacgatatgtttaggcatgaactactgttactaatggggagatgctctgttgcagaaacccgctgcgcatagggcagaggtactttgtgagcactattcacgggttatataccgtttcagcctgagtgcatgttgggtactaatccaagttatcaacgttatgtggagcttatcatgtgacatgctgattgccatggctgtggatagtctctgatccttgtatggacttctataacttatggaggaagtatgattgtaatgacctctattgccttctgcttggtccatgccagttaaggctcacaaattaaggaacgaaattaacaggattaagttccattggtgggacagccttcgttctctttaattcacgaagaattattttccagcaattttacatctttgacggaacaaaggtttggagagggacattatatctaaagtttgtgaagacatgagttgctatattctgggtgagttcaatgggggttgggataccaggttctttataagcactcacgagggtatatattaagcatgatgta

SEQ ID NO: 681053 - DNA, 572 bp, Homo sapiens
  misc_feature (21)..(21): n is a, c, g, or t
  misc_feature (36)..(36): n is a, c, g, or t
caacttgttcggccaagacangcttctattgttccngaagattggcaggccacgccttacggcagccaattgggaagaccccgttctggggagtagaccccctctgctgtgtgtgggagggctacccttggggcttctcagagcctggggtgtggggaccccggccctgcagggtgggatgcagggaagtctttggccgaggcgggcagccagggccccaagtatgaaatctggacgaatcccctgcatgcctcccagggagagagagtggcagctcggaagaggtggggactggcccagcacgtccgcttgccagtgcctgtggggccacgggactgccgggagggagagatgcagcccaggacagtgccagcccagcctccagcaccggcctccccgagggctcggagccagagtcctcctgctgccccaggaccccggaggacggggtggacagtgccagcccctctgcccagataggggctgagcggaaagctggagggagcctgggtgaggaccccggcctatgcatagatggagcagggctgggcagcccagagcaaggcggccgc

SEQ ID NO: 681054 - DNA, 380 bp, Homo sapiens
  misc_feature (85)..(85): n is a, c, g, or t
tggagtctggggacttgagcatgagctcaatcaacgtcgatgggattcggatgtcctcccagaatcttctggcgaagatctgtgntcaccaccatttttccgttgtggagcgagtggactcctgcgactccatgtacagtcggtccatccagggtcaccatgtctgcctcctggtgatagaagggtgagaactctgtctcagctcgacgggaagtgcagtgtactccacggtactgagcaacttgttagaagagatgaaggtgacgctggccacgtgtcgagagatgtctgcgagacccgcaccacccccgccggagcacgctccccagggaccgcaggccctgacgtctctcgccctctcctcagtcgtgttgtacttg

SEQ ID NO: 681055 - DNA, 181 bp, Homo sapiens
ttttttttcccccccccccccccccgggttttggaaaagggttccccccccatcttggtttccccaaaaattttggggggggaacccttttttagggggtttttggacccccctaacccccttttttttttccccccggggcccccccccccggggttgggtcccttttttttttggggga

SEQ ID NO: 681056 - DNA, 1105 bp, Homo sapiens
agcagaggggtttattataggaacattctcaaaccgcaagcggaaaagagtgttccgatacaggtgtggatgtggggagtggagattccaccttcggagttacacagcatttcagaggggccctccgtgccgtggcacgtttctttcttcttcccgttattcaccttaagaccctgtgagaacaccccaccctctgtgtctagggagaagaacccaaaagagaaagccttccctcccgtgtgtggccgtggcttcccatcaagggaacgagtccgtgtgttttatagaagacaagaaacaaggtcgtggtcactttcagaacaggattcccaaccccccaccccaaatttcaatgtggtcgaccggtcgtgagacagccagcttctcaatgtgggctgtgcacaagcgccttcttttcaggtgtgagttcaaaggagaacacgagcggggacaccaggggagcccatagggtgacggatgtgctcacgtgggccgtgggtgctcacaccagacatctcacagtgcctcttcaacattccggtgacaccagaaacttccaggggggtccattacattcccttgagatcgtgaaagtggaaatccgagacacagagggaccgttaagacacgcaggagaacccaggccgagcggcgcggcacagcaccgtgatgggggtgactctacatctccaggctaacatctctaggggcagctctagtaacacaaggaccctctgactggggagcactgggccgggacttgccgaggttaatcactttcacaggaacctttcgaaaacacttgcttgacagacagcagacaagaaccgcgggaactcccaagtgaatcgcattacccaggcaagcgtaagagcgacgtgaccttcaagatcaaccagaaacgcgggaacagacacctactccaggaggcacgaaaattaacaaaacttacagagggcccgtcaggcacacaccaagcgcccatgggacacataagctataaagcggaggggttaaaccccaggagtgcgcctacaatgaggcctacgaaaaccccagaaacattccgtcacacccggggtactaggcgccccaggggcacaag

SEQ ID NO: 681057 - DNA, 802 bp, Homo sapiens
ttccccaacagtgtgaagttagactaactttacacagcacattaaaaaaaaaaaaaaaaaaaaaaaaaaaaaaaaaaaaaaaaaaaaaaaaaaaaaaaaaaaaaaaaaaaaaaaaaaaaaaaaaaaacaaaaaagaggggggcgcgcgcggccagatatttctctcctctcttgtggggtagcgcgctgtgcactagcagcaccattgttttattgtaaaaagaggcgtggcctcgtactgtgggctgtctttattattatatagtagctgacggcgctgggtcgcgcgttttatatataacaaagaactcagcacatgcggcggcgggcgagagacaacgcggcgcgccgcgctgtggtgtgtgcgtcttcttttgtgagagacagcggcgctctctctctttctctttgtctgtgcggggagagagagagagacagcatagtgtgtgtgtgagagagacaatattctctctcatctctgtgtgtaatgtagtttatatatatatcagcagcactctctctgcagcgtgtcgatgcgctatgctgctatcattatcacaatatctctcatcatatcagagcagcagagacatgatgatgatgagagcagcagagcagagacgcagacacacatactcacacagcatgtcatgaatattctacgtagtcgtagttgtcggtcgcgcggcgagagacgagagaagaagtataatatagtagtcgtagatcgcagcacgctactcgtcgtctagaataatcatgatcttacttactgactcttatccttatagtacatgtagaa

SEQ ID NO: 681058 - DNA, 112 bp, Homo sapiens
aggaggaggtactgggagggcttgaaggacaagtaaaagttcaagtaaccaagaaaggggtatctacggggcaaaggtaacagcaattgtcccttcaaaccgggtaccgagc

SEQ ID NO: 681059 - DNA, 394 bp, Homo sapiens
acttagaggatccctcgaatcgacggttctccgttttgattcaataatgaaagaaggtatgtttctctatttaaaaaattagcagtagaaaacaaaacaacaaataaaagtgtcctagctccaatattataatcaatcgaatattacttggcttcagtccataagactgtctcctgcttactctgacctagcacatcccctctcactcaggccacaccagccagactggccttcttgctgttactgcactagaccaagcctgtttgtgtacctctgcctacagtgttttccacagaccttggcattaattacaaatgtttgagaagaaaggaaacagcagtaaaaggctggatcagggtcatgcaaaggcaaagactcaatataaaagcaaagc

SEQ ID NO: 681060 - DNA, 191 bp, Homo sapiens
cgcctagatggctgatgtcgccgagcgttgactattctcatacaaaccacaaagacattggaacatctatccctatttatttcgtgtgcattgtacctgtagctcctagtgcacagttcagagacctccttattcgagccgagctgggccagtccaggcaaccttctaggtaacgaccacatctacgatcg

SEQ ID NO: 681061 - DNA, 1110 bp, Homo sapiens
  misc_feature (1)..(1): n is a, c, g, or t
ncgacgggggagaggaaaacttacgggctaggtagcgaggcctgggttgttcgccgctgctgtcagcgcgtctgaggaggcagcgccgggggcccagccgcccagcccgcgcacgccccagcggccggccggagcccagaccccgcggcgaagacccctgcgcggcagcctgcgttccccttcccccgccggctgcaggagctgccgccgccggcattgagcagagggacggcgggtcccgggagagcccccttgcctcgcgcgcggcttgggaggttcggaaggtggccccggcagccggaggcccctgccatgcgcctgccgccctggccttggccctttcggcccgcggcgcctcccttttccccttccgccttccttcggcgctggctttggcccggggggggcacctggcgggaagccccgtggctggcccgtgccccaattgtggcgccccgtgggcggccctcgctgcgccggcgcttttggcaccgggcggcgctttggctggccagcgccggggcgggggtccccagtgtggaagggccccttcacggggagagcggggcccaccggcgtgggccccccctggtggacgcccctttgcggcccggttggaaccttccaagccgcccgacgctgaggtacaccgccaggacatatcagcgtaggctccagtcagggttaccccatttccgcacgtggcacataggcgaaattttgcacgcgagagaccccaaggaagttccttccttgggtaccttacggggacaagcttcccccagtttcgggccacatgatctaacccctacgccggagtagcgggaaccttagccgaaattctttccggtgccccccgaagagctcaaagcggtctttccacgcaagggtgcttttttcacgagacacgaaaaccggtggcgggtgacttctgtcccagccccaaactcgtctgtgcccgaggggaacaacaccacgacacggggtctcaccaacgctgctccctgctcctgctggagacacgctgagacagggcgtgcctctctcttttgatgcaaccccccaagagacgtgatgaactttcaggcgcaccacgccacgaggaccccg

SEQ ID NO: 681062 - DNA, 426 bp, Homo sapiens
tcgcgtcatattgtttgtcactgtttgattattttttcgcgatgggtctcaagtgactgtacagcacgtgtctttgttgtgacatgatattccttcttatgtctcccttctttgttgttttcctctggttcttcccgggtgtcctcatctgtctgaccgtaagtcttctactctggagtcgcaggtccatcttgtaacaatgtgtcatttctgtgaattcacccaggcgtggataagaaaagttctgaagatgatgaaataattaacacattttttaattcatttaatttttcagaagctaattttttaactagtgtcttagttgaaatttctttttgtgcaaaatcagaaactagtacttgattattttgagcaagttgacttaaagctgaggcaaaagctaatttgcgaacttttttgtttaat

SEQ ID NO: 681063 - DNA, 152 bp, Homo sapiens
acgcgtcgacatagcatttaatcatcaatactgccattggccaagcctccgattaacaccataagacttggatcttactccgcaaattgacggccgctgaacgcagcaaattagttagcatccacaaccgagcaccataacccttagaagaa

SEQ ID NO: 681064 - DNA, 130 bp, Homo sapiens
ccactcttctctggttcccaagatggggaaaaaggggggaccagtacaaggggaaagccgggattttggagtcaacttagggagtacgttggagctgcaagctccacgcgaccaaggattggacgccagg

SEQ ID NO: 681065 - DNA, 376 bp, Homo sapiens
atagggcggaataaaccacacgctcattgtgatgctcctggccgcggtgcagatatccagccatgagaatcattatgccttctaccatatagcccagcatctctcctcagcgtatgatagtattgcacttacttaccccttgaaagtcgggtgtgggttagtgactagcgtcggccagtgaaatgagacaagtggaagttttaagagccaatacatgactcacatacttttttcccctctggtagttgctctgtcagtctttatcctgtaataaggattacaaaaagcagagcacccagccagtccttaatggatctgtaataataataaaaaataaaaccttgttgtataagctactgatatatgggattgcttg

SEQ ID NO: 681066 - DNA, 526 bp, Homo sapiens
ctttttgctatctacagggaactatcatacagtggctccgtggtgtaattaacacacctgcctggtatcatatcaaccatagtactacacctcaagctatcacatccgaagacactatactttgtacgcctggttcacgattttctatcgcagagagctacccccatcaacctcattagcagagcacatgcatgagcacaccgcactgaatgtgcagagatgaatgcaactctcagtcaacacttggacctcacgttttccaccatattctgacatagatgtgatggatgcgttgatatgactgttcaacgagactgtcagagtagccaggtgacagactatcacactgtgtttgccacagcatcacaatggcactatctctgaactctacggcattctgtgtactcaatctagactgtcaataacccacacttggtgtgaccggaccctcacagttacctgcatgtgacaagtttagtgtcagcaacattaaccccttctttactgggtggcttatagccgcgcc

SEQ ID NO: 681067 - DNA, 125 bp, Homo sapiens
cggtacatctttgaagcacggtgaaccacaagtataagatacttctactccctccttgtgcgaccgatcatgcaccccttaccatctcattaaaacctaaccacggtaagccacggtcaacccac

SEQ ID NO: 681068 - DNA, 109 bp, Homo sapiens
cgatccctttaatgaaagtaaacttggtttcagaaaccgacgccctgatttattttgactttaactaacatccagatgggtcatcaccctctcattcaaatgaatacac

SEQ ID NO: 681069 - DNA, 886 bp, Homo sapiens
  misc_feature (873)..(873): n is a, c, g, or t
ggccaaccggagtacgtaatcccagcatttgtgaggccaagtgggtggattgcttgggcccaggagttcaagaccagcctggcagcatggtgagactccgcctctgcaaaaaaaatttaaaaatgtggcagatatggtggcatgtgcctgtggtcccagctactttgggatgctgaggtgggatgatcactgtgggcccgggaggttgagatgtgcagtgagctgtgacttgtgccactgcaactccagcctgggcaacagagttgagaccctgtctcacaaaagaaagatgacacagtaattggttggagtaatgtgtaaaggtccagtgaatgtttatcatggacagttatacgtgataaagccagttaagttttgggtttcatagttcaaaaatacttaagggctcaaatggaaagctttatgtgtcagttgatactaaaagtgcagtgttaaggagaattaaaaaacatgcacattttcagtttcataacaggtttctcttggttaatttctaaaataattgatacttgtggaggtcataaccttttagatttaaaccttattagtgcaatatgtactatgttctatggctgaagtttatcagtacgtgtttgaccagtcagaagactggttcggaaagttggtgataaggcagacttatgcattaataaggactaaactggatatttgtatatgggggactttataaatctttagctaataaatactctaggagtagaaaacaattttggtgtgatattccacttggtggaagggggcgggaaaaacggaaacaaatgtggaaaaactgtgtgggaaaaataaaaaaaacacgtgggggtaataatacacataagggcggggacaaangtatgtattattt

SEQ ID NO: 681070 - DNA, 123 bp, Homo sapiens
ggatttgctggtgcagtacaactaggcttaataaggagctcgaattcgagaggaggatagcttgagcccaggagttcaagaccagcctgggcaaagtggcaagacccacccgttcctacaaaa

SEQ ID NO: 681071 - DNA, 224 bp, Homo sapiens
cctgctgctgcagtcgtctgagtatcccgttacgctgaactattgtgcagtctgtattcatcatgggttatgtgttcctgcgctgactacaattaatgacatgcatatcagctactacaccaagctgttataaggatgaaatgcagttagccagtgctcagtatagggcagttgctttactactacgtaggttgggtggtgtatgtgagaatctgtatactgcc

SEQ ID NO: 681072 - DNA, 773 bp, Homo sapiens
catacaattacatggaaattaaacagcctcctcctgaagtgacttttgggtaaacaacgaaattaaggcagaaattaagaaattctttgaaactaatgagaacaaagatacaacataccagaatctctgggatacagctaaagcagtgttaagaggaaagtttacaggactaaacacccacatataaaaagttagaaatgtctcagttgaacaacctagcattgcaattaaaaaaaaaaaaaaactagaaaagattaaagcaaaaaaccccaaagctagcagaaaaacaattagtcacaaattagagctgagctgagaggaaattaagatgtgaaaaacctataaaaaagtatctgagtcccagttttttctttggaaacactcaatataagactagatagactggctaactgggcactatataaagaaaaaaagagagaagatcccaataaacttgatcagaattgacaaaagggtcttaccatcaacccaaaagaaacttcaaaaaactctcagagtacttattgaacacctctagtgctttgcacagagacctagaaaacgcttagaattaaataagatactttccctggaaacgtaacaacctccagaagattgacccagaaagaaattgagtcccctgaagagacccataattgagtcctgtgaatggagtctgtaataagggggctataagccaaaaaaaacataaaaaacacaaccaaaaaaaatcttttttgggcggtctcgccctccaaaagttctcaaagact

SEQ ID NO: 681073 - DNA, 543 bp, Homo sapiens
taagggtggagaggcatttttattcttgaaaaatttatataaaaaatttttatgacacttgattccaaattgtttgtaccaattggcttgacataataaacataaacataggggcaatttaaacattggcagtagtttatgtaagtcaattcaggggcagggcctggggaactattttaagagaaacctggggtaaaaaaaatttttaggaagcagccctgtaacaatgtacatttgtagatcaggggctaaaaatccactttgaatgaatcccaagaagcaaagggtgtacaacatccatcacacatttgttttaaaaacaggatgtttttaaaatgataatctttttacaggtaaacgttcccgttttaataactattgagacccccttgggatgagctccagatgccctggtgactttcaccaagcacccctgggccattgtttaagggatccatcttaatcctggggctttaagaacatttttttttgtttaattggggttaaggccccattttcaattcttcataatttgcatggcgt

SEQ ID NO: 681074 - DNA, 213 bp, Homo sapiens
tcacgtgtgtcacgtgcgtaagcacatggtgcccacaccaagacatgccttcacctgcgagactgcggaaagtccttcaagcgcagcatgtccctcaagggtgcactcactgcagcactcagggagagaagccgtacagacgtgagaactgcaatgagcgcttccagtacaagtaccagcggcggtcacacatgagcatcctcataggcccca

SEQ ID NO: 681075 - DNA, 789 bp, Homo sapiens
gctcttggtgaatggggttcttccttggggatttaccggatggtccggtgcttccaatataggatgatcccgtgcgactgttcctcacccccgcttcgacctcacactttcgggatgtctgcgattcctgactagaggagagcgacgagcgtgctgatcctgaccccgttgtgagctgggcaagaagtaggccaagatcatgtaattattctcgagttcaaaggcaacggaaaaataatgctcgactgtgggatccacctctggtctagaaggcatggatgcatcattccttatattgatttaattggacccagcttgagattgatctccatattaattagtcatttccatttggatcactgtgggagctctgcccgtggttttctacagaagacaagtttcaaaggaaggaacatttatgactcatgtcgcacaaaagctatttatcgatggcttctttctgattatgtcaaagtctagtaaccatatcagcagacgacatgctgtataccgagacacggatttggaagaacagcatgggcaacaattgaaactatcaactttcatggagattaaggaagtgggcgggcaatcacgttttggtgttaccaatgcaggtcacgtttctaagagcccccatgttcatgcattgcgatcgcaggcgtgaagcttttttgtacactgttgatttctcaagaccagcagatacggcacttaatggagtgaattcctatattaagctgagttcttatcatgatcttcttatgggacatatctgaaaacgtgaac

SEQ ID NO: 681076 - DNA, 311 bp, Homo sapiens
gtggtcgaagcccatgctgacgtgccctctgagcagggccaggcccattagagccagctcagccatctcgccccaggcctccttgcaagtagccaccttccttgacgatagccgcgccggcgctcaaagccataggcctagtagacccacttgcgcaccgagtcgcgcagctgtgcctgtccgtcggtgaagctcgatgtccatctcacacccccagggtcatctgagcgacgatgttgcgttgcccttcgttgcttccgccgtagatcgtcgtcttgcgcatgttgacgtaggtcgaggcccgtgttggt

SEQ ID NO: 681077 - DNA, 537 bp, Homo sapiens
  misc_feature (164)..(164): n is a, c, g, or t
  misc_feature (328)..(328): n is a, c, g, or t
  misc_feature (352)..(352): n is a, c, g, or t
agaaatatgaaatcataatcctttggattatttagtccaataacatggagtattttcttctgggtctgtgaatttcatgaaggtatcagccggtcattaaaatttggaaagttcttagtccaggggtatgattgaagtatcaggagctgtatccaagagtcctngtagagacctttccataaatctccttgaagaaaaagcagtttgggacggtaggtgatggtaagtagttggaggaagaatcaaagcaacggtcggccagtcttcctgaaatacagaaatgacatcacagctgctatgtggattaaggagaggaagaagtcctatnctggtagaagcagagacttggacngtcaacgatgtggagctttcctcgccagtggggaggctaggaacagagcaaacatagagcccgctatgcttggtagtaattggggggataaccagatttggtcctgatggctgaaacttcccattaattgtccaagaatacggtgccggggggtaagagttcgggaagcaagacaagtagaggtt

SEQ ID NO: 681078 - DNA, 678 bp, Homo sapiens
gagatatttattactgttgtgtgggctttacagtcttaacatcgcaacccatgatgacttaccccttggtccgaaagcacgtcattctacattatcacccactggatgctgatacctcattggctaagcaagcaggtccgcctgttaggaatcatctcaaacagcccaagctacaccgtactttgcttctaagagcctaatactatccttaatcccagacagtggcctacccaccctcagacattcaggatattagagggtgtggccatggggtatgtcatattaaaggtcctgattgatgctgacaacatgttactgtcaacctgggtcctttcgaccttaaagctacacaaaatgtagagtttatatgctactcgagtattctgtctcttctaagctagcaagaaacgaaatgaccatttgtgggcgagatctgatttcttcacaatgggtcaacttttaaggtgtatggtgtgaaatcccttttgacctggcacgactgggtggttcgatatgattcaagacccatcaacgtgtgagctcttgaatccattttgctctgtacagacacgaagacgttcacattatgagtaggttgaggcactaccgcggctatggatgttaaaagaaggcttggtttgcaatcctaaaatctcgaacaccttgcgtttgaaaaag

SEQ ID NO: 681079 - DNA, 466 bp, Homo sapiens
  misc_feature (164)..(164): n is a, c, g, or t
  misc_feature (257)..(257): n is a, c, g, or t
  misc_feature (281)..(281): n is a, c, g, or t
agaaatatgaaatcataatcctttggattatttagtccaataacatggagtattttcttctgggtctgtgaatttcatgaaggtatcagccggtcattaaaatttggaaagttcttagtccaggggtatgattgaagtatcaggagctgtatccaagagtcctngtagagacctttccataaatctcccagtcttcctgaaatacagaaatgacatcacagctgctatgtggattaaggagaggaagaagtcctatnctggtagaagcagagacttggacngtcaacgatgtggagctttcctcgccagtggggaggctaggaacagagcaaacatagagcccgctatgcttggtagtaattggggggataaccagatttggtcctgatggctgaaacttcccattaattgtccaagaatacggtgccggggggtaagagttcgggaagcaagacaagtagaggtt

SEQ ID NO: 681080 - DNA, 999 bp, Homo sapiens
aggagagaagatacgcagccctccgtatggaggtgtctaaaaggtgtccactctggggaagagccacagtcctcgtaccagtgccaagcaagcttctatctgcatctgctctcaatcctgcatctgcaccgatgagtcctccggctgcagagctcctctgccagctatggaggtggtttcgggggtggctcttgctcagttgagaggagggcgtggttgtcgtctcccttgttcccagatccgcggttttgtcgtcgtgcggcgtggactcagacgtgtgtcggctattggcaggcggtgtgaccgtgttggttctattgcgctggaaggcgtgcctgcgtacctggcgtttgggatggtgggctatcgaggtggcctttggaggtcggctctggagttgcgccattcgcaggtggtctttgggtggtgggtttagctggtggctttggtccgacttgggggtgcgttgctgaatgagtagggcactccttcagcttggcaaactgacgacatggatcagcacgattggcacagatacactgtcaaaagaagcgacttgaggtttgcctatcgctgggaagaacggtgcagcaggcccattggtatggaggtgacaggcgcgttgaccctggaggggtgaaggatcctgatgatctgggtaccctgacagcagatccccagtctaggtgacctgagcggggaacataaaaggtcgctcaacttactagtatcgtaggaagaggcttccggctactatgattcttgaccgtcaagcaattgaatagggaacggggtcatgcctcgggagattctgacgagtgccagggcgtggttggtggacgaaggagctgggctcgatgtttgataatggagcctggctctggtgcgcagagcgtggggtggccatgattaatggtctttggccgggtgggggttgggggagtccggttaagggtgaccggggtgaggtgtgaggtgattagagtacttttttgaacc

SEQ ID NO: 681081 - DNA, 281 bp, Homo sapiens
tcatacagagttcaccgatacgtgtacaccaatgttcatagcgcgcattcttcacaatagctaaaaggtagaagcaacccaactgtccatcaatggataaatgggtaaacaaaaataattccaattctaggtatatacccacacgaagtaaaagcaggtacttcaacagatctgagtacaccaacattcataggagaattctccacaacagccaaaacgcagaagccactcaagtgtccatctaccgataaatggataaacaaaatgtagcgtctagacac

SEQ ID NO: 681082 - DNA, 793 bp, Homo sapiens
  misc_feature (10)..(10): n is a, c, g, or t
  misc_feature (67)..(68): n is a, c, g, or t
  misc_feature (70)..(70): n is a, c, g, or t
  misc_feature (88)..(88): n is a, c, g, or t
  misc_feature (116)..(116): n is a, c, g, or t
  misc_feature (216)..(216): n is a, c, g, or t
  misc_feature (223)..(223): n is a, c, g, or t
  misc_feature (232)..(232): n is a, c, g, or t
  misc_feature (277)..(277): n is a, c, g, or t
  misc_feature (340)..(340): n is a, c, g, or t
  misc_feature (344)..(344): n is a, c, g, or t
  misc_feature (375)..(375): n is a, c, g, or t
  misc_feature (389)..(389): n is a, c, g, or t
  misc_feature (437)..(437): n is a, c, g, or t
  misc_feature (455)..(455): n is a, c, g, or t
  misc_feature (477)..(477): n is a, c, g, or t
  misc_feature (527)..(528): n is a, c, g, or t
  misc_feature (530)..(531): n is a, c, g, or t
  misc_feature (535)..(535): n is a, c, g, or t
  misc_feature (546)..(546): n is a, c, g, or t
  misc_feature (549)..(549): n is a, c, g, or t
  misc_feature (557)..(557): n is a, c, g, or t
  misc_feature (571)..(571): n is a, c, g, or t
  misc_feature (575)..(575): n is a, c, g, or t
  misc_feature (586)..(586): n is a, c, g, or t
  misc_feature (639)..(639): n is a, c, g, or t
  misc_feature (649)..(649): n is a, c, g, or t
  misc_feature (705)..(705): n is a, c, g, or t
  misc_feature (723)..(723): n is a, c, g, or t
  misc_feature (781)..(781): n is a, c, g, or t
aagggggggnagtactatccccgggggcggaaagaaaggctaagaaaccactaaaagaataatcatnngnaattctcacacacaattnaccactctgaaaaaatatccaaagaaanaaaaacaactcaaatcagtaaaggatgtttttgtaattatagtgtcccctttgtacggtttaaaacaaaagtaatcaaattcctttgggccagggcggcnaaaatcnacagtttgngtcaaaaaataaaataaaataaaataaaataggcccatttttccnagaaaaagaatctttcctttcactgaaaagccacatgattcaagggcggggcaagtacggggnggangtgtccatataatccattataaatgtttccngctttaggtgtgcnggccattgtacaaggggaaattttaaaattctaaagcaatgtaaagtnttgcagtaaacaaatctnagtaggtatagtggtaatgtcnttctgtctatgttaaactgtacatcaacccacctttgcgttttaaatagnngnntttnacatatatgtnagnacatttgnttttatcttagtgntagnaaaattttagntttaaaaaacagtattttctctttaatgtattctcttaacatgtcaggtagcngttgtatagntaaccaacacgtgttaactctgtttccaatttcaaatcaagtccattttcctatgngccctagtagtcaaaagntcttaaaaaaagtaaaagtttgtttataatcactgtttaagtatatatttccccagtngtgtttccgtgt

SEQ ID NO: 681083 - DNA, 247 bp, Homo sapiens
aggtacagtggtcacagagcaagggggtgcttcatgaggggagcctgtgcttgccctcctggagaagctctggcaggtgctggaaggaggaggggcagagactagtgctcgatacccctcttggcatcactggcaggacagacaggtcctgagggcaggactggcctcccctctgcgcctggcaaccagcacaggtcacttaggtgagccgagggtgtagacccttcaggctgtcagtgcagaccag

SEQ ID NO: 681084 - DNA, 470 bp, Homo sapiens
  misc_feature (218)..(218): n is a, c, g, or t
  misc_feature (232)..(232): n is a, c, g, or t
  misc_feature (235)..(235): n is a, c, g, or t
  misc_feature (408)..(408): n is a, c, g, or t
gattcggcaccagggtgatcacgaacaaatggcgtacgttaagaaggatcaggctcccgcgcaggagacgcagcgtgtgcttgtgaagatgacgagccgcaacgcaaaggcggtggagaatgtgatgacggagctgctcctgcacgctcgcaacgagaaggtggtgctgcgtggccctgtgcgcctcccagacccagcacgctgaaagtcaccacccngcaaaacgccgtgngtnaacggcaccaacacgtgggacacttacgagctgaagatctacaagcgtcttgtagagctccgcgccgccgacggagcttgtgaagaagattacatccttcccctattgacgctggcgtggacgtccgccatcacaatcccacacgaccagttagcctgccccgcatgtggganaaggtgggaggccgcgccgcaactgtctcatgccatcttggggggaagagtttattttcccc

SEQ ID NO: 681085 - DNA, 373 bp, Homo sapiens
cgggtgcgcggtcacacctgtatcccagcactacgggagtcgcggtggagcagatacagcccaggagatcaagactatcctggccaacatggtgaacccccatctctactaaaaatacaaaaattaggccgggcacaggggttcatgcctgtatccccagcactttgggaggccgaaggcaagtggatcacctgaggtcaggagttcaagaccagcctgaccaacatggagaaaccccatctctactaaaactaaatacaaaattagccaggcatggtgcagcatgtctgtaatcccaggcactcaggaggctggggtaggagaatcacttgaacccgggaggcagatcgggccattgtaacacggtctctca

SEQ ID NO: 681086 - DNA, 799 bp, Homo sapiens
attctgacatcacggctgggagcacagcatggccgtggcgcaacgagtgctcttcagcaaggtagccgatggctggaccctgcccgaaaactttcattctccgaatggctgttccacatggcaagaggaccatggaggagctcgatcttcgggacattgatgacgacgtaccttcgtctgcattgagctgcacgaggcacacccttattcatgctggagaggtgtttcacatgcgtactaggccatgacgacggtgtgactgtagtctggacgcaccaatggcaaagcatgtggtcgtgctgctcatgttccattgcgtggggagccatggactcctaagtgtcacgcatcgtagggtcttagagactatgctagagcgtgatccgaagaccatgcccctgcaccatatgatgaccatggctcaccgtccgttagacctgtccaccgtagcaccgtgcacgactgagtctcccctggcggaaggaggggatgacgaggatgacacgtctatgtgcttacgcgtattaggttcgaggagagacatgaaaaatcactgaatgaaagtttgaatttgtggccggacctgcccctctcaggccttctaggcatgtgtctgagggaagtctcctgagtgttagaagtgttattggcaaagcaatccaataaaataagctacctattatgccagaaaacaaaaaaaaacccgggggccaaaacgggggggcgccaaaagggtttcaatgcccggcccagcggtccgcattttttaaaaggggaaaacgggcccaaaggcgaaaca

SEQ ID NO: 681087 - DNA, 119 bp, Homo sapiens
gaaataaagcgcaagacagctggctgtgtgcagagcggatcgacaggagatttccgggagaagaagctctatgccaatatgtttgagaggctggctgagagaggagaacaaggccaacg

SEQ ID NO: 681088 - DNA, 321 bp, Homo sapiens
tttttttttacataagtgaatattttgataccagcaactttcacaggggtttttggctgtctttggattgatttgtaatgcgcccaccctgtgttcagacagagattctgtgacacctgctgccactcacttgccgtggagcccgtccgtggcagtgtcccgagtgctgcataggaaaggcctgggtgctgagcagggcacacgccttggaggacggtgtggacacggtcacgtgtgcactcctccacatcccattgacactgggtcctacagactctcctgctgctcacttctctcaatcttcacaccttccgcgtcgac

SEQ ID NO: 681089 - DNA, 324 bp, Homo sapiens
  misc_feature (78)..(78): n is a, c, g, or t
  misc_feature (154)..(154): n is a, c, g, or t
  misc_feature (162)..(162): n is a, c, g, or t
  misc_feature (200)..(200): n is a, c, g, or t
  misc_feature (241)..(241): n is a, c, g, or t
  misc_feature (253)..(253): n is a, c, g, or t
  misc_feature (297)..(297): n is a, c, g, or t
  misc_feature (319)..(319): n is a, c, g, or t
cggcacgaggcttcaagagaattagatgccaagaccaagactagagccgaggtgcggcggcggtggcggaaagcttgnccgcagaaaggcactgggcgggccggcatggcagcatccgctctccgctctggcgaggaggaggtgttgcccatgnccccgggncccacaagttactactacatgctgcccatgaaggtgcnggcgctgggtctcaaagtggcactgaccgtcaagctggccnatgacgacctgnacatcatggactccctatagctgcccaccggagacccacagtancttgacaagagctggcgcactncccgg

SEQ ID NO: 681090 - DNA, 379 bp, Homo sapiens
  misc_feature (354)..(354): n is a, c, g, or t
  misc_feature (373)..(373): n is a, c, g, or t
tcggcgtggtcttgaactcctgggctcaagtgatcctactgcgttggcctcccaaagtgctgggattacaggtgtaagccatcacacccagcctcaatgctcttttaacaagctccacattaccaacttgtcaaaactcatgctactcatcctgaataaacataatgactaaagcaggatacactgaatgctcccaactggtatacctgaacatttctattcctataaattaagttgtatgtttacatgagttgtattttttcctcaaacctactgacacaagttgtacttactgtaactggttgactgaaacactttttaaaccgatacaatggaatggcaaaaagggttgcntctaaaaattaaatttttnttttct

SEQ ID NO: 681091 - DNA, 365 bp, Homo sapiens
atacctgttgctaattgctaactggattccctgtggtcagataacatattttgtctgatccagacccctttgaatgtgttccaggccttcgtcttgtgcctttagcgtgtggactgtgtggacaggagaacctgcagagtcgtctgccttggtctttttgcttatctgttttccagagacagctctcctcctctggccccgtgtacctaccacctccttcagccctctctgagccggcagaggagcaccgagtatgactcgctccaccgtgacttctctccaggctgtgtgtttgggatttataagataggttaagtctggaaagttttttggatcctttttttaaaaaacataaaacacaaaaa

SEQ ID NO: 681092 - DNA, 159 bp, Homo sapiens
cagccccgcaagacggggactatgggcataaactgtggtttgctccacagatttcagagcattgaccgtagtagtacccccgagtcgtgtatctggtaaagtggttgggtttagacctccgggaattgcatctgtttttaacgcctcatgcgggggctg

SEQ ID NO: 681093 - DNA, 630 bp, Homo sapiens
aaatggtgcccagttttgattgcttaaaaatgtttgcatgatgacccaaccttaaaaatgtgacacaccactggtgaaatgatgaatgtggttcactggtgtgaatgatgaatgcagaatggccccatgggctgaagctgggaagtgatggagaaaaaatgtgctggtgcccctgctcctgagggagggagatggatgaatgtgagcaggctgctggctgctgagcccaatgtgccaatggaccccttcgctcacctgcccaagagtacctttgtgtttggatgaatttaagcgcaagtactccaatgatgtgacacactctctgtggcactgccatatatctgggagcactttgataaggacggcttggttccctgtggtactcagagtatctgctctccctgtaaggaactcatctcagacccttcatgacgcttgcaatctccatccacttggacatgtctccagccgactgggacaggctgagcgaaggactggcttccgcccggtgtattcctttttgggaaccaacaataggcagtccacttctggagtcctggtcttctgaggcaggagcttgccttccggtgagtccagtggctggtggctcgcgtctcccttgcggcactg

SEQ ID NO: 681094 - DNA, 240 bp, Homo sapiens
gtcgaccggcacgcagcaggttgctgcgctgaaagatcatgatccatgaagtcaccgatgcggcaaccagggtcagcattaccaactgcactacaacgctggcattgctgaccaggctccacatggaggaatggtcgacgacgttagcttccacgctttatctcctgctctgagtgtgtacccgcgctgctctcgtcggcaaaggccgtacgcagagcgtctggaatggcgcggggtttg

SEQ ID NO: 681095 - DNA, 643 bp, Homo sapiens
gctttctggtgttagatcgagctaccctctaaaagcagtttagagtggtaaaaaaaaaaaaaacacaccaaacgctcgcagccacaaaagggatgaaatttcttctgggacatcctccggcttctcccgttactggatcgtctggctccctagagtccttcgtgaagctttttattcctaagaggagaaaatcagtcaccggcgaaatcgtgctgattacaggagctggggcatggaattggggagactgactggcctatgaatttggctaaacttaaaagcaagctgggttcctctggggatataaataagcattggactgggaggaaacagctggccaaattggcaaggggactgggcgtgccaagggttcataccttggtgggtagactggcagcaaccgagaagatatttacaggctctggcaaaggaagggtggaagggcagaaatttgggaagatgttagtatttataggtaacataatggctggggtggtagctctatacattcagaattgggttgggctacacaagaatcctcagaatttggaaaagaactttgtgacagttaagtggtactgtggcaccattttcgtggacctacaagagggcatttcttccgggcaatgaccgaagaaattac

SEQ ID NO: 681096 - DNA, 114 bp, Homo sapiens
tttggggttttcggtttttgggcccgggaaaacaaaggaaaggggttccctccccccttcctttttttttcctccgggggtgggcaaaaagtcccccattaatgggcggggcca

SEQ ID NO: 681097 - DNA, 553 bp, Homo sapiens
gcacgagcaaaaacagtggccaatgcagtcgaagtttccaaagaaagtcaaaaggaactaacacgctctgttgaaaggaaggaaagcccagaaattagagattatgaaagagcatacgatccgaaagccctgaaaacagacgtaacaaagttgacagtagacaatgataataaaagttacgaagaacctcttgaaaaagtagaagggtgtattttcccattaccaaaagcagaaacgagattatgggaattgaaaaaccagaaaagaaacaaaataataagtaaacaaaagtacttactgaaacaggcaattaggaatttctcagagtatcctttttacgcacagaacaaacttatacatcagcaggctaccggacttatcttgacgaaaattatatcaaagataaaaaaggaagaacatttgaaaaaaataaatttaaaacatgattatttcgatctccagaagaagtatgaaaaagaatgcgaaattttgactaaactgagtgaaaatttaaggaaggaagaaatcgaaaataaacgtaaagagcacgaac

SEQ ID NO: 681098 - DNA, 220 bp, Homo sapiens
  misc_feature (115)..(115): n is a, c, g, or t
  misc_feature (156)..(156): n is a, c, g, or t
  misc_feature (192)..(192): n is a, c, g, or t
gccctcccggcctccaaggaggatctgttgtgcacaccgcagcagtaccgagcctcgggcagctacttcggcctggaagagaacggccgcctcttcgcgccgccaagtcccgagncgggcgaggcgaaagcgcagcgccttcgtggaggtgaaganagctgcccgcgcggccagcctgcaggaggaggggancagcgacggcgcgggggtcgcctccgag

SEQ ID NO: 681099 - DNA, 124 bp, Homo sapiens
tctatcatcggcaccatatagcatctagaggtccatgcatacttaatattatacttaaattcaatacgggtgccgatgaatagcctgtaatttagaatgagtccactttaaatcctttaacgag

SEQ ID NO: 681100 - DNA, 139 bp, Homo sapiens
tggaggtcaccatattgatgcctgaacttagtgctggacaccctgatctgcatagcgcactacagcccagaactcctgggctcaatctgatcctcccacctcagcctcccgagtagctgggactacaggcacgcgccat

SEQ ID NO: 681101 - DNA, 126 bp, Homo sapiens
gacctagacactcgatatgagaaacgttacgagagagagcgagagagatgtgcacgtgagagtacgaacgcgagaagccatcgagagtcagtacttcgcgacagcgagatatacacgctacctgac

SEQ ID NO: 681102 - DNA, 443 bp, Homo sapiens
  misc_feature (148)..(148): n is a, c, g, or t
cggtatgtgctcagtacaatcttgctggaagaggcagtcttcttagcatggtgagctgagtcatggctttttttgtagctagtcctgtccctggcatccatgtgatgtttggattgagtaaactttgttgccagtgggcagtgcatgntggacagtatcagagtaaggctctccccctccagagccctgagtttcttggggtgcatgaaggttttctttagaatcagaattgtagccagtttcttttggccagacagcatgaaatacttggatataactgaaaagggtggggtggagatgggtgtggcagtgtatggtgtgtgatttttattttcttctttggtcatgggggccaaggagaaaggcatgaatcttccctgtcaggctcttacagccacaggcactgtgtctactgtctggaagacataaccgagcgtggcaat

SEQ ID NO: 681103 - DNA, 638 bp, Homo sapiens
acttagactgaggaaaacattcggcccgcggaaacggacgctggacaacgaagggattccgcgatctgcgggaattgggcacgagcagaacaagacgacccagctacggacgatgttaccacaattaaaaatttaaatacctcatatatcctcattcaaattcatctacctaatggccacttatagtctatccactacaatatcactcatatctacgtattcactgtctgtactattatctacatgagaactgttcttgatctgacaaagactacattgaccacagattgaaattttactctgactgtaaagtttacatacatgtgcacacacatactcacacacctacacacacatatgtacatacgcaattgtatatatatttgaactttctcattatatatataaaatacacttctatataacgatgtatctatatatgtgtcatcccaacttaactcgtcttcttatatctctcgttgacaatcccacatccatatttccctacttacacttttttaacatcaactacctgatgtttacttaaaaaacttccttattttattagttttttcatctgaaagcaacatctatattctaaattaattccctatataattttcgccctttcacaaacg

SEQ ID NO: 681104 - DNA, 128 bp, Homo sapiens
tccgataatcagcttccacccttactacacaatcaaagacgccctcggattacttctcttcattctctccttaactgacattaacagtattctacaccagacctcctaggacgatccaaagaattata

SEQ ID NO: 681105 - DNA, 244 bp, Homo sapiens
tatttttttgtgtccaagttagataacgcggttatcaccatcgattggacaggctgatctcgaatacctgacctctagtgatccagccatctatggctcccaaaatgctgggattacaggtgatgagccaccgtgcctggcgcatcaactacgcgtagaataccgtagtttggagataggagacaggatctcgataagtccgccatggctgatctcgaaatcccaagctcaagcgatccacctg

SEQ ID NO: 681106 - DNA, 1768 bp, Homo sapiens
tttttttttttattttatccttctggggacccatccagtgagtcctatttaagatctcatgggcatatcataccccacctgggaaagtcatcttataccaaaccctttaacaggggaactcctcgtggctacacagtggtggtgtgataaaactcatatataacatctcattcattatgagatgagagtggctgcgtggtacaatattgtgacgtggccgaggtaatacctcatctccagcatctttctcaccataagaccgtgggagaaaaatctcagagactcccaccaataaaccccgtgagagtctaccaatatctgccgagacacaccagtggactataacctcaatacaaaagagaggatatcacgacacggcgagaaatgttggtcgtgcgaagtgcacccaccacaagggcgacaccactatcatcaccgatgcaccgaagcgcgcgtggcctcacactgggcggagcactgaacaagacgagcgctggacccaccaggaagcacacaccacaaaaaggcaccaggggagccaaagaaaagcgcggacaaaacgaacagcgcacacaaaccaacaaagacaccggcccgcaaaacaaacccaacaagacaaacaaaacacaacacacaacccaacaaatctaaagcgcaaacacagaaaaacacaacaaaaaacagaaggacaaacgaacaaaaaacaaactagcgccacagaaccgaaccaccacacagaaaagaagagcaccggccaccaccagagaataaaccagaacgccagaacaccccacaacagggaaaaccacgagcaaactaaaggaaacaacacaaaccacaaaaaacaaccacccacaaacaacaaacagtagaaaccaaaaacacacacaacaggcacgccaccacaaagtcgaaaaccaacaccaaaaaaacataaaaacaaaacacccacacacataaacacaacaaaacaaagaaaaaacaaaaaacaacaatcacactcaaaaaataaaggaacaacacacaaaaaaacagaaagagaaaagagacacaagtaaccacacaccaataggagcgacgcaccaacacacataaacactacacaacacacgatataccacaagcacatatacacacaacaccattagaagacacaaccaaaacaatgagctaaacacaacacacgaccgactaacaacaacaggcgacaatcacaacacacacacaaaaaagcagccaaaaatcaacaaacaaggaagcaaaccacccagagcgcacaacaacaaccacaacaaaagaagacgagatcaaaaacagcaccaaatcgaacacaccaccaacagaacaatcataaaaaaataggactggacatccagcactaagacacacacaagcacagaaaagacaaaccaccaaaagccccgaaccaaataacaaccaaccaataatcggtacacgaacaaaaccatagagaaacccacacacaagagagcagaaagcaacatacacaaacacaaacccaccacacgcacactaaagaacgcaacagaaacaagaagagcaaaaaatacagaagacaagagtaagaaatagagagaggacgaagaaaccggacacaccacgagcacgcgacaatgagatcacgaggacaacataagataagaaacaagcaaacagaccaagaagaatgaataacagagaacatacaccactatcggcaaccgaagccagtacacatgaccaacatacaaggtaccaccaagaatag

SEQ ID NO: 681107 - DNA, 340 bp, Homo sapiens
tgggcctcagtgtcttgatgtatcattcatggagcaggcaaaaccagacgtctgggaagaccgtgaacttaaggagtctgattctccgacacaggctggtggaccacgtaccccactgagaccacctctcagggtgcctgccctggttcctccccagcctgagtcaactgtttggactgcaaagagggtggggacggggggttaaccctgttccccccaaacctttggaggcccaggtgggagggttgctttagacccggagtttgagaccagcctgggcagcatagcaagatccccatcttttaaaaacaaaataaaacaataaagactgcaaaaaaaa

SEQ ID NO: 681108 - DNA, 245 bp, Homo sapiens
tttttttgaagaattgaaattgcccccccacttgcccggcccggtttttcccgtccggaacgtttttaggaaggggaaagctgggttcttccttggggaggggaggaatttcaaacccttcgttagttcccgtttggcccgtcccaacgcccggtttttcggcatacgggcaaaaagacccaaggaacccccagaccaggtttttgaaaagaaaaaataaacccctcttggggacttggggtcca

SEQ ID NO: 681109 - DNA, 1135 bp, Homo sapiens
tgctccgctgctgctgtcagtgacctggcgacatggagtcccagcgggacctgagcctggtgcctgagcggcttcagatgacgctgaacaatgaactggcagctggaagttgaaatgtgcggaaacaaaagctggcagaaccaggaggtagagaaggagaacatgccactttttctgtctgccacctttgctctggtgatgcgagctggcctgtggaagatgcttctgtgagctgctgctggaggtcgtgtctgatgcggctggaggaggctggcctctctggctccagggtgctgcagaaactaatcaactgactcagtttttatatacctatgcctgcttacggaccttgctgggcagtggaacaatgaaggtgctgctggctggaggttgcagggctggccctttgtgcccagatgctgtgctgcccgggggcatgcataccccaatgaaagcgtaatacgcatatcaaagaaccctgtggggaaatgtgatgctagcattcgtcttaccgaaaggtagaaccgctggatccctggcattcaccccctgggcaaggttgaaagagcaatacaatgggaactcccccggcttggcccagatgaatgggcggaaggggagacccttccggccccccaggctggggtcatgccggttaactcccaaccctgggaagtccccaaaggtctttgggacgacagcagaagccaagccgcacgtttgcaacctatggcggccgacgaggttcatattgtggaccggaaacttggacgccaaacttgcaacagggtcaggaccagtggtataattgggaaagagttcccccaaaaatattcacccttggctaggttaaagcccgaaaatggggccccaatatgccattgcaaaggtcatagggctacattagccggcatccctcaggtagatccaaaacccctccatggattatccacatggcggcaagtgaacctggcacagttgaaccttgggccattccataggggaaggaaggggcccttgccgcagacacagcatcccggaattaacaaacaggtaacgagaaagaagacaaaccacgaatatactatcaaatgcagcgagtgaacccaggcagagagcacaagccgatggaaga

SEQ ID NO: 681110 - DNA, 81 bp, Homo sapiens
ccacatcccccataggtcactgtgtggccatctaccactttgaagggtccagcgagggcactatctctatggccgagggtg

SEQ ID NO: 681111 - DNA, 241 bp, Homo sapiens
ccggctcgacaaaagtcatccatgttgtagtatctatcagtacttcatatcctttttattatcaaataatattatattgtttaggtctcccatatttatatttattcatatcatctcttcatggacatgtagggtagtttcatgctttattggctttcatgaagtaatgctagctgtaaacactttgtagttcaacgtttctagggtgaacatgttacttatttcacactttggacgcgga

SEQ ID NO: 681112 - DNA, 161 bp, Homo sapiens
taaacaaaacaaacacttcccatgtctaggaagccaagcccagtggctccccatcacagtgtatgtataatacctgtatgaatttgggggggggggtgaatgtcttgcctccaggtcccaaactatcttgaagtccctggatctgtcggaaagtgacattc

SEQ ID NO: 681113 - DNA, 320 bp, Homo sapiens
ggaccaggcttgtcatgcttggagagagtgacctgcggtgctgcgagaagtgtgagctgaccctggacatgagaggggtctttgaggactccaactacagcgagaggaccaccgaccttgacgtccaactgctgtgactgggccacatagtcacactctttgaggccatacatgccaactgactttcggacagtgagcttgctgcgcgcgggccttagcatgtctgacacgagaccctggtgacaatcgtgtgctaccacaagattcgagagaagggggcctatagcaccgagcttcgatcttgacttcagtgagaggcc

SEQ ID NO: 681114 - DNA, 937 bp, Homo sapiens
  misc_feature (318)..(318): n is a, c, g, or t
  misc_feature (603)..(603): n is a, c, g, or t
  misc_feature (644)..(644): n is a, c, g, or t
tgaccaatggtgcctgtttatcattgggatgaccatgaggaaggcgcaggttgaggactgagctaatctgaaatgaacatattattgacaggcaggctgaggtccacagaggccagggacgcttccatctgaccccttgtccagcgctccttgcgcctgtgctgtgtctacttcctcgaagaaaagtccacacttccaactgcaaagtgcctagatgccaccctgggcagcaccaggccctgggagtgctcctggcctccctcatcgctgggcactgggagccgtgtgtccctggctgcctctgaggctgtgatttangaggctgaagctgacccaccgctggcaccaagcgtccactgtgagataacaatcacctagaaatgatgtgcatttacggtgtgcttcaggagaacacacagaaacttaattgctagaattaaaaacttaactcactttgcctttcagcaatgaaaaacacattagctgcttatgttccccttataccattatttttgtgaaaagaaattctgaatatcttctcttaatggatgtaaaatatggattgtctcaatgaattgcatatttattctgatgatctttgcngattcctttcctgctctaaatcctcccctaccctccttatnaatgctcatgggtgtgaccttctgttagatttccaggaacagccttctgctctctgataactacatgctcattcccaccaaagcaggagcccaaccaggggtaaaatgactggttgccaagaatgctgaatgggacatccatgagcagacagtgccgtctctccttcagaccttgttactctacctgcaattaaattactgaagagagagtgcacaagtgcacacacatgcacacaccacacccacaccacatgccacagcatgcacacccaacatccacacaccacacacat

SEQ ID NO: 681115 - DNA, 333 bp, Homo sapiens
ccaggctcaccctggagtgggggtggattcttcggaagctgctttcaaacagatttcccctggtttgtggtgtcctctctgtgccttggtttttccagtaggaggaggctgttagggcttaagaccatccctgcaagaaaccccatactctatacatgcttaccgggttagcatgtggccagcattgtggagtgttctagaagttcttgactatccctgtgtggaatatgcctgccatcccagcacttgtagaggcagcaagctgagataagccttgtctacatagcaagtttcaggtcagccagcgctccaagataagaattagcttaaaaa

SEQ ID NO: 681116 - DNA, 941 bp, Homo sapiens
  misc_feature (12)..(12): n is a, c, g, or t
  misc_feature (71)..(71): n is a, c, g, or t
  misc_feature (95)..(95): n is a, c, g, or t
  misc_feature (99)..(99): n is a, c, g, or t
  misc_feature (131)..(131): n is a, c, g, or t
  misc_feature (135)..(135): n is a, c, g, or t
  misc_feature (194)..(194): n is a, c, g, or t
  misc_feature (215)..(215): n is a, c, g, or t
  misc_feature (220)..(220): n is a, c, g, or t
  misc_feature (224)..(224): n is a, c, g, or t
  misc_feature (235)..(235): n is a, c, g, or t
  misc_feature (249)..(249): n is a, c, g, or t
  misc_feature (252)..(252): n is a, c, g, or t
  misc_feature (255)..(255): n is a, c, g, or t
  misc_feature (286)..(286): n is a, c, g, or t
  misc_feature (310)..(310): n is a, c, g, or t
  misc_feature (460)..(460): n is a, c, g, or t
  misc_feature (602)..(602): n is a, c, g, or t
  misc_feature (626)..(626): n is a, c, g, or t
  misc_feature (644)..(644): n is a, c, g, or t
  misc_feature (718)..(718): n is a, c, g, or t
  misc_feature (732)..(732): n is a, c, g, or t
  misc_feature (804)..(805): n is a, c, g, or t
  misc_feature (817)..(817): n is a, c, g, or t
  misc_feature (845)..(845): n is a, c, g, or t
  misc_feature (902)..(902): n is a, c, g, or t
gcacctagaggnacttatggctccggctgcggtggctcctgcggctctggctctcttgtcggccctggtcncagctgaggtacatatttattccnctgnttgtgtagaattgtgcctctcccgactctttnatgngcgtttgtgagaatttcttccccctatgaactaactcttttattctctcgaggattgcnccatttcttttgtaggtgtgntctgnaacnagggtttctcnttccccgatgactnctntantagtggtcgtggtggcccaatcattaatccntcctctcaggagatcttgccaaangaggaacagtatgatctgaagacaagtagatgtctctattagcttcccaaaattcattgttgggatttctgaacacatgaagaaagttgcagtgttttcctcttggacattgttgtatttcaaataaaccacaaatcgccattttcacancgggtcactgggcagaattcacattgcagctgtcgtcctgcataccaacgaaccagattaaacagagaaagggctgctatggcattcatatcttcacgacatggatactgaaacatatacatttgcccctcagggtgagggntccaaaatttgcagctagaccttngaactggaatcactttcncccacagttctttgaactcggggcaacacatccctcataagaaatctaaggaactgtttggtaggtttcttccntcgctgtaatccanggcttgcgtcaggggtcataatcatccctcctgcactgctccattccaaacgttgtaaacatgctcttaatnnaaagggtaggantagatgttggggaattatgtttacgtgnacatctgtctccaatctgcagctcctgttttactgtagaagggacattagctcgatncttctccattactctgaaatccacgggtggttctgggtt

SEQ ID NO: 681117 - DNA, 866 bp, Homo sapiens
tggccccaaagaagcaattttttatttgggtgaatgctgacggcaaacttctcccaagaaaaaacaaatatgggaaatgttgtctcgagacaagaaagccttagggaaacttttagggctagaatacaaatttcccacaagggaaaggcacggacctctggggagacttgggaaggctccctcagccatttcagcaccagtgcggacagagcctcttcaatagtttgatacaaccattgtgcgtgctccctcagtgccctgtcccaaccgagcattcttcttaatttctttcccctcgtgtttcaatcttctctgtccaccccgaggtgtgtgcaccagagaaaacgagtgcccggggatatctcagcccacccctagtgacagggtgtgcccattttctcccttctcctgttgtttccaaaacccccccccggagaagtgtccttctccgaatttaactccctcaatttagggtcgtccccccgtgtgtattaggcgtctctccgtggcgccgcccaagtggccccccctctaatccaacatatttccacccccaccacgtgtgggtctgttgttcccgagggggacctctgtttgccccatctccaccccgtgggtctcgggggtttcaacacgaggctttgtgtaaagggctcctccttttgaacttcttggcgagcacgagggctctctcgtggtgaaggctcaccactttcttttgcaccttgtttcacagttccttccgggcaaaatttttacccccccctatattaaagatttaattataaaccaccttcccctcatttgaagcttcctccaaccccattaccaaaacttttcccggcattgatgaaaacttcggggtc

SEQ ID NO: 681118 - DNA, 236 bp, Homo sapiens
  misc_feature (175)..(175): n is a, c, g, or t
  misc_feature (186)..(186): n is a, c, g, or t
  misc_feature (218)..(218): n is a, c, g, or t
acaaaacaaaaggttggtttttggaaaagataaacaaaatcaataaggtacttgctagactaaccacgaaaaaaaaagaaagatggtcttaaataaaatcagaaatgaaaaaggaaacattgcaactgataatacagaaatacaaaagatcatcagaaactattgtgtacaactntacactaactngaaaacctagaggaaatggatagattacaggncacatgcaacctaccaag

SEQ ID NO: 681119 - DNA, 933 bp, Homo sapiens
aaaaaaaacaacggcaggagcaggcccgggtggtaccgcgagcggacgcggcagcgcctctgtatcgctttttcttatttttcccccctttcccctttcttttttaattatttcttttcttttctcccctgcactaaaaaatcctcgaagggacacggaaggggcaaagggaaaaaggaacagcacccagaacaaagaacaacaaaacgcaacaaagaaaagaagcgaagcaaaacaaacagacaacacgagacagacagcagaaaacaaacaaaacacaaaacaagcaagcaagaaacacaaaaaacaaaagaaaacaaaaacaaaaaagaacaaaggaaaaacaacaaaccaagacgaaagagaaaagagcggaagaacaagaaagcaacaggggacgaacaaaggaccacacacacgagaagaaaaaacacaagacgagcaagcagaaagacaaacacaacgaaacaaacaagcgagacacaagacaaagccaagaaacagaccaccaaagaaaaaagagaccacaacaaaacgaagacaaaaagaaaatacacagagaaatacagaagaaatgacagaaggaggataaagaactaagaagaaacagagagagaaaaggcaaaaagaaagagaaaaacagaatagtaaatataacaatactcctaggggaaacaaaaacgcgcaaccacaggacaatgaagaagcacaacaacagcggaaaaagagaacaaaaaaaaagaagaaagaacagagaacaaagcaacacaggaaagacagcaaccacaggaagaaaaaaaagagagaacagcgacaaagaaagaagaaaaaaaagaaacaagaacaaaagaaaagagaaaacgacagacaaccagagacagacaaccacacgaaagaagaaagaaccaaaaggacacaacaagaaacaaaaaa

SEQ ID NO: 681120 - DNA, 169 bp, Homo sapiens
  misc_feature (113)..(113): n is a, c, g, or t
  misc_feature (142)..(142): n is a, c, g, or t
ctagctattacggtgttcctctagctattacggtgttcctctagctattacggtgttcctctagctattacggtgttcctctagctattacggtgttcctctagctattacgntgttccccttaattggcttgagtggaagntcaggggcaaggaacaccaatagctag

SEQ ID NO: 681121 - DNA, 211 bp, Homo sapiens
cagggtcgctctcgggtggatgggtgttgcttgatcccgctgttccagcgtcgaagaaccattgggtctgccggtttgaacttgttctgggaagctgtgcgtacaccgtgaatggaggctttgtgaatttcttgaataacctatagactgtggtctaaggtggatatggggcagagccaaaataacatatcttttaaattcggcatgcatt

SEQ ID NO: 681122 - DNA, 340 bp, Homo sapiens
tcagccggtacagacttctgtcaccaagatgataattcaacatttctttctctggaggacccaagcaggacaggcaacagagcttatgaattccacctgtggtcaacgagttgtagactggaaagacacctgcttgagaagtgacaaggaccacaccggagttaactattttggtcaccttacattttcttttttcttttttttttttcctgagatggagtttcgctctcatcgcccaggcgtgcagtagtggtggcgcgatctcggctcactgcaatctccacctccgggttccacgcatttctgttgcctcaacctcccgagttagctgggactatag

SEQ ID NO: 681123 - DNA, 471 bp, Homo sapiens
gcacgaggcgcctacatcgagggggccaagggaacttctacccaattcaggcccttgctctgggagcccgacagggatcgctgatgccaacgatgcctgtgtctcatccaccgggtcaacccgcagatgctgcggctcaacgccgacccccacttcttcacgcacgactttcaagacctcaagaacgagggcgaggccgccgccagcggcgggggcccaccgagcgggggcgcgcccgccgcctcctcggccgccagggacagctgcgcggccggaaccaagcactggactatgaacctggaccgctagggatacccaggggccgcgcccatcccccgccccagcccctgacacacactcggaccgcccgggaccacaaagccaccgtcgctgttaccgacggtcatcgccccggctgggcggaggaggagacgcccatgcccctcatgggaaagtggagaccgggacacc

SEQ ID NO: 681124 - DNA, 392 bp, Homo sapiens
tattagtgttttatctcttttgttttttgcttaattcttttttgaaatccattttttccccttttgtttcttttttaaaaccacccaacggccggggggggtaacacgacgtgctgaaaaaaaaaccgcctcaaatggctggttacgtcccctgacggaaaacccatgtttccccccgccaatttttggtggaacacgggggggggaaagggctcctcccgccccctcttaaaaaaaaagcgccctttgtattgcaaaaaaaaatggggcggcctttcccgttttatcccccccccccaaaagggggaaaaaaatttggggggggggggcccctctgaagaccatgctgctgtgcagggggacaatttttgaaaacaaaaacacccccctcc

SEQ ID NO: 681125 - DNA, 318 bp, Homo sapiens
  misc_feature (1)..(1): n is a, c, g, or t
  misc_feature (314)..(314): n is a, c, g, or t
ntgctcggtcccagtgtctgagaaggtgacatctgagcaaaggcttctaagaggcacattttactagagaagttgtattgttgtaataatacaaacttgaatttgaaaccattacaaatgtccatcaacgaggggggaggctaagtaaactgtgatgatatccacactgtgcaacagtctctaaaacaatgaggcacacacataatgtattagcatggaaaaatctttatggcagtcacttgagctcaagcagttgaggctgccgtgagccatgatcatgccactgcatccagccttggtgacagaagaccctntctc

SEQ ID NO: 681126 - DNA, 375 bp, Homo sapiens
  misc_feature (19)..(19): n is a, c, g, or t
  misc_feature (43)..(43): n is a, c, g, or t
  misc_feature (63)..(63): n is a, c, g, or t
  misc_feature (81)..(81): n is a, c, g, or t
  misc_feature (101)..(101): n is a, c, g, or t
  misc_feature (130)..(130): n is a, c, g, or t
  misc_feature (133)..(133): n is a, c, g, or t
  misc_feature (144)..(144): n is a, c, g, or t
  misc_feature (153)..(153): n is a, c, g, or t
  misc_feature (165)..(165): n is a, c, g, or t
  misc_feature (177)..(177): n is a, c, g, or t
  misc_feature (208)..(208): n is a, c, g, or t
  misc_feature (243)..(243): n is a, c, g, or t
  misc_feature (258)..(258): n is a, c, g, or t
aaggtaccagtggatgaanttgatggaaagtttctacggtcanaaaaggctgctgtgtggaanctataaagccatgtgganatttggcacctactgtcaanagttggctgcccttgaaaaggagcgcagncanctttcctgcancttggctancttcctaaccanctgttcagaccntctgattttacatttactgaataagatttgnagtaatgaaagtctgtagtcttaaaactctaaaangttgtactgcctccnagcagcagtatttatagtaacgtaagctattaatgctaactcttgcatgtcaagaaacattagtcttaggaattcttcaaaaaatggcatcccaatgaaaataaatttgatgactat

SEQ ID NO: 681127 - DNA, 180 bp, Homo sapiens
tgcctcctgaccgatcatggtgcttccccacgtggccctgcatggcatggtgtgacctatgctcttgaattgtgagtaacacacgctgtacgtaatggcagtcatctcctgacccatttcctcaccatacctgaataataataaaacctattgtctcagcatatttgggctgttttaaca

SEQ ID NO: 681128 - DNA, 751 bp, Homo sapiens
  misc_feature (9)..(9): n is a, c, g, or t
ccacaaaanaattgtgggggggtttcgcaaagttttagtgttttaagcaagtgtggggatttaccatcacccccggtttttttccggctcccccgagcccttagcccgggtcctttttgtccaaaaggtcaaaaagtccacatatggggaaaccttggcttccctttccatgggtttacctcctgtccagggtggaagtgaataagaaggcctggaaaaactgggaaaatatttattaaaaatttaaaggccattcattcagtggccagtgggaattaactctcccaaggcaagtgaaaatgaatgattgacgacggttgatttccacatcttactagattttaattcttaaggatttcaaatgaaaccagaaggtggttatgtaaaaggcttaaaatgttcttatgtttaaagagattctgttattagccccatgaactcggactatgaaatttttaagccttttatttttctaactatattactgtagggctggatattaggtgtcatataggaaaccccaaagttattgctgtttgctaaagccaaaaagcaggaaatttttgtaaatgccaaactgttgaaggcccataaaaaaatgtgtactactgacggggcttttactaggcttcctgggggggtaaaagtcgaggtattgctggcattcagggggacatgatgggactaaatgttttccattaaagttttttattttaaaatttaaagaaaaataaaatggctttccctcaga

SEQ ID NO: 681129 - DNA, 331 bp, Homo sapiens
  misc_feature (16)..(16): n is a, c, g, or t
  misc_feature (18)..(18): n is a, c, g, or t
  misc_feature (33)..(33): n is a, c, g, or t
  misc_feature (40)..(40): n is a, c, g, or t
  misc_feature (47)..(47): n is a, c, g, or t
  misc_feature (54)..(54): n is a, c, g, or t
aagagcccttttatgngntgaccactaataagnaaacccngttgggnttttaanaaaagcgctgtacggctcgataccggatatcgtcgaccagctccgttacatattctttgcagaagtaaaggtatgatatagttatatagtgttcggctgtaaatgatgctaaatatacttatgcaattaagggcttacagaacatgtgaaacttttttactttatgggaataaggaatgttgcacctccacatttatgcttctggatgtgaaatcatgtaattatttctgctgttatataaagtgccatacttttaataaaggaaaatgtacatatg

SEQ ID NO: 681130 - DNA, 147 bp, Homo sapiens
agggtgtatgactcctgactggcgtcagatggttgtaccactgtggttttgatttgcatttctctgatgatcagttatgttgagcttcttttcatgtttgtggacatttccacgagtcacacaaacatgaaaagaagctcaacataa

SEQ ID NO: 681131 - DNA, 611 bp, Homo sapiens
  misc_feature (5)..(5): n is a, c, g, or t
  misc_feature (19)..(19): n is a, c, g, or t
  misc_feature (35)..(35): n is a, c, g, or t
  misc_feature (44)..(44): n is a, c, g, or t
  misc_feature (54)..(54): n is a, c, g, or t
  misc_feature (67)..(67): n is a, c, g, or t
  misc_feature (100)..(100): n is a, c, g, or t
  misc_feature (115)..(115): n is a, c, g, or t
  misc_feature (133)..(133): n is a, c, g, or t
  misc_feature (322)..(322): n is a, c, g, or t
  misc_feature (434)..(434): n is a, c, g, or t
  misc_feature (583)..(583): n is a, c, g, or t
  misc_feature (585)..(585): n is a, c, g, or t
gatgncaacgtcgaatggnaattttgttccccttnttctttggnggactttggnatacgatgacttnccattttgtgcaagttgtgcattgcatacctcnagggggcgccacccncatatttatgaaatgccnccccaggagttgcacagacatagtttacatgccaataacagttgctctggttttggggttgtcctgggttgctctggaactgggaggaactttatttctggccattagaggccctgagcatgacattgagtatcctttcaagaaaggagaaatgttgaacagagaggacctcatttttataactcttgnccatcatctagttacggagcatccacttttcacccctgggccatatccatttgacggatgaaaaatcatcaaattataatatcatggcttttacttttgatagcttctgccnggaacatggcggtaacagcttctcattttcaattgattcattgggggagaaaatatacacgactgccctaagactttctattacataccatttgtttgacgggatttctttagtttctgtagcataacttattctaactggtcctcaancnctttgcaataaaacctgagattgtga

SEQ ID NO: 681132 - DNA, 105 bp, Homo sapiens
agatccctttccatcccgagcttcaagaggaatcggtaatgtaggagaagaatctgagcagggaaccgtctgtttcctggagccccatgttaggaccccagtaaa

SEQ ID NO: 681133 - DNA, 451 bp, Homo sapiens
  misc_feature (2)..(2): n is a, c, g, or t
  misc_feature (45)..(45): n is a, c, g, or t
  misc_feature (258)..(258): n is a, c, g, or t
  misc_feature (270)..(270): n is a, c, g, or t
  misc_feature (273)..(273): n is a, c, g, or t
  misc_feature (311)..(311): n is a, c, g, or t
  misc_feature (326)..(326): n is a, c, g, or t
cngtggtcttagttgctggagcaggctgagtgtccccgcgggttntgcatctgtccccagaaccttttccccaggcccgtgggggaatagggaagtcactctgagctagaaattgtcgaagaagaaaagaaacaaccttcctagccttggaaagcctgtccctgcttttgatagaattattgcctttttgtaggaattacagtagcaaaccccaggcccgtgggggaatagggaagtcactctgagctagaaattgtngaagaagaaaanaancaaccttcctagccttggaaagcctgtccctgcttttnatagaattattgccnttttgtaggaattacagtagcaaaccccaggctgccgctgaattcctaaagccacattctggataagaactatcctagagaatgagcaaaagtaggaaattcagtcgacgcggccgcgaatttag

SEQ ID NO: 681134 - DNA, 285 bp, Homo sapiens
ccgcgtagccgccggtcgctacggcctgaacatcgccgatgtccaggccgtcatcgccggcgcggtgggtggcgaaaacgtctcggaaacggtcgaggggcttgcccgctttccgatcaatatgcgctacgcgcgagaatggcgtgattcaccacaacggctggcagaactacccatcttcacgccgatgggtcagcagatcacgttggggaccgtggcacgtatcgcgatcaccgatgggccgcccatgctcaagagcgagaacgcacggccctccggttgggt

SEQ ID NO: 681135 - DNA, 121 bp, Homo sapiens
ctgcctcagaagggagccaccgtgaacctctcgagtggctcccaaccgcagtggcttttcgagacatggcccatacttctggcccggctggacgaagcgaatgccgaccctttggcctctc

SEQ ID NO: 681136 - DNA, 426 bp, Homo sapiens
  misc_feature (1)..(1): n is a, c, g, or t
ncaccaagttcttagctctacttggcaaaacaggtctccttatggtcagcctttcagcgcttctcctcatgagcgccaacatcatccataccagctttcggttgctcttagggtgccttgggcatgtgtgttctaggcccatcaagtgcagttggtatgttcatctgtatcgccttctcacacagtgtgaatatgtctgcatgatgtgagtatgttacagcattaaactctgtggcaatgtatgtccaggcgacttgaagagctgaaaagcatggttgcatgttcacgcatgatgcgttgcagcatctggtgggtctggcacttagtggcgttctctcatgcgagttacacatctggttccggtcctcggtagacacgacgtctacccacgaaagttgatagggcagccgcttgaattggtcgtcg

SEQ ID NO: 681137 - DNA, 152 bp, Homo sapiens
gcctgttgccaagaagcagcagcaactaagtgccattacagggtcttgacagcggaacctgtgccgcgtacctgtaaattacggcactaggcaatggcgggcaggcttacaaaggcaaggccggttttacaaaggacttgcccgagggaaga

SEQ ID NO: 681138 - DNA, 1161 bp, Homo sapiens
  misc_feature (1161)..(1161): n is a, c, g, or t
ggccagagcgtcctcgtggaagtgacatcgtctttaaaccctgcgtggcaatccctgacgcaccgccgtgatgcccagggcaagacctagggcgacctggaagtccaactacattccttaagatcatcctagactagttggatgattatccggaaatgttatcatgtgtgggagcagacaatgtgggctccgaagcagatgcagctagatccgcatgtcccttcgcgggtaaggctgtggttggtgatgggctaagaacaccatgatgcgcaaggccattccgagggcgacctggagatagagcaacccagactctggacgaaactgtctgtcctcatatccgggggaaatgtggcgcttgtgtgttcaaccaaaggaaggacctcacatgagtagtcagggacactgttgctggccagagtacaggtgccatgcgtgctgcccgtgcgtggtgccattgctaccatgtgaagtcgactgtgcccagcctcaggaacagctaggtctcgggcccgagaagacctccttttgtccaggctttaggtgatcacgcactaaaatctcgcaggggcaccattgaaatccgtgagtgctgtgccgcgtgctcaatgactggatgacaaatgtgtggagcgcagcgaaggccacagcttgctgaacattggtcaagcatcgtcccccttctgctttggggctgggcatcccagcgaggtgttctgaccatggcagctctacaagccttgaagtgcgtgatattcccgaggaaatctctggattctcgattccgggacggtgtccgcagtgtttgcccgtgtgctgcttggcgatgggtaccccgctgtggcttagtaacccttttatcgcgagggtcaaacgagtccgggcttgcctggggaccgttacactctccttgggaaaagggcgaggggctcttggggaccaacattccctgggggcaccccctgcggtgtccccacgtgtctgtgtgtggtctcccccatgtgtaacagaaatggctgcaggaatctatgtgggtgtctccatcacaacagacccactcgttttagaaggaagctctccaacccgctgcgcaagggggagacgctgtgccacctgcatcacatatcacatcgttgtcctgctgtatcgtcattctactgn

SEQ ID NO: 681139 - DNA, 1254 bp, Homo sapiens
ggtggctggaagacatggccactccagctcggtgttgagcactgcgacgcagtcgtcaccgcctttagtgatgatgattaaaggtggtgagctgtggccttgaaaaactacgtcatgtgaaaactcgatcatctatacaggtgcttaaagctgtagaggatctatcagtgatgaaatttcatgtgaaatggtgcagtcagcctcagttttccagaagccggaacaggatcctctagataaggccacggtgtggcatgctgctctgaaccaggacctggagccggaccaaagtgccatgtcgtttaaatgtatagtctcctcagtccggatgccaggatgggactcagtcagcagttccttgacctcatgctgcacgtaatctgtgtacctctaatagtaatcgccagtgcgatttctattgaggcttcaatcttataaacggacagtgacacgcaacattgaaggattaaatgtctagggagagaagccttttctggccaagtgcacgtgtgaacaactgaagatgttaccaaactgacgcgaaacaattttatccagtatcacttcacacctcggtggaatagacactaggagtattacatactactagcagaaattcggacttgggggaacgtgggcgcaggggatagtgtaaacaccgttggaaatttgaaaccattgactataattaccctccgtggtagcggacacggaacgccccgttacaccgaagggacaacactttggaatggcactccttgcaaggttatcgagacaggaacgttacactgcctttgaaaagacacacaaagttaacaacaagggggaattgcccgggccatttggattgcttgtcccttcctatgggttataagtataacgcacaacattaacacaggttgaagtcattgggcagaaagtccattggcggtaaaacgagggggaggtatggcgccaaacccccaatagaaacgccgaatatttgggcgcttaattacacggacaaccctttataagacaccgtttcaccacacgtttcacaattggcacacggcgacatttggcacataaacacacagggttacattaccatatggagtgtgttcttacccggacaaaggaagattgaccctatttcgctacggggaaaaacgaatgaaatcactagctggcacacatacggaacaatacaattcaagggagggtattctacacattgtgtactgggctagccaacaacatcaggtagtggtc

SEQ ID NO: 681140 - DNA, 789 bp, Homo sapiens
cctagatgccgcttatacgaagctgtcatatgaaacatgccatatgcatagtatccatgagtactcttggaaatatggcattcctcaagttgtttgtgagggtgccgaaaggactgctggtcatgttcaaagcactgtatggaacgagaccgccctctcataggatccaaccagtggagtgattatcttcatggaagatgattgtgtattccagtgactacctcattcatttcctatagagaatcacccaggccttggtctgttctaatatctggaatcctctgtctactacgagtacatctgtcacacagaatgttacccacttactccctatgttttctgatcacatagaatctgagaggggaaataaaacttataagttgttgagtccaagattgacaaactccgttgtcttaaagggctaagctggggtgacaggtgcagcaggccaggcataagtattagggagcaagggaaactgtgggaaactgaatggcagctatctcataggaggatgaaattctactcttttacaaggtatttcaaggccaacaaagcatcactctgggctggggttccatgcacgaactaccaactttttagccccaaactatgactacctcccttatttctagccgcgggcattttcactgtcactgtgtatatggcctaacgtgtctatccgtttctggccttattggctccctcggctgggtatggagtgcatgattcccatttccatcgcacacccttcgcctcatccgcaacgcgaataccacaccctgacgg

SEQ ID NO: 681141 - DNA, 580 bp, Homo sapiens
  misc_feature (34)..(34): n is a, c, g, or t
  misc_feature (283)..(283): n is a, c, g, or t
  misc_feature (292)..(292): n is a, c, g, or t
  misc_feature (345)..(345): n is a, c, g, or t
  misc_feature (371)..(371): n is a, c, g, or t
  misc_feature (383)..(383): n is a, c, g, or t
  misc_feature (397)..(397): n is a, c, g, or t
gtgcacgtgggtttggttgtcgatgtaggaatantgtagggtttgcttaaggttattgggaattagagttcggttaacgagctggcttttatcggtttgtaagatgatggctgacgaggttttgggtagtgggttggttagttgggtgtttttagataaagaggttatgctggatgctgtttaagtgctggtggttgagatttttagtaagagctctgtggtggtgtagagtattaaggttaacttgttgtatttttgcgaccatttggtggttgagagcttnaatagtggngttctggaactgagctgctgtcagacccaagactcgtgaagttcgttccggcnacgactgagaacaggaactgaaaacngtcacttctcangctctgagagcctngtgtcccaggccccagccagggggccggccttgtcccgcctcatccacagaaagggaggatgggcgatgacagttgtttctatgccttctgacccagtttcccagtttataactttatgacaatgagtttttcaagcccaaggccttattttcaccccacaaacaataaagcaaagtaaagaa

SEQ ID NO: 681142 - DNA, 203 bp, Homo sapiens
  misc_feature (137)..(137): n is a, c, g, or t
  misc_feature (152)..(152): n is a, c, g, or t
tccggccaatgatgtcatctaggaagggtgtggcatagaagactccccacacagaggtctggggcatttcaatgcacctggagtagagcaggcagaagagtctgagaggagaggccagcgagggaggagggaaaccngaggatgtatttccnaaggaagaagaaagtgtccatcctggctaacacagtgaaaacccgtctcta

SEQ ID NO: 681143 - DNA, 345 bp, Homo sapiens
  misc_feature (1)..(1): n is a, c, g, or t
  misc_feature (45)..(45): n is a, c, g, or t
  misc_feature (110)..(110): n is a, c, g, or t
  misc_feature (136)..(136): n is a, c, g, or t
  misc_feature (148)..(148): n is a, c, g, or t
  misc_feature (162)..(162): n is a, c, g, or t
naggcccgggcgtcaggcccagtcactgtgccggacccgtgccgnggcctaatactgcgtctggaactgagctgctgtcagacccaagactcgtgaagttcgttccggcnacgactgagaacaggaactgaaaacngtcacttctcangctctgagagcctngtgtcccaggccccagccagggggccggccttgtcccgcctcatccacagaaagggaggatgggcgatgacagttgtttctatgccttctgacccagtttcccagtttataactttatgacaatgagtttttcaagcccaaggccttattttcaccccacaaacaataaagcaaagtaaagaa

SEQ ID NO: 681144 - DNA, 134 bp, Homo sapiens
attcttttgcaaatggcagctcttgctcaaagaccggaaagggggggatgtcattttcaagaggggtcaacctgagttctgtaaatggaagattctattttcccgcctcgcctgtcctggcgaatcttatgccg

SEQ ID NO: 681145 - DNA, 486 bp, Homo sapiens
tcatccttttgacattatgtgaatattttactggaaaataagactaataaattgttaaaagtttttaaaaaaaaaaaaaaaaaaaaaaaaaaaaaaaaaaaaaaaaaaaaaaaaaaaaaaaaaaaaacaacaaaaaaaaaaacaaaaaaaaaaaaaaaaaaaagaaagaagatagagtagtgtcgactttctaggaatgagtatatctctgagtcagcgagaccgtcacttgtctatctgtcattcgctaccttctcggtagtctcacagacgcgcgctcggcgcctcctcatgttgctctcagcgatgcgtccgatctctcgcgggccatctgtaccgagtactacagagaagctgagggagcatgacaagtcgacgcggctcacagagacacacgtcacagtgacagtagctcgagatgatcctgactccagctactgcagcacgaattgacagtgccatccgagcgccagcgactaccggata

SEQ ID NO: 681146 - DNA, 1193 bp, Homo sapiens
ggaggagctgctcttcatgaagaagaaccacgaagaggaagtaaaaggtctagcaagctccagattgccagctctgggttgaccgtggaggttgatgccctcgcgaagatctctaggacctcggcgcgaatgatcattggcatgatcgagtcacgaggtccccaatattgatctgagtctgggctcggcaagaactcgagaaggcagctatgactaagatagcgtgtgtctcgagcgatgattgacggaggagcagccacaaggtggatcacgcagatcagtcgtgctagacgcgttagtgcatgcctggcattgaggagcagacagcgtcagcagacgccttgagggagcagtatcgagttcacacgattccctttgtgatgtactcagtaacacctcggtacattcgctagtagatgcacaacttctgcaaaggtcgcaagtcatctgagaggaatgcaagtcactggaaggggatgcgttggggaagcgacctcagccctagcggccccttaacaaggaattggaagacagaccttcgagatcgtgggaatcccgttgctgtccatcgcttgaatggtgcacgcaagcttggggcaactagtaactccggagagccatgtaaagggcatccaagccgtcccatgtgcacctatgggtacgtcatagatgggctcctgtcttggtaatcatttcgagggttccacaagctcgcgaggcgtctgagaattcggccgagcactaatccgggtctgaccttgcctttggaaacgtgatgagctgatggaacttttaaattcttggggtagattgccctttgggaacatgcaagcaaaacttccaattgcaaaaaccaatcccaaaaagaaaccaacacaaaccagacgggaatacggtgggatggcgcaaaacggtgggtaggttctgaagaaccaaatgaacaacccaaaaggtttctggaagggccatttaaaggcccaggcaagaaagccaaggggttaacccttttggggccgaggccagtgaagggccacctttaacacaacagtttcccagcaactttccacacacacacaacgacaacaaacaggggggcggagacacactacttaaaaagatatcctctcgaggggggggccccacaatattacaagggttagcgccaggattctttgtggacacagagggggccc

SEQ ID NO: 681147 - DNA, 101 bp, Homo sapiens
cccaaaggggggggggggggggtttccctttttttttccacttttggggggcggggggggggattttttccttccccttttaaattagaccccggggttta

SEQ ID NO: 681148 - DNA, 845 bp, Homo sapiens
gtggcggagtcagcagccaggtctccatttgtcagccatggagctcattggaacctgtgtgagattctctttattgaagtagcaccagctggccctctcctccttcaccttcttgactgggtccgactgcacatgtgcgaggtggacagttgtcggcagatgtcctgggcggtgacaacccaagcaagcatgaaaacttctgggacctggtgactgttctggtgcttcagggccggctcgatgaggcacggcagatgctagccaaagaagctgatgccaacccctcttgtgcaggcatgttggcggggtcctgtggggaccgtgtagtgaggacaatgcccattctcagctggctggtaatactcagacatttgacagagtgggagctgaaggtggcagcactggcgtgaggagtgtgaaagacacttacaagacaacacatttgcagccaacccccgtctggagtctctctgcaagatcatgctgggagatgaggccgccttatggagcagaaggagcttctgagcaactggtaccatttcttagtgacgaggctgctgtactctaaccccacagtgaagcccattgactgcacttctatgcccagtccagcctagacatgttttcttggaggtgagagcagtccagaagcactggacaacatcttgatggcggctttgagttcgaacatttcaccaggtgatcacaagagtgcagcatcgcctgaggcactggtggttcgtaatcaactcacagaacttttggtcactgcggattctccagtccaaaaagtctctattgggtctaaatgagagaatcctcctggggggtacggccagacggtg

SEQ ID NO: 681149 - DNA, 840 bp, Homo sapiens
gggtgggggtgtgggcagggtggtgtagagtgtgcctggactgcgtggtcggggtcggcttcccttcggtccccttggggacgcgtccccgcttcgggttacccctcccgcgggtctgttacgctctctttgggggttttctctccccccccgagcccgggccgccgatcctttggtcggagaaccgcccgcaaaactgtccgttgccgaccccttgatcgcaaagttccccgtgtctccggtcctcggaaattattccccgggtcttcttgtcccctttttgctcgcccgggtatttaaccaatatacacttggggccgcaccaccaagactgttattcacgcaagcggttccccaaatcccggtctcgtcacatagggggactcttgaggcgccggacaaccccacaatgtggaatatagcaagccccagagtacccaaggaaccccctgggagaagatatcaatccacgggaacattccatctccacgtatctacagtcggtatacctatttcccccccaagaggctggttgatccccctccgtcagattggaggagcaaagtctctccccctgtcagggtttaggagacccccaagcaaattttgggcggcgccaaccacagagcctcagaataatgaaggtcgactgaacccccaaggccgaggtgcccacgtgccagggtgttcgtggaggcaaggttgatcgttattcaaacaccaaatgcgtgcgggcagctccatcacgaacgatcaatgattgtgcagaaactccccgccgccgcaatttgaagaaatttggggtttgttcaaaacaaaggccaaaacacccacaaaaca

SEQ ID NO: 681150 - DNA, 189 bp, Homo sapiens
cttccaaccccatataaccgttctaatgcaggccctctggatgaactttgaagagtctctgcagaccacagggacacacagttttgacggcatttggaaggccagcttcaccaccttcactgtgacgaaatactggttttaccgcttgctgtctgccctctttggcatcccgatggaactcatatgggg

SEQ ID NO: 681151 - DNA, 226 bp, Homo sapiens
gtggctgctgtcggggggtcgcctgttcgcgggggtgcggcgggctcctgggggtcgggcccctttcggggttcgggtgtctcgtgtgttcccctccccgggtcttttctgggttgcgggttttgtgtgggccttttttctttcttggccctcgcgttttccgccctctcttgggtttgtgggtgcctttggtgtttgcctgtgcctgtggctggcgtgccccgtg

SEQ ID NO: 681152 - DNA, 192 bp, Homo sapiens
ccacttcaggtgttccctgcatggcccgcagccgcctggactaccgcacgctcgcgaatcctggaatacggaccgcggctcctatttctgtcggttttcggaactgaggccctgcttcagagggccggccgggggcgattcagtattgcgccgctagaggtgaatatcttggaccggcgcaagacggaccag

SEQ ID NO: 681153 - DNA, 418 bp, Homo sapiens
gatgccagctcttcttgggtccaacctaaatcttttcgtcgcgcccgaattctgaaaccaagaccctatcgagaggagttctattcatctccaaagaatgctcagccgatgactatagttccacggactaaaatacccatttgattgatttctccataccagatcggcaactggctccggcgacaacggcacaaagtattcgcggggcttatgcgtgcataaaatctccacgacgacacgggtgtcttgcaacaaaaaaccccgcgtttgcggggtttatcttgcgatcgtactttctaatatcaatttggtgccgaaggtgggactcgaacccacacgcttttaagggcggcggattttgagtccgctgcgtctaccattccgccacttcggcgcggacgcgaagtatagccgggac

SEQ ID NO: 681154 - DNA, 203 bp, Homo sapiens
tgatgagccggcccgtattatgccagctacacttcatgctcttgaattctattatatccatgtgcttgtgagcaaattcacatatacttaagcctaagtgacttctattgctttcaaccaaatgtcactgactctgaccccattgtatgtcgcaggagagaggtgtggaataagaggttgttgaccttcaagcggatcagcga

SEQ ID NO: 681155 - DNA, 717 bp, Homo sapiens
  misc_feature (159)..(159): n is a, c, g, or t
  misc_feature (191)..(191): n is a, c, g, or t
  misc_feature (229)..(229): n is a, c, g, or t
  misc_feature (259)..(259): n is a, c, g, or t
  misc_feature (266)..(267): n is a, c, g, or t
  misc_feature (301)..(301): n is a, c, g, or t
  misc_feature (310)..(310): n is a, c, g, or t
  misc_feature (318)..(318): n is a, c, g, or t
  misc_feature (341)..(341): n is a, c, g, or t
  misc_feature (353)..(353): n is a, c, g, or t
  misc_feature (357)..(357): n is a, c, g, or t
  misc_feature (361)..(362): n is a, c, g, or t
  misc_feature (364)..(364): n is a, c, g, or t
  misc_feature (368)..(368): n is a, c, g, or t
  misc_feature (398)..(399): n is a, c, g, or t
  misc_feature (407)..(408): n is a, c, g, or t
  misc_feature (410)..(411): n is a, c, g, or t
  misc_feature (414)..(415): n is a, c, g, or t
  misc_feature (423)..(424): n is a, c, g, or t
  misc_feature (431)..(431): n is a, c, g, or t
  misc_feature (447)..(448): n is a, c, g, or t
  misc_feature (460)..(460): n is a, c, g, or t
  misc_feature (474)..(474): n is a, c, g, or t
  misc_feature (487)..(487): n is a, c, g, or t
  misc_feature (504)..(504): n is a, c, g, or t
  misc_feature (506)..(506): n is a, c, g, or t
  misc_feature (513)..(513): n is a, c, g, or t
  misc_feature (515)..(515): n is a, c, g, or t
  misc_feature (524)..(524): n is a, c, g, or t
  misc_feature (575)..(575): n is a, c, g, or t
  misc_feature (596)..(596): n is a, c, g, or t
  misc_feature (601)..(601): n is a, c, g, or t
  misc_feature (699)..(699): n is a, c, g, or t
tcaactgaatggaaataatttaaaaataagcaaggcttaaattggggtctttcaaaaaactcaaaacattcttggtgactgtatctttaacaaatggaatgacaaaactagttaagtcatattatctcaatcaactccaaaactcaatgttgccaacangtttttctacttaaaagcaaacaaaaagctangcctcataatttagtaattaccatgtttctggggttcngttctcaaatgccacagaaagatacctgangaaaggnngcaaagcacctagtctcatcagtcttcttcaaanctttaaggntgctttcncaatctcactataaatatttagnttcctatctganaganttcnncncttntgtgggtgggggtgggctggggggggtggnntttgctcnngnntcnnactagggnngtttgancaagccacctctgggnnggcggggctgcnacactagataaganctcattcctatcncttccaagagaccaagntnatctcantntgaattttngtggccaatatgttattgttcttagcgatactttggtttctaatggcaagnatgttgaaaaatttatcattnagtgnatttcataacacatagaaataaatgattctattaaaatataaaaacatccatttacttgtcctatttccagtgactttaaatatcaaatctattatanaaagacaaaattatttgc

SEQ ID NO: 681156 - DNA, 214 bp, Homo sapiens
cgagaataagtaccacatgacgcagatacagagataacgagtacttgaatatgatatgagggtggatgatttccttcgtcgcacacagctgttgtcaggtggccggagaagtagaccgcggtgaaagagaccggaacgagagcgagaccgccctagagatagcagacgagacagagagcgagatagaggctgtgatagagaaagagaaagagag

SEQ ID NO: 681157 - DNA, 999 bp, Homo sapiens
  misc_feature (262)..(262): n is a, c, g, or t
  misc_feature (321)..(322): n is a, c, g, or t
  misc_feature (347)..(347): n is a, c, g, or t
  misc_feature (355)..(355): n is a, c, g, or t
  misc_feature (408)..(409): n is a, c, g, or t
  misc_feature (420)..(421): n is a, c, g, or t
  misc_feature (440)..(440): n is a, c, g, or t
gagaagaacgagattgctccgcatcagctggaacgccagaacaaggaagcttagggtcaagctgcacgagatggagggcactgtccacgtccaagtacaagggcctccatcaccgtcctcgaaggccaagattgcacagctggaggagcagctggacggacgaggaccgaaggatgcgccaggcagactgcatgacaggtgcgtcggaccgagaagaagctgcaggatgtgctgctgcaggtggatgacgagcggaggaacnccgagcagtacaaggaccaggccgacaaggcatctacccgcctgaagcagctcaagcgnnagctggaggaggccgaagaggaggnccagcggncaacgcctcccgccggaactgcagcgcgagctggaggacgccactgagacgcnngatgccatganncgcgaagtcagctccctanagaacaagctcaggacgcggggaccatagacgtaatgtcgtgccccggcgaatggaccggaaaggcgcggggatggctccggaggaaacaggtagataggaaagaggcatggggcatgaggccaacacatgacgacctaaaccctctatctcctgaagcctgagatggatggcacagaacgactgcacagctcccgaaacacaagaaccaagcaggaaagaacatactaacccaggcagacctatgagaacagatcgagaaaactcgcccacacagggagcaacaaacacgaagaaccaagaacaagaagccagacacgggagaaacaacagggaaaccaaaacaagagtgaggccacatgcgacgagaacaccgccacgaggaccaggggaaacaacacaaacacagcacaggacaggggaaagagagaacacgacccgaggaaacacatgggaacaatcaaaaagagaaaaaaggagaaaaacggagaaaaaacgaagagacacagcagagagaaagaagaaagaaaacaccagagacaaacaacacagagaaaaca

SEQ ID NO: 681158 - DNA, 551 bp, Homo sapiens
  misc_feature (129)..(129): n is a, c, g, or t
gaatccgaagttggaccccggggggcgaagggtgccggtccgggtcccgtcagcccctccaacgggagaatcagcgcccttacggcgaaggcggcatgcgttccttcggacgattgcattttgtgttgnttaagggcctcccccaggggccggcgggcccccacccttccgggggccaaaggaatttcgtgctttttgggtttccccccacgcgcctccccggattttaaggaaaacaaaacccatcggcgggccctggggcctttattgccttcaaacttggggttaggttaagcccctcgggagaaaaggggggctcccctttgcccccccactagtcccccaaaactttaggggggggggttcccctcggggggttttttttttttaaaaacccccctttttaaaaaagggcccggttggggcttttccaattttttagggaaatgctttggtttgtttttttccatgatccccccccgaaaaaattgtttttccaaagttttgggggggcggttttttgttttttaaccaaaaattttgatggggga

SEQ ID NO: 681159 - DNA, 515 bp, Homo sapiens
tagagatggtgcatttaaccaagatctgactgtgcacatttaactaccatcaatgaagaggagcaagaatgcagcgtggttgctgaccacataatagtttccttcttgacactgtataacacgtaggaatactgttcacattccaaactacctatgacaatgtgatgtcacacaataaaaaggtgagaggaatctcatgagagactatcctgcatgtagggatactagtgaactcatagccagacggcattttatagggcttgggacaagagatctatactctaaactaacgcattggtgttcaggcttgccatcagaagcttatgctgaccatggcaaaacgacctatccactgtttatcatagggtctattgatatctgtgctggctctgtgcacaacgccaaacattgctacaatggttattgtccgcaagagtcctaggtatatcaagtttatcatcaccagactgtaccttactgatgagtgcctggctaacagctaccttgaaatggtc

SEQ ID NO: 681160 - DNA, 345 bp, Homo sapiens
  misc_feature (173)..(173): n is a, c, g, or t
aatttggttccccttggggttccttttttggtttgaggggccttctttgccgggttttggaaccggaaaatttcccttcccccccccacggggcccggggtaaattcccctccccccgggggaaaaaccaccccttgttttgggggggttaaggggggttttggttttccggnggtttggttttttggtttttttttttcccccgccccttttcccctttttttggagggaaagggaggaaatggggacaaggagggggggggggggttttttttttttttttagcccccttcccgggggggggaatttttttttaaaaggggccagaaaaaaggtggtttttga

SEQ ID NO: 681161 - DNA, 94 bp, Homo sapiens
taaagcctttttaacctgggaccccccctatgggttaataaggtttttaaaaaaaagttaaaattttgtttataaaggttaatatttttattga

SEQ ID NO: 681162 - DNA, 190 bp, Homo sapiens
  misc_feature (15)..(15): n is a, c, g, or t
  misc_feature (56)..(56): n is a, c, g, or t
  misc_feature (84)..(85): n is a, c, g, or t
  misc_feature (106)..(106): n is a, c, g, or t
  misc_feature (141)..(141): n is a, c, g, or t
ggggcagccacatgntaaacagacaaggtgagggtcagaggcggtactcggggganagagatgagggcagggaccactctgcanngacgcgcccaggcgcacagcnatgccccctcctagtccttctcttctccgtggctnatgatgtgcaccacgttcttgtagtccaagttgccagtcacgtcagggg

SEQ ID NO: 681163 - DNA, 144 bp, Homo sapiens
  misc_feature (53)..(53): n is a, c, g, or t
tgtctggtgatctagagatccagagacagaggacagtggtcgaaatattgggngacggaaggtgtttgtaatatgcctatggtgggtgattaatgcttgtacattacgtttcacttttaattaattggggtaagggtttattaa

SEQ ID NO: 681164 - DNA, 140 bp, Homo sapiens
cagggtttttttggggcaagcaaggggtggggcccggggtcccctgttttttttgtaagaaggggggggggggggggtgtttttttttccttttggggttttttttttttgggaacccaatagaagattttttgccctta

SEQ ID NO: 681165 - DNA, 135 bp, Homo sapiens
gcaacgatgggaaggagagaagggaaggaggtgaatgagaaagacaggaagaaaattgaaagcatgtgcctggctatgatgacaaagccagaggtgatcatgtcagcagcaggagaggctcataagtggagcctc

SEQ ID NO: 681166 - DNA, 427 bp, Homo sapiens
tacatacaggattggcagtgagagcgtcagagggtggcagaagtatctcacactaaccaggtaaagactacacaagattaataccatccagcatcgaggatatagctgtggatttaacaaaccatgcttactgctaactacaggagttgatgtaaagcccagtccatcttaaagatatgactgcttgaatcagcgatccagataaaaaggacaatatgcacaacctcacactcacaatcctgtaggaaccaagaccagtgaactgatatgacatcagaagacttcaaaattgcggctcctttaggatcccccaacagtgtatctgcactctacttcaaacgtgcctcttcctcagaagtcagagtcacctacacaaggtctgagatgccattctgtcccaaaatgcaaggaacactaaggaagacat

SEQ ID NO: 681167 - DNA, 489 bp, Homo sapiens
gccgggcgcgggtggctcacgcctgtaatcccagctctcagggaggctaagaggcgggaggatagcttgagcccaggagtttcgagacctgcctgggcaatatagcgagaccccgtttctccagaaacaaaaaaaaaaaaaaaaaaaaaaaaaaatttgttgggcggccttgggcccttggaaaaagtttttagaacccatttggttgtggggggggggcccacggaggtaatggtggacacgtgggccacaaggtgtggttcccaaagggaaatcgggcgccggggacatgaggggcggggagtttcccacccaaagtaaaaaaaagccgccgggggggggaaaaccagagcaggtgttctgagacacaattcccacggatggaggcggtctcagggagggcaaatcagccgggctctctactcaacacaggggggtcaagagggaggagctccgaatattcatattcaacgacccggccttgggggc

SEQ ID NO: 681168 - DNA, 727 bp, Homo sapiens
  misc_feature (507)..(507): n is a, c, g, or t
  misc_feature (517)..(517): n is a, c, g, or t
  misc_feature (544)..(544): n is a, c, g, or t
  misc_feature (549)..(549): n is a, c, g, or t
  misc_feature (553)..(553): n is a, c, g, or t
  misc_feature (562)..(562): n is a, c, g, or t
  misc_feature (564)..(564): n is a, c, g, or t
  misc_feature (569)..(569): n is a, c, g, or t
  misc_feature (577)..(577): n is a, c, g, or t
  misc_feature (612)..(612): n is a, c, g, or t
  misc_feature (655)..(655): n is a, c, g, or t
  misc_feature (701)..(701): n is a, c, g, or t
gaatgcccctcaccttgggtcttttgctgtgcctacctatgtatgtctggattgtgctgtgaaacgacgtgaatctaagtgacgatctctgaggattattagtataaagatagacaagtgatagcaccttctaatacttcagatgctttagttggtaatacagacagggtaacctgtaaactatcatcacagagttactgtgactagcaggttcatacacttgtaaccaacatttcacacaagagaaggaagacaattactgtgaaatgaaagcctctgtactcgtaccagtggtactttttagttttacccacgacgaatgttgttatttttagcaaatagaactcaatgcagtgcattggttattaccctgtgtaccttgtccctcattttgctgtgacaccctgaaaaagctgaccacaaatgcagtattatcttgacatacctctgtcctcctcagtgctttttaatgaaatttcacctgccccttgtgttcctgctttgganagttttggcncttaagcatttggcattcttctattgnatggnatgnaattatagnanattgnaggatggnctgaaatgtccacacactttctatgcatacaaatntggtgaattcccaaagtatgctttggaattggtcatagtcttncgtatcatgagtgtgtatcccagaagatacagaatgcggtcatttnacctgaaattatttgagaacactggg

SEQ ID NO: 681169 - DNA, 744 bp, Homo sapiens
  misc_feature (354)..(354): n is a, c, g, or t
caagagcaagtacatcaaagatgtagaaggtaacaatgtatgcaacagctagatataaacttattccaaggtctttaaggagcctagagaaaagaaagatttctcacagacgtgtatgtcgttatctgtttcgtatttcaagttaggaacttgccagtgattgatgttttgaaaagccgattctaaagataataggagttaggaatataaataaagtgtttgctagtgcctgactgaagttcaggcttagaggcttatcgctaagtgataaacttcaccagcattccacgaaaaagctggtatagcttttcttgtctgacttatgtcgtggttgcaccccttcagcaatatggncaagacacaggttatgctagaacgtctggatcaacgaaccatcgtgtcttgcacgtagtcacacaatgttgtttgctgtgtgttgaatggtgaaggaatactgttcggtattacgagaacagaagattggtgactgtacatttatatgcaattttacttttcaagacaaatataaggtatgttagccagagaagtattctaataaatgcgaaacaacagctggagctgctgtacatcaaggacagattacctggaaaacatagtgttccttatgtgtgattgagagccattcagaaggagacttcctttgtgttcagcctatacttttccatatggtataccttgaagtagaaattagcacaccgattggtattttgctacctttgataa

SEQ ID NO: 681170 - DNA, 351 bp, Homo sapiens
  misc_feature (8)..(8): n is a, c, g, or t
  misc_feature (44)..(44): n is a, c, g, or t
  misc_feature (50)..(51): n is a, c, g, or t
  misc_feature (56)..(56): n is a, c, g, or t
  misc_feature (96)..(96): n is a, c, g, or t
  misc_feature (100)..(100): n is a, c, g, or t
  misc_feature (117)..(117): n is a, c, g, or t
  misc_feature (131)..(131): n is a, c, g, or t
  misc_feature (173)..(173): n is a, c, g, or t
  misc_feature (183)..(183): n is a, c, g, or t
  misc_feature (187)..(187): n is a, c, g, or t
  misc_feature (189)..(190): n is a, c, g, or t
  misc_feature (196)..(196): n is a, c, g, or t
  misc_feature (199)..(200): n is a, c, g, or t
  misc_feature (314)..(314): n is a, c, g, or t
  misc_feature (336)..(336): n is a, c, g, or t
  misc_feature (349)..(349): n is a, c, g, or t
ttttggtncaacaccctgacttgactgcgcacggcccaatcctnatggannaactncagcatgcccagcctccatcctgcagccagaatccctggnagtntatttcctgccaggctncagggtttttcccncctaaggctacattggaaaatatgagggtttattttttgttncaggtttttncttntnnatattnttnntttcctgtcacaaaggcaggaggatttttccacttactcatatcgaggccagatttttaaagccagctaaggcagcaccagctgtgcgggatttaaagcctatagctcagctgnaaaaaaaggtggggggcagggnagggaagataaangg

SEQ ID NO: 681171 - DNA, 258 bp, Homo sapiens
ggtctgaccagcttggtcaattcccaatatccatctaatggttcatgctgcaaatcactttcgcagcttccaaaggttcgtcacgtggtacttcacggacgggcgtaatcattggttgttccgctgtatcacgccatcatcggcgctttctaaggcgccaacattgacactcattatcgtccatcgcacggcgcacattaatcaacccgctcagccgacgttagttctttgctgctgcatagtctgcgtgtgcaagct

SEQ ID NO: 681172 - DNA, 1996 bp, Homo sapiens
gatatacaccaaatggccggattattccggttctgagccttggtgcctcaggggtccactggatgttccgataggagtgggtgacagccgtcagttagtgttctcgtcggtgagttctcgagtaggtgcgctagtccgggagtccagggaggtcgtcggcctcggtggacggatcgccaggtggccgtgatcggccagtgaatgcatcagcagggagcgcatgacgtgcgcgaggggcatagcgtgtaagatgagaaatagtcgcctggtacagcgcacagggttcggcttgcgcagacgtatgtcgtcagagtaggagccgtgcagacgattccatgtatctcccctgtgtccatgcagtaatctatgtaactcttctacgttgctgcttgtaccctattatatttcaatgtggtcctttcgacggagggacttcgatagtgcaggtataaccctgatgcacattgagagaggaggaccttacgtaccttgcgataagtgcgaattgcccatatggtttctttagggagaaggaggacctttgactagcaaccccacgactaggcggagagaaaaagaagagaagaaccccccccggtgtttgggccgacagagggacgcgtacagtgaggagaacactagaagtggcggtcttccgacagagagagggaatttacaatagtttacagcacttaaattacaggggcgagcagcaacgtggaacttaacatttggtggaccttacctgaggtagtgagcttactgtgaggagaggaaggtttaccattaggctcggtcattcccctacataaggtggcaaggtgctttgcgcctcacagacgcagagaccgactacccgcgggttgaagcgatgggccccatgtaaccatttccccttttgtgcacgccaacacagtctttccttacacaaaataacaggatatccaccacaagattacgctaggccagcaggaatgggatctaaggtaaggggggagaatgaacgacccattaggagattgacagtgggcaacaagggccacgccacctagacaaacattaggttgtccaccattttaggcgacacgtggttttggaagcgtttgaccaccacgcttagcctgggcactatactggggttggacacttcggtagttaaccttgcccctgagaattaacagccctaaggaaaatacaggcgaataggcttttagtatacttaaggagcacctttctgagtaggtaacgctgtacaaaacactggaagtgagctccttaaaaggaagaagccatggcgatcaactaggaagtacgtatcgtaggggtaaatcaagaatataagtttggcataacatagaccataactaggcccacagctatgagcatcgcaattttgtcgagtcaccttgggtagccacagcgaaatttaggccaaagggggcaggagccgtttatacaaatggcacaatatatgttcaaagaaccccttatggaggggtaaccactaggacaccccccatgtgagaccatatttagaacccgtagagatctagtatgagattcaccacagagtatcccccctaatagaggagagatacacagggaacccgacattgttatgagaagcccccccccggaagaaaccgaacgaaacgagaaacaaggacacagcagaggcaccacacacacagggtcatatctacagccacagctagcgcaactacgctttgaacaaaacaaacaaacaacagacaaacacatacacacaattaaaagaaaaaaacaaaacacccccacatagtgtgaagacgaaaacagaatccattgatacaaccaataaagcatgactctctcacaatacacaatgccaataacaatacatatcaacacaataaacaaataaacacataatacataatacagtaataaacacaatacatcaaaagaaacataaagaaaaaagaagaaagtaaacagaaaatacaattcaaacaat

SEQ ID NO: 681173 - DNA, 412 bp, Homo sapiens
aatggcgacatttcaaatgcgagatagtagtatggtcgtggtctggagtttcagtcgagtagtatgaatgcggtaatagttacggataactatcaatagttaaattaagaatggttatgttagggttgtacggtagcaactgctcattattcatctctatgtgggataattgagagagtatgctgaagattatgctgtagctgcggtttggtttcaatccagcctcaactgcctgctcatgatgagataagatggcacgaaagtgcacgctcatacgtaaaagtataactatatagctggattaggtgtctcatgcgcatgatgctcccagctactcgggatgctcaggcatgacacatcgctggattctgggatgcaccggttgcactgagttgaaatggtcgccaatccg

SEQ ID NO: 681174 - DNA, 538 bp, Homo sapiens
  misc_feature (88)..(88): n is a, c, g, or t
  misc_feature (177)..(177): n is a, c, g, or t
taagtctgggggctgactcagactctgaggtatactgagtatgagcacagcccatgtgggcttccaactctggtcttctctgatgctnggccaggtgtctgtctgactgctgtctggagcgcccatatgagttgacggagctcctgaagaatagctgtgccactgcgctgagactgngtgaggtgtggtctttgaagcaacaatggctggtgcctccaatgggctggctcccagacctccttacataagcaaagcttctgggagccctggttataggaaatcctcaccccacacacctggaggtgtcccccaagacgcaagttgccagccccagctgaaagaggcccctgagagtgaacctgcaagcccacatggggactgcccttttcctggccagggatgcagggtagaagccctgccctgagcagtgtcttttatcctccgctggtcctccagtcacctttaacctctgctgatcctccgggcatgctgtcaggctgagcaaaactctctcctcagtgctcagtggttacagacc

SEQ ID NO: 681175 - DNA, 1396 bp, Homo sapiens
  misc_feature (44)..(44): n is a, c, g, or t
  misc_feature (46)..(46): n is a, c, g, or t
  misc_feature (113)..(113): n is a, c, g, or t
  misc_feature (116)..(116): n is a, c, g, or t
  misc_feature (124)..(124): n is a, c, g, or t
  misc_feature (155)..(155): n is a, c, g, or t
  misc_feature (200)..(202): n is a, c, g, or t
  misc_feature (237)..(237): n is a, c, g, or t
  misc_feature (317)..(317): n is a, c, g, or t
  misc_feature (359)..(359): n is a, c, g, or t
  misc_feature (502)..(502): n is a, c, g, or t
atcagaggatcccggtgttcctttgtctggggtaatcgatacanangatcttttgaatcctgaatccataaattacactttttttttttcaaattcacaaaattcacaggggngcngacggtantaaccactatggggaaacatcccgtaaaccngcctgtggccatgccaatggagtgactgaacgggtgacatctgtnnnagcatgcttggtgtggctggtagaatgccaccgtngtgcatacacttggtacatcaggggtgaagggagggttttctagattatggggggagggtaaaatggggattttttggtngttcctttttggatggggtgtgggggtatagtactcagcttntgccctaaaataacatgtataaaaacccctgaagtatggtgtgggtgtgtacgtgtgagtgtgtgttggtatacgtcgggcaataaaagcttggtcttcgggaacttagtgaatccttttctctttttcctccagaagtattngttacaagatttgtaaataagagctctacttagtttgtttaccatgaacatgttgcagcaaaccttatgcatctaattcctacaaggttaaagaaaggcttttagacttgccaggttaagcaacagccaagttctcagtaattgtttgccttgatttatcttttagacttcattttgccagctctaaaactcccagtcttccttgattttagtccttaatcttttatgttctgagcaggaagggtaaaagacaggaacctgcttcactgtattaactagtccatgggctgagaccggggcatctcttttcttcatactgcaatgttgctagatacatgatcagacaccagagggttgggcattcttgcaataccttaacagtgctgaaatctgcagcatggtactaaggaagttaaagtttgaatgtaaccactttatttaaaaggtttttttctttaatttaaatgaaatggggttgaagtgaacatgattttgttgaccatgttcgtgaattacagatgcgacatgcattggtagaatcgtgtgatggtcttttgtgatacttaatttttacatatcccagtctctgtatgtatctgcatagacaaagaaaaaacaaactcctgctcttgcttttattgaagggtttccaggactgcgtgtctgctcctgagctctgttttaagtatgtgtatcctttgcttgtattttgtattaaaaaaataagaaaaagaagcctttattgttgagcatgttggcattgtcccctttatttttttctctttttgggacatatgaagcaagttattctttttctgtatctttttttcttttgtaaactttttttttgttttgtttaaaaatggctttataaaagggcttttataacccaaa

SEQ ID NO: 681176 - DNA, 1182 bp, Homo sapiens
  misc_feature (44)..(44): n is a, c, g, or t
  misc_feature (46)..(46): n is a, c, g, or t
  misc_feature (113)..(113): n is a, c, g, or t
  misc_feature (116)..(116): n is a, c, g, or t
  misc_feature (124)..(124): n is a, c, g, or t
  misc_feature (155)..(155): n is a, c, g, or t
  misc_feature (200)..(202): n is a, c, g, or t
  misc_feature (237)..(237): n is a, c, g, or t
  misc_feature (317)..(317): n is a, c, g, or t
  misc_feature (359)..(359): n is a, c, g, or t
  misc_feature (502)..(502): n is a, c, g, or t
atcagaggatcccggtgttcctttgtctggggtaatcgatacanangatcttttgaatcctgaatccataaattacactttttttttttcaaattcacaaaattcacaggggngcngacggtantaaccactatggggaaacatcccgtaaaccngcctgtggccatgccaatggagtgactgaacgggtgacatctgtnnnagcatgcttggtgtggctggtagaatgccaccgtngtgcatacacttggtacatcaggggtgaagggagggttttctagattatggggggagggtaaaatggggattttttggtngttcctttttggatggggtgtgggggtatagtactcagcttntgccctaaaataacatgtataaaaacccctgaagtatggtgtgggtgtgtacgtgtgagtgtgtgttggtatacgtcgggcaataaaagcttggtcttcgggaacttagtgaatccttttctctttttcctccagaagtattngttacaagatttgtaaataagagctctacttagtttgtttaccatgaacatgttgcagcaaaccttatgcatctaattcctacaaggttaaagaaaggcttttagacttgccaggttaagcaacagccaagttctcagtaattgtttgccttgatttatcttttagacttcattttgccagctctaaaactcccagtcttccttgattttagtccttaatcttttatgttctgagcaggaagggtaaaagacaggaacctgcttcactgtattaactagtccatgggctgagaccggggcatctcttttcttcatactgcaatgttgctagatacatgatcagacaccagagggttgggcattcttgcaataccttaacagtgctgaaatctgcagcatggtactaaggaagttaaagtttgaatgtaaccactttatttaaaaggtttttttctttaatttaaatgaaatggggttgaagtgaacatgattttgttgaccatgttcgtgaattacagatgcgacatgcattggtagaatcgtgtgatggtcttttgtgatacttaatttttacatatcccagtctctgtatgtatctgcatagacaaaggaaacacattgtaatgttttgagttaagatggagagttttcagaagtaaagtatatgtagacaacggaat

SEQ ID NO: 681177 - DNA, 420 bp, Homo sapiens
taatcacgcatatagccccctcaaagctcacacctgggtctgtaccacatcagcgatacttgaacaaagggctggggacccaggtttgaggaatcaacgtctccatacctagaaaggccacagtccacagtgcaactccaagtgtgctccatagactgacagcccacatatattttttaaaaaataggcttaatttttagagcagttttgggttcatagtaaaattgagcagaaggtacaaaagtttcccacatacctgctacccccacacatacacagcttctctcatcgagatcccacaccagaatggtgcgtaggttacaatggctgaacctacattaacacatcattatcacccaaagtccatagtttacactagggttcacagttcatgtggtacattctatgggttgggacaaa

SEQ ID NO: 681178 - DNA, 509 bp, Homo sapiens
tgaccgtgactaagctagcactggccgtcctagtgcatccaattttctatcatgagcatagatccttttatggggagaatgtaaaatcagaaattcactcaagaaaaacactcttcttcctgggctatctttcttctcctagccccagagcagcccaagccacagccatgctgcttcatcttactttgtgtagcccggagaccttgggcagatactccacagagtatgtcttgttcttgtcactgtcaggggtcacttgtgcctaggagggaaggtgggcaacagttagaaaaggcgccgggtgtgagtaaggagcatgctgtgtcagcagggcttctgcaggagctgccaggtcggaaacactgaaggtgctggcgagctcctgtccctcttgcacaacgcccctagagagaaactgcttgaagtcacagaaacaaaaccatgcagcacagaggcataacagagtcaggactctccagtgtccagtgtcaggctggcactctctaagg

SEQ ID NO: 681179 - DNA, 320 bp, Homo sapiens
gcaccgtatattccacaggtgaatgagtatatattagataacagaaaagtgctttggaaaaaaaaaaaaatgacaacaggagtacatacagtgacccaagaagagtgtaccaggaggagcagaccctgaaagctagttagaagctatggaaatcgctatgctttgtgttgtcacaggagtaaaaataggaataccctgtatacaacaaactattgatgggataaattaactaacccttgatcccctttcgcagggcgtttatacagacttctatcatcacaccagctaatctaggttcctcagaacgtttaacctgttac

SEQ ID NO: 681180 - DNA, 1062 bp, Homo sapiens
tgcggccgccaactttttacaccccagggattttctacatttctctccattttatttctctctttaaacatctctactggggaaggtcgaatacaattgtctccatttgacaatattttatgcttgactctctgaaagtcagaaaattataggtgatcccttttcacttctcaaccttccttctcttgcttagaagacttgacattgccgatgcttgttgccagcttctgttactttgtaactatacaaggaagacacccaagagaatgaggagtcaaaaccccattcacttttgctgaagcttggtttaacaagatttacttctagggcagagcagctgagagagattaaaagtaggtagtaggcattcattctaaactgcagacattatgcaaggcatcagccttattttgggctttattataagtgaagggtcttattttgtattacttcctaaagacctaccatttctgtaatatggaataatagtatgtggggtaaaaagtccaaaaactattgtcctttgattttagtttcaaatttaagatgctgatcacttcactaaaactgtaaatcagtagattgatacgcttattgattgcctagaattttattcaattttacccaaatgtattttatgagtcttttattttggcagtatgtattaggaaaaatgcttgttgatttactaagagctgaataataatttattccatgattgattcttaataaaccccattttattgcttttgaaggtgatgcagttataatcctatgctttgtcattctttgtttgcaaatgcacattaattgacaggacaagcacacacccatgactattatctactctgagaaaatggctaaatattaggaagagagtgagttttaaatgatctcgttcacatgcatacagatatgcccatctttggcttttttctttaggagaatatgcattagcttttttaaaagaggcaacgtaatagtctagtacactagattggagaattctggtcctcagatgggggaattttggtcctcctgtaaatccctagataatgtaag

SEQ ID NO: 681181 - DNA, 121 bp, Homo sapiens
ttttttttttggggggtccccccctttgggggttcccccccccccccggggggttttttgggggggggggggggcccccgttttttcccccccgggtttaagcccccctccccccttttta

SEQ ID NO: 681182 - DNA, 106 bp, Homo sapiens
gaatggcccttcctgtatctaaatatctgtgaaaatgagagtacttcctgcatacctctgttgcagattcaactgttttcaggccccaggaaggtaaggtgcgcag

SEQ ID NO: 681183 - DNA, 362 bp, Homo sapiens
gctcgacggcgaaaagcttgctcaccgcaacttctccgcaacgcgcatgacagcgctacgggcacgcgggttggccttgagttcggcttcggaagcgaactgcgctttgccatggattttgattttcggcacaaaggcttcgtaacgtaccggcagttagcgcggcaggttgtcggattcgcccttgaccagacgacgcatgaacaatttgacgatgcggtcttccagggagtggaagctgatcaccaccaggcgaccgccacttccaaggcttccagggcggcttcgaggccggcttccagatcgcccaactcgttgttgacgtgaatgcgcaggccctggaacgcacgggtgtcgacgcg

SEQ ID NO: 681184 - DNA, 321 bp, Homo sapiens
gagctctctctgtggggggcggattatccaccagtaatacccttgggacggggcacacaaggtgttggccctcctacgctctctgtcaccttcccaagaaagggtcaagatgaaacagtgtgcgtatatggtcatggcgcagagttaagtagagctgcgtgtgtattagcaacctatagcctcgcagcagcgtacagacgtgtgtgtactgtgttccatcaaatcttcggtttagaaacaagtggcaaattccagggcggctagtaaacacagggagggaagacagacacaatggaacagcaacaacagaaaacccaagaa

SEQ ID NO: 681185 - DNA, 597 bp, Homo sapiens
catttataaaaatcttaccttatagtcaaactgattaagaaatatatttgtctataaggttttattaagaattgggtttgacatcaataatgcacccgtgcaacagtgacatttggcttatttggtataaaagtcatatgggaagtattggccaaatatgaaatggtatttggttttctttgggctgtatttgtataaatgtgttactggtatgtgttccaaaattataagaaactcctataatgctgatatgacttagtgtatgttattaataattataattgttatgtgaaattattatatgccacaagagtaaccaaatttccttatcaattgtggctttaatagcggctgtcctaaaactttttgccatccataaacaatgttggcttgttttaaccctctttaaaaggtggttttataaccaactataggacttcacaggtgctcttaaatgcaggttttctgataactttggagattgtgacatcagaataagaagaaaaaactttcagaaactcaaagagctgagcctgaaatggttcatgagtatcaaaacagaagtaactgcatggactctgacattatctaattgac

SEQ ID NO: 681186 - DNA, 105 bp, Homo sapiens
agcttactaatgctatttccattttaactggagggcatcttaatagatggaaacgactttgggttggcatcatcaagggtggatccaaagcagttgcctggagga

SEQ ID NO: 681187 - DNA, 198 bp, Homo sapiens
caagtagtataggtgacagcatacaggttctgtatttggattaaataatagcgagtgacattggcagagcacagtccctcatcttatggactgtagcaaacatgatggaattttacttggtgcgcagaagcccatacaacgtcgcttcatctggcaaacctgcttctcaactccggcttccgagtgacactccaccgg

SEQ ID NO: 681188 - DNA, 141 bp, Homo sapiens
cggggactcgtgctgcctgttgggggtggctcagccccaggccccctccagtcaaagcagcagtccccgtggctcggggagggcgctgcggggagctgatcgggcgcgcctggaccgcagagatgggaacgcggaatgagc

SEQ ID NO: 681189 - DNA, 219 bp, Homo sapiens
attctctgtgttgaacgaggtggatgcagcacatgtgtgctcgaccacacaaggttgatgggcgtgtagtgaaaccaaagagcgctgtttctagagaggattctgtaaagcctggatgcccatctaacagatgaagcaaagttattagtaaggtggtcattcaaagccagcatccagcaagaatatcatttgcagagcactactttgcaaaagtcatgg

SEQ ID NO: 681190 - DNA, 190 bp, Homo sapiens
gccgtctctagaggttcccccactccagcctgggccagagtgagactctgttctccccatataatgatggaatcacatggacatccctctgctgtagctccgacgggcggctcgagccagaggatcagcgtgcttttgtgtactgtctggaatactggcctcctcctgctacaggcacctgctgtagccc

SEQ ID NO: 681191 - DNA, 1039 bp, Homo sapiens
tctgggcagggccggtgcgggtcgaggggcgcccgaggggtccgggccgatgcggtggcgcgcagggcgggcagcatccactcgggccgcatcgccgcggtgcacatagtgcctgctgagcgtgctcatccgggccgctgcctgtccgtgttggacccgcgccagaggttgcgacgagccgtcgtgtgcacacggaatccgtggagaacccagagcagctgttgccccccatcgatgtcctctggatcaaaggggcccagggaggtgactacttctactcctttgggggctgccatccgctacgcggtctaccagcaactgcagcgagagacatccccggcaagcttgtccagtccactctctcagacctaagggtgtacctgggagcattccagaccagacttgcagtagcagcctccttggcacctgctgccagcttcaagagcccagaagacacacctggcctccagcaggctgggccatgcacgaagggatagcaggggtgcattctctattgcaccttggcgagagggtctgacctctgggaacccctctcaaccagttacaagggccttggactcactgtacagtgtgggagccccagttcccaactctgtgacaatagggatcatgggccttaacccttgaaagcattaccgagaagggagaacaagaagatggggcttgaacgagccagttgctgccgggtcaaaatttcccacggaccaagcgatccctctgcatttaggtctatgttaacctcttaatttggactacatttaagggtttgcaagggcaaacgtgagaaaccgttgaattggcagcaggggtttaaaccatcagacaaaagactgtgttttccacataagcgatggattcttgggagaatgctgtgtgtaatgagagaataggtagcaaagaagtcacgagaacggtgacacggcgaacagacttatggcagaccattgaggacgaaatacaaagagagcacatgaaatcactgggtaccagaaaatgttcgtcagctaacacagaaaaa

SEQ ID NO: 681192 - DNA, 1123 bp, Homo sapiens
tggcactctcccgagctgcgctagtgcgggcgccacggctgcccggcgaaggaaaccgaaaccgagtccgggcccgtccctccgcggccccatcctgccctggtgcaccctggggtcgcgctctgccagtgccgctggagcccagagctgcgcgcacgaaccgtgcgccgtggagggcgtgggcgtggcgccgaagggtccctgggtcttcgacgcctctgcgggcgggttcctccctccttgccagttggatccctgggcgggtgcgggcccggccccggcccgtgagctggcgcacagacattgggcctgctgctgcttctacacggggggcacgtttgtccctgctcctgctggtgaccagctgtccccgctgcttggtggccccgggtcattccacggaaggcttgtagcacccaggagttatcgagcaagcacacaattggtcgtacggacctggctacgtgacggcatttggacgtcctgggcacacgcccccctctgcctgttgctctacttcaggttctatctccttcacctgtcacccatttccgcagaaggagaaatccttcaagcaggtggaaggacgccccctcgtgagttggacgcaacgtgtggcggcccaatcacgaccgcttacggggcgcaacctcgggagacgcgagacggcacacagttattcccaagttgggaagcatacattggcaacaacgaagatattcctgtggcctgctaaaagccaaaacgaaggggcccattagtttgttacgtctgagagacccggaggacccagatccataggatggcgaggcacccgcgcttaagaagattctgacctttagcattcacgagcgcatttaacactagttcgcattgatattagaacctggtcagctagaaggttggatccccagagagtgcggctttaccttcagggggaagcgatcattcgcaaggacccaggtgtcggaaaaggcccctattcaggcagaaaaggcatcctattggatgcaccttcaccgacgggtatgcgacgcaccttggcatctgtggaggctacgcagcaatggcaacttatggtgcccctataatccactgtgtttgcagtggccgcacaagtccc

SEQ ID NO: 681193 - DNA, 1138 bp, Homo sapiens
ccgtgacggcctcccatagcctgccctccgttcacctcttcaccgtcacttctcgtgactgccccaaaggtcccccgaccgccgtctcctagtcgccgcagtcagcacatcctgttcgccgctcagatcgatcttctctcttgagtacgtccgccattgatcgatccgtctgagtcatcctcagcatggtgcgccatagactaccatctcatggacgtcagagtgcgcgtcaatgatagcgcgcgcgagtagtctaagcactagagatgcctctacctggccgtcgctaacagtatatattcctggtcctattgtctttactatctttagatcccgcgggatgcatgtaggcctatctagaaagtagatcatctctggcgcgaaaataccgttgtactttcgacccccaactcgttccatgcagcgcagtacgagcgcacaacagtggccttgcacggaaaaaacctagtagtgggataggccctcggcgaagaaagcgccagaccgcagggggttgcgccactgtacactcttttcccgtattcagttggcataactctaaggaagaaacgcaatgactgggtgcattgcaacttggggccacgagccggggcctgccaagtggcccaatgagcagtgcttgcgcatttacccatattagtgcacagatatacacatgcttgaactccccgatccgaactgtactgtggagacctgggtcaacaacagcttgtgacccaccgttgtatccaacaaaaatttgaaagcccccaacttgatagctagcttgtaaccttttcatttccggatgaccacccgagttccacccttgtacactggcagtcgatgggctgcaccacaggctcaatccatacaggaaatttgggggctgaaccctacggttggaacccaaactttggcgcccaaagactgcgcggaggccggccccggaacactttctctgggcttttgcgccggggaactattccttctttttggaaccaacggcatcaaccccttggggaagacccacgtgcattacattgaacacaggctaaaaggccttcgcgggctaaattttttcccccattaagccggggaggggttgactttcccttgggttcaccccacatgggag

SEQ ID NO: 681194 - DNA, 397 bp, Homo sapiens
caatttacagcgtacgagggttctcctttctttacattcttgccagcattcattattgcctgtcttttgggtgaaagtcattttaactgggatgagataatatctcattgtagttttgatctgcatttctctgatgattgattaatgatgctgggcattttttcatatacctgttggccatttttatgtcttcttttgagaaatgtctattcagatcttttgcccattttaaaatcagattttttctcttgagttttttgagctccttatacattctgggtattaatccttgtcagataggtagtttgccaatattttctcccattctgtgggttgtctctttatttatttatttattttctttgagatagagtctcgctgtctcgcccaggctgga

SEQ ID NO: 681195 - DNA, 886 bp, Homo sapiens
gaataaaggtttgtcacagcagagcaaaagccacttcctcccattaccttacggagtaaccatactgattgaatccccagggacatccatcattgcaatacctcagacttccttccttatcttgcacaccagctctactcatacagctaaaatagtaaaaggctgccataaatggacattaggtatcccaacataaccatctggagtgtgtccagttgtatcttcataggaccaacacaccatcacgcagcatgagtatttatatgaagtagcaattcatccgtggactcggctgtcttgctgactgaactcccacaacatatgatagtaactgctgaccactactacttgcatcaaaccctgaacctgtccgcctactcagctgcacgactggcacatccctaacctgaccctactcaacgggcacactctcgaaatggacacataactaaacaccggaaccactactagcctatccgactatctacatcgctccgcggacctgctggcactacactgtacccagaattaacaacagccccaaccacctacgctcaggccagacatcagctacgcactagaacctcacaccccctgcacctccctgcacaacactccctgccccataccacgcacaccaaaaccgacctccacgagccacaaccaagcggcacatctcacacacaaaaatgcacacctaacgccaccacaacaaccacccttgatatacccagaccaagaatgcacacttagccgttcgaatggccaagccgacaacagaacgcgcagacaaaaacagggcgcgggccgctccaacaacacacacaccccagacgcacccccaacacaaacacgccacacacccacatcacaccacacaacccgc

SEQ ID NO: 681196 - DNA, 252 bp, Homo sapiens
atggtgacctgcccacagtcacctgtccatgccccgaccctgccaactgaggacaggctggcgcctccacccaccctcctgcctcacccatgcggagagcaccgtggcggagcgacagcgcatgcaggaacgggggtctcctctcatgcccgtcctagccggggtgcctatggggacgggcgacgttgatgtgtgtggtctcagaggctatgcttccttaggttacaaaacaaaacagggagaggaaacgca

SEQ ID NO: 681197 - DNA, 191 bp, Homo sapiens
attcttatgtaagatgctgactttcttaacaatttcctcatattctctatcatgagactggtaggtggctgagtgtaatccattttgttaacaccggacgatttagttgtttcacaccctggtgtttaagcacagaagggcatgctctcgcggtctgcccattcttggagatatcagctatacaaattcac

SEQ ID NO: 681198 - DNA, 696 bp, Homo sapiens
ggtatatctcctaatgctatccctcccccctccccccatcactggccatcagagaaatgcaaatcaaaaccacaatgagataccatctcacaccagttagaatggcgatcattaaaaagtcaggaaacaacaggtgctggagaggatgtggagaaataggaacacttttacactgttggtgggactgtaaactagttcaacccttgtttgtggaactagtttgtggaagtcggtgtggcaattcctcagggatctagaactagaaatatcatttgactcagccatcccattactgggtatacacccaaaggatataaatcatgctgctataaagacacatgcacacgtatgtttattgtggcactattcacagtagcaaagacttgggaccaagccaaatgtccaacaatgatagactggattaagaaaatgtggcacatatacaccatggaatactatgcagccataaaaaatgatgagttcatgtcctttgtagggacatggatgaagctggaaaccattattctcagcacactatcgcaaggacaaaaaaccagacacccgcatgttcttcctcataggtgcgaattgaaccgatgagaacccattggccaccaggatgggggaacattactacaaccgtggacaagttctgcttatttaaggaagctgcggggatagggtactacacctttt

SEQ ID NO: 681199 - DNA, 109 bp, Homo sapiens
acaggcagcgtcttctccaccacccatacacctagaagaccacccatacagctagaacaccacccatacacctagaacaccacccatcacctagaacaccacccgatca

SEQ ID NO: 681200 - DNA, 802 bp, Homo sapiens
ggcgatgagcccaagagcgagcgcgcatgctacgatagctcgagctctggctccgccgctgcgaccccacctcggcgtcgccgtctgcgcctgcgagatcctgccccgtgcctccccgatgagcgagccccgtgccgccgctatcaccagccggtctaaccgctcggaccaagccgccagctctgaggttctgcctgatgccgaagagcacgaaggacggacggcagggcggttgaagtagaagttgcgggcgatggcccgattccaggctactctatcgaaacttactagtccattcgccgggacggctccgaacgcgagggcgaagtgcctgtctggagtgatcctcacctactgtactcccgcgtctcacatattacgacccttattgagtccagcctctttggccccagggtctttagtcgctcggtgcttgccgcggtctcgtacccgaccggttccgtagggagccccccggagttggttgccccgctgggccctcgcgtagagaccagccaggcacccggcttgctctcctgccttcttttttgcgcaacgccgctccccctggtgataccgaatagagctgcaagtacgtaggtgttcaaggttttctcatccattcagggcgtcctttgggcagccattgtccgatagtgggctcactgtcacgatatgtgtcctatggattttattacttcgaaaatgagaccgagggaaggatgttgttcttagatacatactgtcgtcatcaacgatgtgacctctgaaatttcttgcacagtggtttagattgcctgac

SEQ ID NO: 681201 - DNA, 184 bp, Homo sapiens
  misc_feature (49)..(49): n is a, c, g, or t
  misc_feature (68)..(68): n is a, c, g, or t
  misc_feature (111)..(111): n is a, c, g, or t
  misc_feature (129)..(129): n is a, c, g, or t
  misc_feature (149)..(149): n is a, c, g, or t
  misc_feature (178)..(178): n is a, c, g, or t
atttctacacagcaggcgcaggggagagtttcatcatccccatgatatntgggaatattcctgtttancttcttagagtagttaagaatgtattcagctactatgtactanactgtgaaccgtgtttanaggaaaactccatatttcantcctcttcttgcgcccatccctctctccnctaact

SEQ ID NO: 681202 - DNA, 523 bp, Homo sapiens
  misc_feature (50)..(50): n is a, c, g, or t
actcctgtggcggtgtacaaaagtggagttttgttttggaagtttttgtntctgatttctgggtttcttagttactagccgataatacagaaaaaggtctgaccaggggctttattttcccccaaatttattaatacctaaactagattaatgtaaaagtacaagtcctaaatcttggtactcctgaaggcttgtagttcttctgaagatatatatagatagatagattaacttctgaacatattaccactcaccatctctaccttggagaagcgttagaaccctgctccaggggtctggtgaggagcgggtggctgggggttctctacacagaatttggtttcgtctggctgcttggttgggttttctctctctcctctgctccccaggtttgctctctggtgcttaggagcagccatggcagcctccacatgcagacctcaaccccttgtgtgtgtggcatttgcaaccagtgaccaaccacatctgcaaaacacgcaagaagatacgcaagaagtaaccg

SEQ ID NO: 681203 - DNA, 160 bp, Homo sapiens
agatccccccatggcagccgaacttagtgcggacacccgatcggcatagcttttctacagcccagaactcctgggctcaagcgagcctcccacctcagcctcccgagtagctgggactacaggcacgcgccaccgcgcccggcagccattgggccggctg

SEQ ID NO: 681204 - DNA, 299 bp, Homo sapiens
ggaatcgagctcggtccctgatcatcgtgtcgttacctaacctactgtgttgctgtcaatgatggtgtaacaccaattgtctttaaagcatgatccaggcaatattaatctaaatattcctctaactttgtgatcccagaaacactaattagacctacacttcaggtttccctgttggcgtgacctgagctatactgtacagaattgtgggagaggccatttggtaagccattgttctgaataatttggaggggtgaaatcctaaggtggtggagttgctgcgtggacacgaatgttca

SEQ ID NO: 681205 - DNA, 610 bp, Homo sapiens
  misc_feature (510)..(510): n is a, c, g, or t
  misc_feature (522)..(522): n is a, c, g, or t
  misc_feature (537)..(537): n is a, c, g, or t
ccccatatggaatccacataaaaattattagaataaatgatcagcaaagttgcaaggtacaagagcaacacacaaaaatcagttgtactgctatacactagccaaaaaacaatatgaaagtaaatgaagagaagaatttcatttacaatagcaccaaaaataataaaataattagaaacaaatttaatttaaaaggcacaaggccgggaagggtggctcacacctgttaatcccagaactttaggaggccaaggtgggtggattgcttgagctcaggaattcaagtccagctggggcaacatggcaaaacctagtctttacaaaaaaggcaaaaaattagccaggcatggtgtgcacctgtaccaggtatgcacctgtactcccagctactcggtaggctgaggtgggagaatcacctgagcccagtaagttgaggctgcagtgaaccaagatcgcaccactgcactctagcattgaagacatagcgggaccctgtctcaacaacaacanaaaaggcacaancacaagacttgtatnctgaaaactacaaaacattgctggagtcaattcatgatgacctaaatttttaataacctaaataaacaaaaag

SEQ ID NO: 681206 - DNA, 246 bp, Homo sapiens
agtatgtagactcagggaacaaggttgggtaggacaggaaggcaggtacgaggtagctaggaaagattacgttggctcacagagcagggaagagctggaaggctgacgaataccctccccctgcacgcctcagcttttcctactctgctcagctacggcgggcaactggccgacgcacctgcctctaacagcccactgcctacactaacgcacttgcacctgctgacgcaagcgacactaaaccac

SEQ ID NO: 681207 - DNA, 847 bp, Homo sapiens
  misc_feature (390)..(390): n is a, c, g, or t
taggactgtgaagaaacatggaggccgcgaagtatgacttcgaaattgtactccctgctgtcccgctaggacctccatcttcgtccttcagccatccatcgtgggcgtcatgttcttcgaagcgcgccttcgatcaaggcgcggaggctatctacgagcacagtcaccgaggggaagctgtggaaaacacgtcaagcacaagtatgagaacaagtagttccttggaggtccccatccaggccagaaggaccgcaggtccaggccagcatgctgtgagccgcatgaagttggagccgtcagcttgtagaggatgatgtctcagagggtacctcgttgcactggaccggcaaccaatgtgcagcgtgtttcggctaacgagacaacggggcnttttacgtctagcaaaaacctagacttcctgtgtgaccctttcgttgcttggtagttttctggaaatggtgactcgttctatgctcaaggcagtgctacacgggacaatacatactggtgaaattggcccacttggagagacagataatacacaaataccagagaggagaaaaagaaacggggtggcccggggggccccctaaggtaatttggggcgcgcgtgagggaagaggaatacataggggcgcggattggttgtgaccggtggcgcggccgcgcggagccattcgagagctggttctcctctggacaccccaaggttgtactgcggcgggtccgacagagcggggaggaaaaatgccgagcggggggacaccccactccacagaacgagagggagcaccgaggagaatactggccgaacaaaccgggaggcaaacccggccataaagggccc

SEQ ID NO: 681208 - DNA, 132 bp, Homo sapiens
  misc_feature (36)..(36): n is a, c, g, or t
cgcaatctcatcactggctctcctctctgagctagntggttgaattttttaatgcttaagattgtttttctcttttcacagcaacattttctggaatttttttctgcacagcttttccaaaataaaaacttt

SEQ ID NO: 681209 - DNA, 641 bp, Homo sapiens
  misc_feature (606)..(606): n is a, c, g, or t
  misc_feature (641)..(641): n is a, c, g, or t
aggagttcaagacagcctggcaaacatggcgaaaccccatctctactaaaaatacaaaaattagccgggcgtggtggcatgtgcctgtggtcccagctacttgggaggctgaggcaggagaatcgcttggacccgggaggcagaggttgcagtgagctgagatcgccccactgcactccagcctgggtaacagagcaagactctgtctcaaataataataataataataaataataataataataataataataataaaagggctctggtcagccgggcgcggtggctcacgcctgtaatcccagcactttgggaggccgaggtgagcggatcacgaggtcgggggttccagaccagcctggccaacatggtgaaaccccgtctctactaaaaatacaaaaattggctgagcatggtggcgtgagccatgtctctggccaaaaacatgacttcttcaagccagtttgatgggcgtgatgtgggggagtctcaggttaaatgtcacatatctggggctcgaagatgggaagagtgtgtcacaggtctggaaaccacagtaccttcatcagagctcatagtagggtctgcagagacctctcacatgtnctggccaggtcgcaatggcttacgcctggtttccn

SEQ ID NO: 681210 - DNA, 420 bp, Homo sapiens
  misc_feature (43)..(43): n is a, c, g, or t
aacattctgatctgttattccaggactgttttctttccaatgnactgttgtggtagaataaccccaaaagctcaagctaaaatgcatcatcagtcctagtcggcagttcctttaagaatgggctggggggggggttggagctgatatggaaaagctgcaccttcctgcagaagatcaactgacctgctatcccaccccaaatttcagcctgaggtatatttcagtgaaggcaggtagctgtgcttctcagagcagagaagcagttttaagagcaaaaaggtagaggaaatctagaaaagaaccgtcttgatacagatttatcccatggtgtgaagggagggcaaagaacccagtggcacttcgcttatccagcaatttctgtcactgtggtgaccaacttctgcccgttccatagggtct

SEQ ID NO: 681211 - DNA, 899 bp, Homo sapiens
ccttaatcaaaacatttacccaaataaagtataggcgatagaaattgaaatcctggcgcaatagatatagtaccgcaagggaaagatgataaattataaccaagcatagatatagcaaggactaagcccgtataccttctgcgtaatgaattaactagaaatagctttgcaaggagagccagagctaagagccccggaaaccgagacgagctagctaagaacagctaagaagagcgacacccgtctatgtagcaaaatagtgggaagatttataggtagaggcgacgaaaccataccgaggctggtgatagctggttgtccaatgatagaatcgttagttcaactttaatatttgcccacgagaagcgctctaaatccccttgtacatttaactgttagtccaaagaggaacagctcttgggacagtaggaaaaaaccttgtagagagagtacaaagaatttaacacccatagtagggcctaaaagccagtcaccaattaagaaagcgttcaagcttcaaggaaccactagctagaagaatcccaaacatataagctgaatgtcctcacacccagttggaccaatctatcaccctatagaagaagtaatgttagtataaagtgacgtgaaaacattctccttcggcataaagcctgcgtcagattaaaacactgaactgacattaagaggccaatatctacatcaaaaaaaaagaacaaaaaaaaacaacaaaaaaaaaggcgggggaaagtaacccagggccagagtaccgtccccttttggaaagggccaaggggggttaaaaaagcggggggtaaacggcggcggaaccgcgggtgggaacccctggggaaggccccccgaataggcaagaaatggatgagggggggattagaact

SEQ ID NO: 681212 - DNA, 311 bp, Homo sapiens
gaaattaatagcaagacaccacagatcagacataaacactacaaaccaaaactcctgggctcaagcgatcctcccacctcagcctcccgagtagctagggactacaggcgcgtgccaccacgcccggctaattttagtatttttagtagagacagggtttcaccaatataggtcaggctgatcttgaactcctgacctcgtgatctgcccgcctatggcctcccaaagtactgggataacaggcgtgagccaccgtgcccaaccatgaaatatttttacttaaaaatagggaataagctcgcaggggatcc

SEQ ID NO: 681213 - DNA, 837 bp, Homo sapiens
caggtgctcgaacacacagtaagtccccttggcaggagagagcccagtcaccatccaaggtcccaggtattagacaccgggcctgtctgacttgggtcggtgggtcttcctataacagcagtgaagatggcagcagctgacgaggcttcttgtggttaagcactgggctgtgggtccgacctctcttctgaggctgcttcaagtcggcctgccaagggtcctcgccaacaggagctcggtcgatgtccagatatgaattcgtttcatcaccgcctcatggatctttgtccacgcatggcaatagcacactgtcatcccgtccttttcacttaggccgattctgtatgagaggtgaaaagcagacatgttggaagagggctgtgaggaggacatgagggaacagcttattattaacacagtgagatttaccggctgtgcagttcctacgtcgagtccttgggaaatgaacttcagcgacagattagagggtctcttttcggatagcatggccaaacattacggagcacctggtccacctcctatgtcctcttactggtcccttgggaatagtacttttcaaatctttacgtgtgcctaaggcatcccctaaggagctttcctaaaaactcatattccttggagcccatccccgagaagatctgattcaggggtctgggtggggagaggcagaattgtcaggtttggaaaggctcccaaagggatggagaatgcgaattggtccaggaaggtgggtgttggggtggccctggcttgtggggtgtcaacaattgaacgctttctaggacgtggtggatgggttgcagtgtggcaaatggg

SEQ ID NO: 681214 - DNA, 293 bp, Homo sapiens
cagatggactgaactcagataatagatacggcgcagtgtgtgaatcggctttcggcgccgggattctcacagagatattcacggctcccactccatctccagccaaccggctctcctcgccctccagcagcttgcggtaggtggcgatctcgtatgtccatgggccatgcttcactgctctatgagattcctgtgtactacacgctagctgcctgtgcacatatccatgcttggaccgcgtgcagggctggattccagactcctcactgctatggaacgagcaatccttgagc

SEQ ID NO: 681215 - DNA, 680 bp, Homo sapiens
  misc_feature (204)..(204): n is a, c, g, or t
ctcggtttccccccgcgtccaagttttgcggctcgcacctctcccgggagccatatgaatgttctctccatgctctgagccctaggattcatctttcttttcaccgtaggggcctgactggcacttggtattagccaactcctcccctagacctcggtgctacccgacccgttctacgttgttagctcacttcccctatgtccntatccataggagctgtatttgccctcataggaggcttcattccctgatttcccctattctccggcgtacccccttgacccaacctacgcccaaatcccttgtccctatcgatattcatcggcgtaaatctaactttcttccccccacactttctcggcctatccggatgccccgacgttactcggactaccccgatgcataccccaccctggacatcctatcatctgtaggctcacattcatttctctcacacgccgtaatattaatgattttcatgatttgagaagccttcgcttcgaagcgaaaagtcctaatagtagaaggaccctccataaacctggagtgactatatggatgcccccccccctaccacacattcgaagaacccgtatacataaatttagaccaaaaaggaaggaatcgaacccccccaagctggtttcaagcccaccccctggcctccatgactttttcca

SEQ ID NO: 681216 - DNA, 823 bp, Homo sapiens
tacgtctttcaagtgatgtcttgctgctggaaacacagaaaaatgacatcccgtcttcctatatggcttatttcctcatctccttcatgccagtgctttgggcaacacgaactaggaaagtattcctgctctagatgaggcttcattcttaaagcattgctttgaagagaccgcggtttcaaaaaagcaatagacaatgtgctggagcctgacaaaattcctgggttactaggtgtctttcagaagctgattgcatccaaagcaaatgaccaccaaggttttgatcttctaaacagtataatagagcacatgcctcctgaatcagttgaccaatataggaaacaaatcttcattctgctattccagagacttcagaattccaaaaaaccaagtttatcaagagtgttttagtctttattaatttgtatgcataaaatatggggcactagcactacaagaaatatttgatggtatacaacaaaaatgttggaatggtttgggaaaaattattattcctggaaattcagaaggtatcctggaactgtaggagacaaagatcctgtgccggttggataacaagattactaacagaagtgtcccccaatgatggacactgagtataccaaactgtggactccattataccggccttgatggcttttgagtacccgaagatgatacattctgatgggacatttatgcttgagaatagctgggttaaaggggtcaagtggtttgcgtgaaaaaagctgccggggcagggggtacccaattcggcgctcagggacgcgccggggccccgggcccggggagccttccggca

SEQ ID NO: 681217 - DNA, 441 bp, Homo sapiens
  misc_feature (47)..(47): n is a, c, g, or t
  misc_feature (71)..(71): n is a, c, g, or t
  misc_feature (80)..(80): n is a, c, g, or t
  misc_feature (371)..(371): n is a, c, g, or t
gcagttcctgggggacggtccagcgggggacacagggcctcccctcntgggggcaagcctgccaccatccntacttgccntatctacactcccaatgtggtaatgcccttggaccaccacccacctcctgtccccagtgtccgtcaaccagccctgcctactggggggtggccctgaaacccgagggcccccagggtgctctgcgatctagacgccctcttccaaggggtgccacccaacaaaagcatctacgacgtttgggtcagccaccctcgggacctggcggcccctggccaaggcttggctgctctcctggtgcagctgtgaggtcttaagacaggggccgctcctccctcccgctcccaccccancttgttgacagggagcaagggaggcggctgtctgcgacacagcagctcgaaaaccaggcagagcttgttg

SEQ ID NO: 681218 - DNA, 780 bp, Homo sapiens
ggaggcaggcgcttggaagttgtaaacaccgactttctgagtaagggaggagcactttttttccaaaaaggaaagaacgtctctactgggtttttttcctcctgatattcagcattagagtagaaaagaaactatgtttggccacattagccgtggttagcaggtgctgcagccttggccactgtttatatatttttaaagggcagaaatgcctgcaacggtgaagactttggaccaggcaaaaagctgggaagttatcaattccaaaccagatgaaagacccaggctcagccaactgtatcgcacgaactcatggatgaatctccacgcatatttcttcaagacactgtctcttctttaaacagcagagcccctgcgcacactcttgtctcctggccctgtagtgtgtgcaccatttttacgatcttggcacgttacattcctggggttatacctcagctatctacctgtcactgtgtgccatttcttgtgtcccatttgttttcatgttactggactcttggcccccccccaatttctacagcgacaaattaaggtcagttcctgcttgaaacttggcattctcgaccatcggccgcaatatcattcattccgacaggaaccgtgcagagctcttgaaggcggcatacgaccaaatgtcaccaagatcgcacgtgctttgcatttccgcttcttgtcctaggattagcctccggttgcgcccacgagtattgggtctgccaacgtccgcagatctgggtggtagggccttccctttaa

SEQ ID NO: 681219 - DNA, 871 bp, Homo sapiens
  misc_feature (733)..(735): n is a, c, g, or t
  misc_feature (741)..(741): n is a, c, g, or t
  misc_feature (744)..(744): n is a, c, g, or t
  misc_feature (748)..(748): n is a, c, g, or t
  misc_feature (771)..(771): n is a, c, g, or t
  misc_feature (856)..(856): n is a, c, g, or t
  misc_feature (864)..(864): n is a, c, g, or t
gccctctgtgtcttttttttctttgttttttatcttcttggtccgtctttttttgtcttatggcccccttgtgtttgtttttgagtccttttcttcttattgttttccgttcctttgtcttattcctctgttcttcacccttctattacatgccaacttctgtcagttgccgtttcctcctatcagtagggcacctttggcacaaatgttgtcctccaggtcccagtggactctacagagtgcttgacctcaacacactggattccaggtggactggaccacagagcaggccaagacacgggtactgtataactccaccagggtttggagaatagaaatgaaagccacgtcatattactctagaataaatggtgttttggaaattttaaaattatcatcgaaggtggtgaaactatttcaggccccaatgaaaggaaatcgccagttggggatgaaatcaccacgagcctgtgttttatgatatggttggatgtcccctgatgaaattttaaaggagtttcacgttttaaaagtggcgcactgattctaacatatgagaattctttaggcccagaaactgtccttggctcacgaggtgttgggaattaaagcacgagagaagccacttcgtgatgcttagaacccaggatggtcaatgtacacccaagacccactcgagacggccacttcttgtttaccaaacaccttacccagaaagcactttgtaggggannnttagtnagntctnctcatttcattatgtttcttccnaggaaacaggagagactgaattaataattctctctttcctcttaagcacttttaaaataataaagtacatcttgaaatttggggnggcatctntgattta

SEQ ID NO: 681220 - DNA, 887 bp, Homo sapiens
  misc_feature (73)..(73): n is a, c, g, or t
  misc_feature (83)..(83): n is a, c, g, or t
  misc_feature (293)..(293): n is a, c, g, or t
  misc_feature (295)..(296): n is a, c, g, or t
  misc_feature (319)..(319): n is a, c, g, or t
  misc_feature (321)..(322): n is a, c, g, or t
  misc_feature (351)..(351): n is a, c, g, or t
  misc_feature (513)..(513): n is a, c, g, or t
  misc_feature (516)..(516): n is a, c, g, or t
  misc_feature (532)..(532): n is a, c, g, or t
  misc_feature (561)..(561): n is a, c, g, or t
  misc_feature (565)..(565): n is a, c, g, or t
  misc_feature (585)..(585): n is a, c, g, or t
  misc_feature (656)..(656): n is a, c, g, or t
  misc_feature (680)..(680): n is a, c, g, or t
  misc_feature (688)..(688): n is a, c, g, or t
  misc_feature (727)..(727): n is a, c, g, or t
  misc_feature (771)..(771): n is a, c, g, or t
  misc_feature (791)..(791): n is a, c, g, or t
  misc_feature (863)..(863): n is a, c, g, or t
aatgtacatatttaaacacgtctatgtgttcacacatgacttaatggttagatgacatttccaattttaagtnataccaaggngctcacacttccctccctgggcctgttgagggctgctggggcttgagggggtggtgggcgccgagcaaggcactgtataaataaatgcaaaggccaagagctcgggggaaatgttagtgtacacctctgatcagaaatgtggcaagatccacacgaaaaagtgccaagtttttttcccaagcccctcagccaaagcagggagcagggtananntcctctgaggctgagggagcatngnnccgaaggaccccactttccttcacatttnactggctttggaacagtccccagggctcagctgaaaagggggtagttctttgggaacgagattcatttagtgcaattttctcttagtgcagagccagccctgggattggtgttatgcttttctggggtcactggtctgttcccctaggagccagccagtganagngagaacctctccaggnagctgggcttagaggaaaaagccagaaantgantcctgttcaagttcctgaantgatacactggtctcagaacctcatcttcccaggaggtagggctagtttttttttttaataaaaattttgntttggtttttaggctctgagaggnaatgaccnaggagggaggcccatccccacttggcagtggggtcacantggctgttgaggggccacagaagtcagcttctctgcacatatcnacatgatgcaggtctgcttnctagaggatagaggggccaggggcctgctacgtgcacaggaatggctggatggaggcaccgactgggtcagnagctgtcagcaggtggatcatgtc

SEQ ID NO: 681221 - DNA, 950 bp, Homo sapiens
gccgacctttcgggtttcacgagatgggagagctgggtggacttgtagcttcagctggttgcttgggcatgaacttgctgcagctcacctctttttgtagcaggggctcactaatggtacagcgctgaggcaggcgtcacatgacgacttttgacacactggcgtgcaggtgcttgcgtggcgcctgggcggcttgcacgaacgccacagccgggcaagctgggcgtggctggagcggctctggactttgcgagtgaaggtgcgggcaggcggctcgaggcccctgagctctggccctgggctaccttctcccgccagcagcatgccccgtggcgccaggctgctcatgaagtcgcaggccttgctggggcaaggcgctgggcttggcaagctggacggaccaggtgacgcacgctgctcaccagcgccctggccaccaggcgaggacgctgcacggacacgcccgcacgccttcgcgcactcgcgcccacgccccgccagccggccacctggcttaacgggctctggcaacccccggaaccccgagacgctcgcgggaccacccgcacgcgccgctcccgcgccagcggactcccctggcacacaagaaccccccgcgcggcactgccgcctgcgccgacaagccgacccgcgctccaacccaaccgccccgcggccccaaaggcccccgcccccactccccgcccctccgccccaggaccgccaccccgcccccccccacgcccccccgccacccccccacccggctaccgcgcaacctccccccgcacaaccccccgcaccccgcacccccccccaccccccccgccccccccagacacacccaccccccccacccccaacccgcccgccccaccccacaccccccaaccctcccccacgcccccccaccccccccaccacccacccacccccccaccccccccact

SEQ ID NO: 681222 - DNA, 1111 bp, Homo sapiens
cttattgtttatttaagctacagccaaaaatatttttttttcttattctaaactgagccctatagcaagtgaagggaccagatttcctaattaaaggaagttaggtacttttcttgtattttttaccatatcactgtaaagaagaggggaaacccagccagctactttttttcatcactttttattcataacttcagatttgtaaaactaatttccaaaatataagctgttttcattagccagttctataatatcttcctgtgatttatgtagaaaatgaacacaccccttttccatttaagaccctgctactgtgtgaagagatgatacttacaaggagtgtcattacctgtgagctgactgaatgttggtaggtgctccattacaatccaggaaagtctgtgttactgatatttgtgtggaaatctttatttcacttcaatttaaccattagatggtaaaattaagatgctacttgttggtaaaaattggtggactggtttcaatgggtaaatgtgttgtggcaaattaatgtgttggaatattgctctttgtgaatttgtgcttaagtcaatgaatgtgtagtatctccttctgacaagcattccctattgggattttaaagctatgtgcacagaatattagtctcttctacatgttttatttttctatttataattcccttttttgttgttatattttatacacagaatagatcttttttctaacacatatttgaactgaataacagacttaaagaaagcctttgttcacattgctatttacttttgtgtttgggggaaaatacgagggattgattttaaataaaaaacattccatctttcatttaatatcaatatcaaaagaagaagacaaacatctatctttctcatctatatttaagtacctttttgtaatgtagtatcaaagttttttaggtaatgcaaaattttacaaatcatttgtggaatgaatggtaaaactaatctgatgaaatggaaaattattctgcaatattgtaattcatagtttgacttttcataagcaaataaatccctaggatgtaatcaggacttcaaatgtgtaattaaatttttttaaaaaaaatcta

SEQ ID NO: 681223 - DNA, 951 bp, Homo sapiens
tctctgttattaatacataaatgaaagtaacagaatttctactgtgtatgtttcacagagtagagagaaaagagtgaggcatattctttaatgtgaaaataccagtaaaatctgactcctgttatataataatgaaaatacattgcataatgatgtaacatacaacatattacaggaggagaaaaggtaatataataaaaagataccaaatatggagtgtatacaaataatacttgaacagaatatctaaaatgatacataactgtagaggtaacaatgaataagataaaaataaacatgacacaaacaaagacaatataagatattatataagaaataagaaacaaaagcaaagatcactcatatctatgataaatttccttgttaccaatgttaataaatcagtatgttgacctctaaaaagacagatgctaggacaaacaaagaggattcaaatgcacgtcaagtatgagtactcccatgatcaaattaaaactgacttggaacggataataaatgttggcaaaggactagggcatcaagaacacccagatggtcagattaggaagagattaacaataagataccatccacacaggaaaacaaacacaaaggataaaccaaagtaatgcatacacccaacacgaaaagaggacgcaacagacaaagcaactgaaaaacaagcaagagcaaaaaaaaagcaaaagacgaagaaaacgaacgcacagcaacaaacacgaaggacaagagcaacacaagcaagaaacgaacaaaacaacagaagacagagcaacgatagacacagcaggaagcagacaaagaccagcacagcagaaacagccaagaacaagacaacacaacacacaccaaacaagacaacaataagccgaaagaaacaagaacaacaacagaacaagagaagaagaaacacaaacaaacacgaagaacacc

SEQ ID NO: 681224 - DNA, 106 bp, Homo sapiens
tgatgggacaccagcaatgattgcctcagcagtgaccaccccaacaaggaggccagcagcaacaatggtccacccagctcctcagggaaagccacaaggaggctca

SEQ ID NO: 681225 - DNA, 361 bp, Homo sapiens
gcgttcatagcgagtcgctatttgattccttcgatgatatggctctgtccatatcattgttaaagcatcaattcaccaccgcgttggattgtcacccactacaatatggaacgtgaccgggggttaaaccgtcctgatacaggttaattttaccctattgatcatgtgttgtgcccatggtaatcctgctcactacgaaagagaaccgcaagttcagacatttggtgtatgtgcttggctgaggagccaatggggcgaagctaccatctgtgggattatgactgaacgcctctaagtcagaatcccgcccaggcggaacgatacggcagcgccgcggagcctcggttggcccttatccgag

SEQ ID NO: 681226 - DNA, 93 bp, Homo sapiens
  misc_feature (22)..(22): n is a, c, g, or t
gctcatggcgtggtttattacnattccatctcacaaggcgggtgggcgggtggcagcggcacacgaaatccaagccccttctgtcgtcttctc

SEQ ID NO: 681227 - DNA, 1044 bp, Homo sapiens
agcgggagttacttcgctcggagcgggtgaggggacgcgtgggcgggagcggggctggctcagacgctcgggccccatgaccacgttgttcactgtgtccctttctcctagcgaatgtggcagatgtcatatccaccaacattacatcctgtgggttgtcttaccggtgactcgagcttggacgggagacatgtgactgacttgccgtcggatacacgcgcgcgcctacattaccagattccgtagttagtgaccatgggacgtgtcgtggacactgtgtgatgccatgagcggagcgcaggtgcccacctcactagactgagtaggtttgcgcctctggacgtcaaacaccatgacagcccgaccattgcgacaatagccctcgattttactggacacctggccgtgggcctcctgaaccaaagaattcgaatccgcatttccgtagtcgagagtccgattgggaactttagcgacctagatcggcaccgggcggtaagacgtgcttggtagtggcatgtagcgtctcgtgcttcatgggacatctaggggcgtcactggctcccaatggctagtgcctgttacacgcttgtgctgagaaggacgcaggagcgccttggtgcatgccagcgaggattgaccagtctgctgaagaagtccagtacagaataacgactcactggcttcccattcgtgaggaagccataatgccgctccaccgctattgcgcatggctagttcatttcgcacgtgttactcattcgagcgtgagagcgaattaagtacgccgggagtcgcctttatcaagccctcttcatacccaatggtgcacctcaatatgctgccataacctcacaagtggtgtggctcgcagcatgggggcccaaggtagaattgagcggggacatcgttgggccgtaaatacgttacttgatagatcccatccgtaggcatatccccatttgtggcctttgacaaaaacaggtggggaaaggtatggcccattcccacctgtgcatggccggggtcccctgatttggatcg

SEQ ID NO: 681228 - DNA, 420 bp, Homo sapiens
atcgcaaagatggtgcgggatgccctggacgcccaccaacagtccatccccgctgtcctggagatcccccccaaggggcccccatatgacgccgccaaggtctccctcctgggcagggccaggggcatgttccctgccgaagacctgcgctagggggctcctcatagccctcagcccttcccttgtttccaggcctctccccagggttgccctcagccttttttactttttgagcctttgatttccaattccctgctccttccccctcccttaagagggtaggtgaggcgcttttaggttgctggggctttgctggttaaggaacaggaagcctggccctctccctcccctaccttttccctgggctgttacccagggtcattgttgatgttaaattaaagtcatatttttgcttttcca

SEQ ID NO: 681229 - DNA, 175 bp, Homo sapiens
agagagtgatcgagagcttcgtggagaccctaatgcggggtggtgggcctgcgcagtcccgaggaaatggctcggtgagacccctagggttgctgcgccagatcatcagggaccaccgctggagcaacgcggtgagctgatggcgctgatccgcagagagggcaggatggataga

SEQ ID NO: 681230 - DNA, 470 bp, Homo sapiens
  misc_feature (1)..(1): n is a, c, g, or t
nttggaacatctttaattcactaggttaagcttactttatatttcaagcatattcaactgcttttctctccttgaaaatgtgtacattaggacagggaagaagaactgcttaccttgagcaccagggttccctcttgggcctggaggggccctcaataaacctgaaagagataatcttggcatgttaataattggtcaatttcattacattatatgtctatgagaaaagtttagtacacaccgaaaacatgttaaagataatcagttctatcagagaaaaatctttagagcagcaaaggattacactgttactaatgattctatccaaaataaaactaacggatcaaagataatgagcaagttgtacccgtttctcccttttctccggctggaccaggaattccatcacgtccttggtcacctcttatacccattggtccaggagatcctggaaatcctggaagacctga

SEQ ID NO: 681231 - DNA, 666 bp, Homo sapiens
cctgagattggtgtggtctggtacaaaggcttatacgctatcgcagtttagttctcccgtatgctgtatgtatattgcccgttattagcatgatgtaggtagatcggagatctccaatgcgaagaaaatgcacgccaaagcagatcacatgctttgcgcaatttggaaacgagattcgcgcgtggattatagcgattaaggcaagatcacatgtagcatcggatggacgaagatttccaggaacactgactcaactacgattttttgtactcagtcatgacagtcaacgttcttgatcaatcagggagaccgatgtgctatcaatttacttcggcatacgtattgtcctcttgaaatggcggccacatggcattgtagtctccatacggagaatattactttaatactagccacctactggataccgctagtccctttggctcgggtcgactttcgaagaacgattgggtctcatctaggacggttatgcgtactggatcacatatgtggtatggcactgttgcatcattgtatccatccattgaagagcatcagcaacttttattgccgagagttggtcgaatagattgctcgttcgagtcgaatgtagggtattgcccttggcaatgaggggtccgccctgtgcgctcaaatcttcgtggcata

SEQ ID NO: 681232 - DNA, 345 bp, Homo sapiens
atagtagatgcttattgaggtgtgtcctgtgtcctaagcacagttctgagtattcgtctcttacctcatttaatgatgattcctctctccattggttcgactagatgatgagcactgagggccagaatggttcagtagtgaacccaaggccacacagctgttaagtggcatgagaaagaaagaaactttcattttaagcctcttagatttttgtggattgtttgttactgcagcacgaaccagcccatcctcactgataagagccccagtgtgcggagtggattcctgagccagttaaaaggttgctacagcagtggaggcctggttggagggtggtgacaagcc

SEQ ID NO: 681233 - DNA, 303 bp, Homo sapiens
  misc_feature (157)..(157): n is a, c, g, or t
tgagagaccgtgttgatgggagtggagggctgcaccaagtgtataaagtacctgctcttcgccttcaatttcgtggtctggctggctggaggcgtgatcctgggtgtggccctgtggttccgcagtgacccggcagacaacaaacctcctgtatctnggagctggcagacaagccggggccaaaaaccttctaatgtgggctatctaacttcctcaatcgctggtgggccctggtcaaggattgctccggtgggcttcctggggctggctacgggggccaatccaagggaatccccgggtgcc

SEQ ID NO: 681234 - DNA, 212 bp, Homo sapiens
  misc_feature (160)..(160): n is a, c, g, or t
tccgaacttccggtgagccaggagttagaggtccagtgagcgagatcgtgccactgctttggcagccctgggtgacagagcaagactgtgtctcaaaataaagacaggaacaaaggtatcgatactcttaagtataggttaaattcccacaaaaatctgnttttaaaaaatctttttttttttttttttttttttttttttttttttttttt

SEQ ID NO: 681235 - DNA, 258 bp, Homo sapiens
cgagttgatcacttcacactcagtgagtatgagaccaatctgctacaagacaatgagatcacatctctactagaaatagaaaaattagccaggtctcgtggattggaacagccctcgcggcattttgggaggctgaggtgggtggatcacctgatgtctgtcaggagtttgaaaccagcctggccaacatggtaaaaccccatctctactaaaaatacaaaaattagttgggcatggtggcgggtgcctgtaatccta

SEQ ID NO: 681236 - DNA, 853 bp, Homo sapiens
ctgatgtgggtggtgtcacgcattgcagttaaagctgaacttgtacgggcgtgtagttgacacatgttaatactgtcttatactctcgtagtctcgaatacgctttggatacaaggtaggacttgaagtgtgtatttccttggagagagaagacaagacttgtggtatttaccatcatactaggtacaaagtcttaaatgtgcaccaagaggtagtaggatcaagttattagttgtgatgttctgtaaatagaacgataaagtaccttatttgatatggcatcgaatgtgagttaagcatggcttgatttctgtataatttatctctaaatcaaatgggcagagttgtgaatactatggatgatcggatgtaagtcgtttgagtgagtaagaaaatgatatctatccaagcagcagtctcagcctgcatctagaaacatagtcctaactgcttctatccgtgagagctgtacgtgtcggtccttgccgcatccgatgttgaaatgcgtcgaaagcatcctatcgataaacacgggtctatggtcatattagtttagggagttagaatctatgcgatctgtaatgcatatcgaacaaggaacatccattggggtataagagatagacccaagcttcggacctgggacccctaaggacatatcacttagcaatttatttagtgtaatgagacgactttgctctggattgtgattcttgtccccaaagggcacccaagtgtgtaccaagtgggcttcgtggagcctccttgggattacaatccggggctagatttttcaatgtccatttgggaataaccgtcttcgctagaaacttgaggggaagcgaacaattca

SEQ ID NO: 681237 - DNA, 350 bp, Homo sapiens
  misc_feature (32)..(32): n is a, c, g, or t
  misc_feature (83)..(83): n is a, c, g, or t
  misc_feature (89)..(89): n is a, c, g, or t
  misc_feature (103)..(103): n is a, c, g, or t
  misc_feature (140)..(141): n is a, c, g, or t
  misc_feature (153)..(153): n is a, c, g, or t
  misc_feature (158)..(158): n is a, c, g, or t
  misc_feature (161)..(161): n is a, c, g, or t
  misc_feature (192)..(192): n is a, c, g, or t
  misc_feature (350)..(350): n is a, c, g, or t
tcatcattcaaaataaaacaaaataaaaaaanattaaggcgaagattaaaaaaattttgcattacataatttacacgaaagcnatgctntcacctcccctgtntggacttgggagaagactgggccattctccttacacnnaattggggtggnttttnggntggcaatggacttcctgtaacaacgcatctnatatttggaatgactattaaaaaaacaacaatttgcaatcaaagtcctcggccacattgttaactttgggggatgctcgctccaaccgactgctgttaccttcaccgttccagtttttaaatcctgagttaagctaaagaaaaaaaaaaaccaaaagn

SEQ ID NO: 681238 - DNA, 194 bp, Homo sapiens
tggggactaaaaattctgtaaagagtgattctttttttttttggagagggagtttggttttttggccaaagttggggggttttaggggggttagcgatggaggtggaattggggctgggggtaaaagagtttgagggggggggggttggggaaaactttaatggggtgggaggctgaatattttatgagggaga

SEQ ID NO: 681239 - DNA, 1135 bp, Homo sapiens
  misc_feature (801)..(801): n is a, c, g, or t
atttcaggattaagctggttttctatttaagattcagttaaacacaaactatactattgtttctttgaaacgggtgtagcccctcttgtgccaacaagccactactacaaatgtgtggcgccctttaacagttacaggtggggattattgtaccactcattctcacacaagagctataccatcaccacccgaggtacctcaagaggctctctcctatatcaccactaccaacatccacatattcttacattctctattacaccactacaacatccactatcttgtgctatatacacgtgcctatattgtgacaacacagtgttatatccctcttttatttacacatatctcttacacatatacaagacagatattcgtgcacatatctgtgttacacctcagaggtatagctcctatgagcacaccacaattatctctcgcgcatgtgttgctgtcttctattgcgccaaatatacacccatcattttcacacacacaatgttctcttcttatacatgtgtgttgtgtgtgcaacacccatatttctgtgtccaaatatgtgttgctccaaatatatatgcacaaatcttccgccgtgtgtaacacagagtcgtacccttgtgtgtgcggggcaccaacatcttcccctatatactgagttttgtaccatcatacatgtggtgtggaacatcttctccatgtgccagcacaaccaatgtgcccacgtcttcttaacaaaagagactcatattacgcggcgggggaaatcattatttttatacgcgactgttgtggaaaccncccccaaaagtgataatcctctaagaataagcgccgttgaaacacatgttcttaagttagataacccagaagcgcgattatgttgttgtaaccgaagagaatgctagccactctctatgttgggggaccccacgagaatcacaaatatacatttatgttgtattagacccatattagaggcaattttgtaaagatcgagactaaagcatctctcttgccgcaaaaaaaccactacacgggcattacaacgcgacaattagtactacacaggtggggcacattcacaacaggctgggctggcggtccccttaactgtaacacaaatactaagccc

SEQ ID NO: 681240 - DNA, 364 bp, Homo sapiens
gacagcgggatatgagtgaggcaggttgagctcgctaatcgagggggactgtctcatatggtgtccgaagaaatggtgagacgatctcacagagggactaggctcgaggagggctggagtatgagacattccccctacccctgtgaattagaaaacgtggccaaaatattttttaagaaaatggttaccctgtagttctttaactggacctatgtagacaacatcttacacactggagaaggatgatactatgtgaatctagtaagtctacaggacaatacttctctctttaggctgtcttcttcctctccagggtgatgacaactccgtgagggtggagattatatgtctctcatcatttaag

SEQ ID NO: 681241 - DNA, 164 bp, Homo sapiens
  misc_feature (3)..(3): n is a, c, g, or t
  misc_feature (52)..(52): n is a, c, g, or t
  misc_feature (114)..(114): n is a, c, g, or t
  misc_feature (133)..(133): n is a, c, g, or t
gancttatcacctttcatgatcacgccctcataatcattttccttatctgcntcctagtcctgtatgcccttttcctaacactcacaacaaaactaactaatactcatctcagnacgctcaggtagcgttgantatctgcccggcatcatcctagtcctctcgg

SEQ ID NO: 681242 - DNA, 712 bp, Homo sapiens
ggccctttaattggctaaatctggtagctctttagagagagaagcaaattcacatttgggggtttggacctcccagtaacatgctaggggattcctatgtactctccttgatgccaaaagatggatgttctaaaaccgttttggcccctcaccagttggatgttccctgtccctttgagcctgggtttcctcattttttagggggacatgggaattcctatctcacaggattgtcacaaggatgaaatggagtaaatgtaacggcatatcgtacggggtctgagacaaagcagacacccaacacatgtttgctgctgagtgaaattcctcaccctaagaatgacgctttgttctttcactgaacctgtcaggacccgtccaggctgagaccaggggagcgtgtcattcccacagtggcaggcaacattatggtggcttcaggggctttagggggagcgagcggggaacacaggagctgggctcctggtgaaccatccaaataacagttcaaaggagaatgaggggcctgggtttctgttttttggggttggaaaccacgagcacaagagacttctttttcatttgggcttggccaccatttttaaaaaaaaggcaactggtggcaagaacaaagggagggttttatagcaccacaaaggttttttgggggtttaaaaaaaccgggacaatttaagcacttttccccttgggg

SEQ ID NO: 681243 - DNA, 392 bp, Homo sapiens
cgttccatctgggctgtagaaacccattgcaggtttgtgcatgccagccctgctgttgccgtgagaccacggacaccaaagaggtttgcaggggtacacgtgtcctttccggacaccaaagaggtttgcaggggtacacgtgtcctttcccgggaggcttcagccacatcagtgctgatgtgcctcaaggcacatgagtgccttgagggcaggggcagtggctggatggtgcctactgtaggcctggagctctcttctggcctggtatacagaaggcactcagagagctcatatgggaagtactgggtaggaatttgggcagatggtgcttctagaatattggtggccttgagtggaaagtcttgtggtagtaaaagtaactgaaaatgaaa

SEQ ID NO: 681244 - DNA, 578 bp, Homo sapiens
  misc_feature (337)..(337): n is a, c, g, or t
  misc_feature (375)..(375): n is a, c, g, or t
  misc_feature (385)..(385): n is a, c, g, or t
  misc_feature (500)..(500): n is a, c, g, or t
  misc_feature (536)..(536): n is a, c, g, or t
  misc_feature (549)..(549): n is a, c, g, or t
  misc_feature (573)..(573): n is a, c, g, or t
  misc_feature (575)..(575): n is a, c, g, or t
ctcacgaatcctctcctcttgttcccccctcccccctggcacgggaccggatccactccctacactgccatactgctgttcctccacgcccctccccttgtccctggccacacccggtacctttggggcactgggggccttatcactgggatgcttgtgtatatcgaccccctagccttctctctccccttcccgtcctccccccgaatcaccttcctaggacaccccgaggctgcttgcccagggtcctgttccctgctaactccagagaagcatcccagggctttgtgacagtctctaattcccttcccttctcgttaagaatcatattgtatantagctttcagaccatacagtattcattgggttactccnattattatcnagtagctggaattgtgaaggtcggagtagttagatctttagcttttattccttatttttttgtattactctccatgtgtataaattattgatcatgttgctggcttttataactntaagcgaaggaggagcactgcctcagcctttgcacntggtaatgaagcnctgtttttaaataaaagagagaancncca

SEQ ID NO: 681245 - DNA, 228 bp, Homo sapiens
ctggccggcattctgacctctgatgccatctttttgtatcttgggagtcagtgtgctacccaggttcctgccaagcttggcaacattaagcatgatgttgtactcactgtgtctactgtgttgtatggagctggtccaagcaagcctcagcagactatctaagtgtacttaagatgccttcctcaacagaaaatgtttcagagacgtggcgagaaggtccaggtatgt

SEQ ID NO: 681246 - DNA, 395 bp, Homo sapiens
catacaggatcccctacatggcttgttatacaggatcaccaattatggatttaacacacttccgagtctgataatagtagacacaaaaagataaagaatctctctagacattttcccccatggttccactctcccgctacacacactctccaatggactgctactgatccaagtctatgtcagtttcttggcttcgttgttgagtgtatccactactttgctcgtgttctgaattcgtttccagagctgtcttcgtttgtttctctactgcgggttcatcgaaaattatcaggacaccctccccctggtccaaaatcccatgcaaatttcttgtttcgaatcatctgtgatcctttcctttccacttcggtcttatcgagttcgatccgactaga

SEQ ID NO: 681247 - DNA, 108 bp, Homo sapiens
catgagctggtccttacaattcacgatcacagccaccactcaccctccttaatcatctacttctacctacgcctattttacaccaaccccgtgatcgtggggttgtaa

SEQ ID NO: 681248 - DNA, 642 bp, Homo sapiens
  misc_feature (401)..(401): n is a, c, g, or t
  misc_feature (439)..(439): n is a, c, g, or t
  misc_feature (449)..(449): n is a, c, g, or t
  misc_feature (564)..(564): n is a, c, g, or t
  misc_feature (600)..(600): n is a, c, g, or t
  misc_feature (613)..(613): n is a, c, g, or t
  misc_feature (637)..(637): n is a, c, g, or t
  misc_feature (639)..(639): n is a, c, g, or t
ctcacgaatcctctcctcttgttcccccctcccccctggcacgggaccggatccactccctacactgccatactgctgttcctccacgcccctccccttgtccctggccacacccggtacctttggggcactgggggccttatcactgggatgcttgtgtatatcgaccccctagccttctctctccccttcccgtcctccccccgaatcaccttcctaggacaccccgaggctgcttgcccagggtcctgtttccctgctaactccagagaagcatcccagggctttgtgacagtctctaattccctgggatgtttccctgctaactccagagaagcatcccagggctttgtgacagtctctaattcccttcccttctcgttaagaatcatattgtatantagctttcagaccatacagtattcattgggttactccnattattatcnagtagctggaattgtgaaggtcggagtagttagatctttagcttttattccttatttttttgtattactctccatgtgtataaattattgatcatgttgctggcttttataactntaagcgaaggaggagcactgcctcagcctttgcacntggtaatgaagcnctgtttttaaataaaagagagaancncca

SEQ ID NO: 681249 - DNA, 238 bp, Homo sapiens
  misc_feature (47)..(47): n is a, c, g, or t
  misc_feature (78)..(79): n is a, c, g, or t
  misc_feature (91)..(92): n is a, c, g, or t
  misc_feature (98)..(98): n is a, c, g, or t
  misc_feature (106)..(107): n is a, c, g, or t
  misc_feature (110)..(111): n is a, c, g, or t
  misc_feature (116)..(116): n is a, c, g, or t
gggggccccccccccccttttttttccccccttaaaaaccccggggncgttcccccccccgggttttttccttgggcnnggggggggttcnntttttnccccgggnnccnnttttnccctttggcctttttgggggcccctttaaaccagttttttccaaaaaaccgggtggggccgggccgggatttcccgggtttttttccccccccgggccccggggggggggggtttttcccca

SEQ ID NO: 681250 - DNA, 212 bp, Homo sapiens
  misc_feature (47)..(47): n is a, c, g, or t
  misc_feature (78)..(79): n is a, c, g, or t
  misc_feature (91)..(92): n is a, c, g, or t
  misc_feature (98)..(98): n is a, c, g, or t
  misc_feature (106)..(107): n is a, c, g, or t
  misc_feature (110)..(111): n is a, c, g, or t
  misc_feature (116)..(116): n is a, c, g, or t
gggggccccccccccccttttttttccccccttaaaaaccccggggncgttcccccccccgggttttttccttgggcnnggggggggttcnntttttnccccgggnnccnnttttnccctttggcctttttcaaaagtttttttggttcccctttttgggggggcccccggggggccggtccgggttttccgggttgccccccggggcccca

SEQ ID NO: 681251 - DNA, 242 bp, Homo sapiens
gtctcgcagtgtccataaagcagcatgtccatcagtcccagtcgtgttgtacaccagcgtgggtactcccttgaggctcagcggggcttgcctggcgaaagcggtgacgatctgccgctgaatcttctccagatcgcaactcctgcactggtctctctgccctcctccacctggtactggcagttggagagacatcagtggagtcaggtcccgctcccacttcataactgctgacatgcagt

SEQ ID NO: 681252 - DNA, 499 bp, Homo sapiens
cacaccagctcggggttgcacaccagctcggggttgcacaccagctcggggttgcacaccagctcggggttgcacaccagctcggggttgcacaccagctcggggttgcacaccagctcggggttgcacaccagctcggggttgcacaccagctcggggttgcacaccagtctcggggtttgcacaccagctcggggttgggtaatgtaaaagtctggatcaattttctatttctgagctaaaatcctgcaaatcctgccaggtgatgggaataaataggatgcgcatcactcagaggttaccttttgggaaagtaagaccaagggagctaaccaaagccaagcaccacgcacccaaatcctggctagcatgactatagctaccagtaatctgggtgtgtcacaagacatcattttctctccctttttggaggaggactcaattacacagcttcaccttagcattcagcttaatgataaggagtccatgcaaccccgag

SEQ ID NO: 681253 - DNA, 581 bp, Homo sapiens
tgagatggagtttcactcttgttgcccaggctggaggtgcaatggtgcgatctcgggtcactgcaacctccatttcctgggttcgagcggttctcctgcctcagcctctcgagtggctgggattacaggtatgtgccaccacgcctagctaatttttgtattgttagtattatttatattattagcagacagagtttcatcatgttgcccaggctggtcttgagctcctgtcagctgttatacttctatgtgttcagtgcttttgggaggggtcagagtggtagcactgcttttcagacacacttttgtgagtgtgatgcttcaggacctccacgttgtcccatttttatttgtggcgcctttatgggctgtagcactctcactgggactgtgtcattcatttggttagttaacaaacacttattggacaactgttgggagctaaccttgccacttgatccaaattgaattagacatgggcttgatctttaatatgctttcagctttggtggaaataaagaagcctaaagacccggctctgttgtttcctgttatctccactttggggcccttgtggccgt

SEQ ID NO: 681254 - DNA, 86 bp, Homo sapiens
  misc_feature (14)..(14): n is a, c, g, or t
tctggacttcgganttgggggtggtcagacaccacaggagctgtcaacctctgcggatgggcaaataaattggtggaggacggaga

SEQ ID NO: 681255 - DNA, 1284 bp, Homo sapiens
  misc_feature (1105)..(1105): n is a, c, g, or t
tggctggtccataagtttattatctatttctgaaaaaatcataaaaaatggcggggttttagctctcctcagcaagcccgctctcctgtgaagcctctgtgaaggaaagctgtgccttctttttggagcatacccgactccttctctcgtgagcaagggcacatttggggcacggttccacctcttcttttaaacttctctttccttggggcctctcttttctcaataaagcgtggattctcctcctcgtatatatagccagccatgtgagcctttctctttattacattctctcctctccatctcagtgtctcgtgggagttatacgccgtgtgtctctttatagtgtatattgtgagagaaaaccgtgtttctctgtgtgtataaggcattcttctcatctctttcttctccattataaggatggcggcatgtgttaatcctgtgcaaccattcctgtgcgccccagtgattggtgccttccagatggttacctctctgtggctttttaaattccccttgggcatttacagaaactctaatacaccgggggggaactcgtgtgtggggctcacgtggtggaggggaattagaacagaggcctctcacatcccaaagaggctctcccttttcaggggcccaccaaaaaaacttcttaagtgtggcccacgtggtgggataagtcctctgtgagcaaagaggccgtgatatctcccaaatatacgccagtgcttgaaacggcccccgtgtgctttgacccattcaaaggtgctctcccaccatttggttattcattcaaccgagttccaccccccaacttgtggccctctcaataggactccttggtcccattgccaaaacccctatttggaaaaaagcccgtggcggggcgccatgcacacactagggccccaggctaacaacttattcgcttgccacgcaaaaactttgggtccaggggcccaaccctttcacaccccataattttgggccaactcccggggttgccacaaacgctggggcagcactcaattcaatatttccccccctttaatagcggcggcgttaacgccactccttgaccgcacgtgaatactctccgtcntcgggccgcccggacactaattacacccgggagaggggggaagccgccataaacactctacaatcctggtctaccaccacgcgctcgccgcgcagattaataccagaggtgacccacctcagcatgctttcaaaaatacaccggcattccctaaacgaaggccgtcacttatcagcatc

SEQ ID NO: 681256 - DNA, 119 bp, Homo sapiens
tgaagtggccgagtgcgtctcctgatgtggcttccttccagcctctaccagccgtgggggcctcctccaaggagcagtgtggttagatgtcctcttgtgcccactactactacgtgcag

SEQ ID NO: 681257 - DNA, 689 bp, Homo sapiens
ggacatgatgcatacagaacggaaggtggacgtgtatggctttgtgagccggatccgggcgcagcgctgccagatggtgcaaaccgatatgcaggtatgtctgcatatacctagagcccttctggagcattatctctatggagatacagaactggaagtgacctctctagaaacccacctggcagaacatttacaacaaaatcccatgcggaccagcaacgatggattagaggaggagtttacacgcaagcttaaccgtcaatcaacaattccaggaatgacaacgtatgcgtgcactggaacgaccttccaggcaacatgtacgaagaaccgtgtcttacagatcattccatactgaatacaacagagtgatcattccagcttacagcggggcgaacgagaatacatgactatgtgaacgcactccttgattgactggctaccggcagaaggactcctatatcgccagccagggccctcttctccactacaagttgaggacttctggcgaatgatctgggagtggaaatcctgctctatcgtgatgctaacagaactggaggagagaggccaggagaagtgtgcccagtactggccactctgatggactggtgtcctatggagatattagcagtggaactgactgacaggaggaggaatgtgagagctacaccgtccgagaccttcct

SEQ ID NO: 681258 - DNA, 82 bp, Homo sapiens
ggaggggaccgcagcatccagccctctaaggccgggcagcggtcgcgttggggcagagcgcagcgcaagcaggctcagtgta

SEQ ID NO: 681259 - DNA, 158 bp, Homo sapiens
cgctaaaaagggtcagtatggtcaagatgacagtgtcagtaaatctggcaagacagtgatgtaaagaatgttcatagatttaacgaattatctaacaatattttaaaaactataaagctgcaacacatgatttttacaccttagttactcagaaaact

SEQ ID NO: 681260 - DNA, 398 bp, Homo sapiens
gaaccgggtaacctttaatgaccttctaatcctctttatctggtctcataacaggggcgtgtttcgacaacatgcacccaggactgacgttgcgcataggatgtgagacgtcggagacagacacattgcagccatgctgtgcaacgcttatacatattctcataagcagcgtaccatttaacatcacgttaaactagcgaatgaagcaactgagtttgcagagacttcagatgctgatgacggagctgaagattgtctcaaatgactgtgcacactatatcgggactagctatgcacaggtgcaagtctccttgcctatggtgagaggagttgactgtggcgcagccctagaacctgagagacttgaatgctcatagcgcacagatatacccctgcct

SEQ ID NO: 681261 - DNA, 417 bp, Homo sapiens
ccttcggctggaagccgcctttggcttccttcttttgaggtttgggatccgatggattctggctactcaccttgcaaggtctattgtgggacctcatttggatcatgtctcatatggagctcaaactgggcttgagctcctggcctcaagggatcctcccacctcaacctcttgagtagctgggactacagctgcaagccatactgcctggctagttatctttaattaatgacatttgttaaagtaacacaagcatcctataaacatttgcctgttgaaactttctgataatgagaatgaagcaaagatgggagtctctgtctcattgaaaatactcagggataatataataaaaacagaaaagcaatggtgcagtaaaagaattattagaagcctaataaaagtattgggacctcc

SEQ ID NO: 681262 - DNA, 335 bp, Homo sapiens
agacgtacctaattattatggatgatataaaacttaactcacgaaagatgaggccaggtgcagtggctcatgcctgtaatcctagcactttgggaggtcaaggcgcgtggatcacctgaggtcaggagttcaagaccagcctagccaacatggtgaaaccctgtctctactaaaaatacaaaaattagccaggcatggtggtgcacgtctgtaatcccagctacttgggaagctgagggagaaaaagcacttgaacccaggagatggaggtttcaggggagccgagattgtgccactgcactccagcccaggtaaccagagcaagactctgtctt

SEQ ID NO: 681263 - DNA, 1463 bp, Homo sapiens
  misc_feature (336)..(336): n is a, c, g, or t
  misc_feature (925)..(925): n is a, c, g, or t
gcatcccggtggggagaagggccaggcagagaaaagtagtcagaaacagagcaacaggtgaggctgaggcaggagattgagctgacactcaagccaaggaagggggaattaggaaacaattagaaaaaaagtaaagacagtgaaaaagtcagagacagctgcctgcacctacacacacattcagagacagagtcccagagggtggcatacacagagggagaaggggagggaacaggtgtggagaggagctgcggaagcagagaaatctcaagtcagagattcagggacacttggtccccgtggcgagccatggaagcagaaaggaggcgccaggcngagaagccaaagaaggggcgagtcggcagcagcctgttgcctgagagacacccggccactgggaccccgaccaccacggtggactcgagtgctccaccctgcagaaggctccctggtgcaggaggggggagatcaaggttctccccgcaaggaggacagaggggccgcccgcactcccggcgccgccaccgcaccaccttcagcccagtgcagttggaacagctggagtcagcctttgggaggaaccagtaccccgacatctgggcccgagagagtcttgcccgggacactggcctcagtgaggcccgaatccaggtctggttccagaaccgcagagctaagcaacggaagcaagagcgctcactgcttcagcctctggcccatctgtctcctgccgccttttccagcttcttgccagagtccactgcttgcccctattcttacgcagcaccaccaccaccagtgacctgcttccctcacccctacagccatgccctcccttcccagccctccacaggaggcgcctttgctttgtcacaccagtctgaggactggtaccctaccttgcacccagcccctgccggccatntgccctgccccccaccccctcccatgctccccctcagccttgagccatccaagtcctggaactgaggtcaaacaagtaccaccaaggtgatccccagcctgcggccctcgtgaaaagacaagaaaatggggtggcttcctttccatctatgggtgaagcagatgcatggtgagggtcagctcaccgattagaaatttaaaaatgggagatcatggtgaattctcactggggtgattagtggaggaagtctggggaggtgagctactggaagagacagggcaagatgcctcggtggagctgcctgctgaagggtgatattgatgaagacagttgctggtgagtggagatgattgaagggctaggaggtgagggccttcattaattgagatcacgattgaagaagatcccagctctttctggctgatttcagtaaggcttctgacttaagagtctacctatacatcccttccccattgcccaccccgccatctcaatcagtcactgacttttgtttattctgtcctagaatacctttttt

SEQ ID NO: 681264 - DNA, 840 bp, Homo sapiens
  misc_feature (33)..(33): n is a, c, g, or t
  misc_feature (73)..(73): n is a, c, g, or t
  misc_feature (116)..(116): n is a, c, g, or t
  misc_feature (132)..(132): n is a, c, g, or t
  misc_feature (150)..(150): n is a, c, g, or t
  misc_feature (168)..(168): n is a, c, g, or t
  misc_feature (185)..(186): n is a, c, g, or t
  misc_feature (206)..(206): n is a, c, g, or t
  misc_feature (210)..(210): n is a, c, g, or t
  misc_feature (232)..(232): n is a, c, g, or t
  misc_feature (277)..(277): n is a, c, g, or t
  misc_feature (282)..(282): n is a, c, g, or t
  misc_feature (285)..(285): n is a, c, g, or t
  misc_feature (287)..(287): n is a, c, g, or t
  misc_feature (292)..(292): n is a, c, g, or t
  misc_feature (295)..(297): n is a, c, g, or t
  misc_feature (299)..(299): n is a, c, g, or t
  misc_feature (301)..(301): n is a, c, g, or t
  misc_feature (311)..(311): n is a, c, g, or t
  misc_feature (313)..(313): n is a, c, g, or t
  misc_feature (318)..(318): n is a, c, g, or t
  misc_feature (323)..(323): n is a, c, g, or t
  misc_feature (331)..(331): n is a, c, g, or t
  misc_feature (333)..(333): n is a, c, g, or t
  misc_feature (350)..(350): n is a, c, g, or t
  misc_feature (364)..(364): n is a, c, g, or t
  misc_feature (381)..(381): n is a, c, g, or t
  misc_feature (390)..(390): n is a, c, g, or t
  misc_feature (392)..(392): n is a, c, g, or t
  misc_feature (430)..(431): n is a, c, g, or t
  misc_feature (567)..(567): n is a, c, g, or t
  misc_feature (628)..(628): n is a, c, g, or t
  misc_feature (692)..(692): n is a, c, g, or t
  misc_feature (797)..(797): n is a, c, g, or t
atttataaattagataaacaaaagaaacgattncaacatcacttttgttatgagaaaagaggcaatggaattnaacataagcaaagaaaactctacctggaggaaagaaatcgatnagcgaggaaacaactnggggctgctgccagactnaagggcgtgggggggggngcctcctagaggatttnnaaagcaaacccatccctgcnagancaggaagcagccgttctacctnccagagaaacagacctcagccctaatgatcactcaaatccgagtnaattnctntnttttnaannngntnatacatagtntnccctnccttncccagttntnttggcgacagggcggtnacaggacatatgtnttctttaccagctgctncttgttatntncggagctccagatggtgcgcagggcacgctcctggttnntccgtgccacccggattaggtagaccatggaggctcccaggaagaggattaacaccatcacgaacagccccgccagaaccaccacctttgagccaaggggctggggaggattcttctgctggtggtagcagcgganatgcaggcctcctcagagcggtactgttcttattgccccggcagcctccatagatgaagtnattgcaggagttcctctccacgtcaaagtaccagcgtgggaaggatgcacggcaaggcccagtnactgcgttggcggtgcagtattcttcatagttgaacatatcgctggagtggtcttcagaatcctgccttctgggagcacttgggacagaggaatccgctgcattnctgctggtggccaggtcacccgtggcattctctgtgacagttg

SEQ ID NO: 681265 - DNA, 195 bp, Homo sapiens
agagtttccccccgtcacggatacctcaatgtacttgtcccccgaattgctagcggtggggttggtgcactgcctcctggaccagctgtacgccttcaccacatgtgcgcgagcatgggccatagggatcccatttggcccaggaaccatccacctctgaggaagagcctgttatattccttggtggatccaggc

SEQ ID NO: 681266 - DNA, 1292 bp, Homo sapiens
ggacgcgtggtgtcgacccacgcggtcggtcagcagaggcctcgattcgggcgcccagtggtcctgccggctggtctcacctcgccatggttcgtctgcactctgctagatgcgtcctctgtgggcgtgcttgcatgacgcagctttgtcgcgatccagaacgcactcgcacatgcaatgcagagaaaaaacgagtagcctgaataaacaagtcgagtgctagttctttgtgccagcgcaggacgatgaatacttggtgacgtgacttgtcacatgacgttcagcatgaagatcggaagtgcacttccttggcggtgaagagcgaatttccttagactacctggaagcaggaggagacacactggctcagccatgtcacgaaattcactaggcgaacactcgcaacactaagggtctctcggagtaccatgactagagagggacatcctacagtaagaacagagcaccattctggcatcctgttgacagaaaggcttggtcagctagtacgaagttgaaggcctgatgacgcgcttgtgtccctgcagccgagtccatgcatcggcccgggcttatgggggtcaaggcaggattagctacaaggaggtttctggataccactcatgcgacgccctggcccaggtcatgcattcttactccagatgtggtcatcatgctttcgcaacaaatggtcacccgttgagacaacgctgttgagaccagaagaactgagttgtgcaacaggcagggcaacaagacaagactgcatgtcgtctgtggtccccaggatcggctgagcagccctggatgactgatccccatcatcttcggggaacctggaaggcaatactacaggaagcgagctatatccaacacacggggggcaagaacgcaacccataagggcaccagcccaagacggaacccgggacacacatttcccacaaaaactcccgaaggtcccacacaggagggccagaggaggacaacctacacccggggagtacaccaaccgggggcacccccgggacgagagtgcacaacagccacacaacaaacggcgcagaaaccaaacgagtagcgcgctaacccacccacaaacaggtcgggcccaccgtcgggcaacacaccgcaatggagcgcaacaccaggagctacccacagcagctggcaacgcaagaacgagcaacaaagaagcaataagacagacaagacagatacacgaagaagagacaccacacacgcgacggacaaccaacgcacacactacacctagaacccagcacgacaaag

SEQ ID NO: 681267 - DNA, 115 bp, Homo sapiens
cacatgggagcaaacgacacagggcacaaaggactaacccaggccaaggctccagtctccaggcatgtgtgcccctccttttcagagagtcccacagacagccagatgcatgtac

SEQ ID NO: 681268 - DNA, 329 bp, Homo sapiens
aaaatttttttccttttcgttttgtttactcttttcaagtcttttttaaactactagatacggggtttcgccatcgttcttcaatctcctggtgctcaatgccatctgcccactgtggtctcccaaatatgcatggatttacaggcgtgagctaccgcgcatggactggaacattttctttacatacactggtcttttctccccttctgatcatcagacaatgggatacatttttagaaatcaggtttaagcactactttcagataagcattgcatagttacaacagttacctcaaaatagaagtatgaagagcaagtgagaaatctgg

SEQ ID NO: 681269 - DNA, 367 bp, Homo sapiens
acgcgtaccttgtattgtccagttcacagtagagtagggtagaaggaaagcattctctgcttccatggcttcctgagaaagcccacctgggctgggcgcggtggctcacgcctgtaatcccagcactttgggaggccaaggtgggcggatcacaaggtcaggagttcgagaccaacctagccaacatggtgaaaccccgtctctactaaaaataagaaattagccgggtgtggtggcacgcacctgtagtcccagctacttgggagcctgaggcaggagaatcgcttgaacctggggagtggaggttgagtgagccgggaccgtgccattgtactccagcctgggtgacagagcgagattccgtctc

SEQ ID NO: 681270 - DNA, 963 bp, Homo sapiens
  misc_feature (1)..(3): n is a, c, g, or t
  misc_feature (837)..(837): n is a, c, g, or t
  misc_feature (852)..(852): n is a, c, g, or t
  misc_feature (865)..(865): n is a, c, g, or t
nnnaaaggaagaagagtccaccttgcgaccgtatccgctagcgcggcctgggatgcgcttgggctccctgttcgttcccacatgcagggcagcacaaggagaatgggcgtcatgactgatgtccaccggcgcttcctccagttgctgatgacccatggcgtgctagaggaatgggacgtgaagcgcttgcagacgcactgctacaaggtccatgaccgcaatgccaccgtagataagttggaggacttcatcaacaacattaacagtgtcttggagtccttgtatattgagataaagagaggagtcacggaagatgatgggagacccatttatgcgttggtgaatcttgctacaacttcaatttccaaaatggctacggattttgcagagaatgaactggatttgtttagaaaggctctggaactgattattgactcagaaaccggctttgcgtcttccacaaacatattgaacctggttgatcaacttaaaggcaagaagatgaggaagaaggaagcggagcaggtgctgcagaagtttgttcaaaacaagtggctgattgagaaggaaggggagttcaccctgcacggccgggccatcctggagatggagcaatacatccgggagacgtaccccgacgcggtgaagatctgcaatatctgtcacagcctcctcatccagggtcaaagctgcgaaacctgtgggatcaggatgcacttaccctgcgtggccaagtacttccagtcgaatgctgaacgggctgccccactgcaagactactggcccacgagatccaaaagtcttcgaccctgagaggagagggagtcggggttgganccgacaaaagtccgngggccacggatancacggccggtgaggctgggcctgatggcgagcgccacctctggagaaggcggggcaggaccgaagacacaggaatggacggcagctgggacacccgga

SEQ ID NO: 681271 - DNA, 107 bp, Homo sapiens
gcgcttgagaatcacttgacatctgggagacggacgttgcagtgagccaagatcacaccagcccaccacactccagacctaggcagcagagctagactccatctcat

SEQ ID NO: 681272 - DNA, 808 bp, Homo sapiens
  misc_feature (1)..(3): n is a, c, g, or t
nnnaaaggaagaagagtccaccttgcgaccgtatccgctagcgcggcctgggatgcgcttgggctccctgttcgttcccacatgcagggcagcacaaggagaatgggcgtcatgactgatgtccaccggcgcttcctccagttgctgatgacccatggcgtgctagaggaatgggacgtgaagcgcttgcagacgcactgctacaaggtccatgaccgcaatgccaccgtagataagttggaggacttcatcaacaacattaacagtgtcttggagtccttgtatattgagataaagagaggagtcacggaagatgatgggagacccatttatgcgttggtgaatcttgctacaacttcaatttccaaaatggctacggattttgcagagaatgaactggatttgtttagaaaggctctggaactgattattgactcagaaaccggctttgcgtcttccacaaacatattgaacctggttgatcaacttaaaggcaagaagatgaggaagaaggaagcggagcaggtgctgcagaagtttgttcaaaacaagtggctgatttgaggctggagtgcaatggtgcaatcttggtcacgaactcaacctccggaattaagcgattcttctgctcagctcccagtagctggatcacaagcatggcatcaaccggtaattttcattctagtaagacgggtctccaggtgacagtggttcaatctgacccaggatcgcggttcacccaaggggtgacgggggccggccggcagccattaaggggggggcccggggctggagtggggcccggaag

SEQ ID NO: 681273 - DNA, 120 bp, Homo sapiens
gctgggccccccaagagtggtggctggcccaaggcgggagagggggcggtggaaagtcaggctctggagagagtgggcagctcttcgtggaccagcaatgaatacgaagattcccgtcga

SEQ ID NO: 681274 - DNA, 94 bp, Homo sapiens
aactgaaagagattgagcccccacacgagcaattcacaaaggtctgttctatttggtaacccaatacgttcttataaaatccaacccatgcata

SEQ ID NO: 681275 - DNA, 840 bp, Homo sapiens
gaggggtgggaggatcatcagcccggcagtggccctgtggccagcaggtgcactcaagaagctaaggccaggccatctgagcacaaagattgcgagaaggaaggggagttcaccctgcacggccgggccatcctggagatggagcaatacatccgggagacgtaccccgacgcggtgaagatctgcaatatctgtcacagcctcctcatccagggtcaaagctgcgaaacctgtgggatcaggatgcacttaccctgcgtggccaagtacttccagtcgaatgctgaaccgcgctgcccccactgcaacgactactggccccacgagatcccaaaagtcttcgaccctgagaaggagagggagtctggtgtcttgaaatcgaacaaaaagtccctgcggtccaggcagcattagccatcgtgccctgctgaggggctggctgccttgagtggcctgatcgccacagcccttcttggaagaaaggcgtccgtgtttcaggttccacgcgagtcacctctttcgtcttaatgttcaccgtccacagctttggaataaagcatccaaaaaaaaaacaaaaaaaaaaaaaactttgggggcccgctggggccctggaaaaagttttttaaaaccttcgtttgggggcgggggcccacatgggttaggggacctcggggcccagaggtggcaccgaagaaaatccggggcacagaacaaagtgctgggtttcccccatataaaaaacgcccggggggaaaccgaggttttcggaaacactcccgaagggagtcggaggacatacggggtatctaacacagagtcccagaggatccgaatcaatac

SEQ ID NO: 681276 - DNA, 1354 bp, Homo sapiens
  misc_feature (1)..(3): n is a, c, g, or t
  misc_feature (1079)..(1079): n is a, c, g, or t
  misc_feature (1290)..(1290): n is a, c, g, or t
  misc_feature (1344)..(1344): n is a, c, g, or t
nnnaaaggaagaagagtccaccttgcgaccgtatccgctagcgcggcctgggatgcgcttgggctccctgttcgttcccacatgcagggcagcacaaggagaatgggcgtcatgactgatgtccaccggcgcttcctccagttgctgatgacccatggcgtgctagaggaatgggacgtgaagcgcttgcagacgcactgctacaaggtccatgaccgcaatgccaccgtagataagttggaggacttcatcaacaacattaacagtgtcttggagtccttgtatattgagataaagagaggagtcacggaagatgatgggagacccatttatgcgttggtgaatcttgctacaacttcaatttccaaaatggctacggattttgcagagaatgaactggatttgtttagaaaggctctggaactgattattgactcagaaaccggctttgcgtcttccacaaacatattgaacctggttgatcaacttaaaggcaagaagatgaggaagaaggaagcggagcaggtgctgcagaagtttgttcaaaacaagtggctgattgagaaggaaggggagttcaccctgcacggccgggccatcctggagatggagcaatacatccgggagacgtaccccgacgcggtgaagatctgcaatatctgtcacagcctcctcatccagggtcaaagctgcgaaacctgtgggatcaggatgcacttaccctgcgtggccaagtacttccagtcgaatgctgaaccgcgctgcccccactgcaacgactactggccccacgagatcccaaaagtcttcgaccctgagaaggagagggagtctggtgtcttgaaatcgaacaaaaagtccctgcggtccaggcagcattagccatcgtgccctgctgaggggctggctgccttgagtggcctgatcgccacagcccttcttggaagaaaggcgtccgtgtttcaggttccacgcgagtcacctctttcgtcttaatgttcaccgtccacagctttggaataaaccatcctgggaagttgctgcaaaaaaaaaaaaacacaacaaaaaaaaaaaaaatntttgggcggccttggccctgaaaaagttttttaaccctttgcgttgggcgcggggcccccgttggttagtggactgtggccaagagcgtgtcccaggggaaatccgggccaacagacgaaggtgcttggatttcttccccagattatataagagccgcgggggacaacgcatgtgttttctgaacaatctccagagtgaagtcgggagggncaaaagggagcctcattaccaggggtgcccacagaaactagaataaattctcgnggtgtgtggt

SEQ ID NO: 681277 - DNA, 1339 bp, Homo sapiens
  misc_feature (1)..(3): n is a, c, g, or t
  misc_feature (1339)..(1339): n is a, c, g, or t
nnnaaaggaagaagagtccaccttgcgaccgtatccgctagcgcggcctgggatgcgcttgggctccctgttcgttcccacatgcagggcagcacaaggagaatgggcgtcatgactgatgtccaccggcgcttcctccagttgctgatgacccatggcgtgctagaggaatgggacgtgaagcgcttgcagacgcactgctacaaggtccatgaccgcaatgccaccgtagataagttggaggacttcatcaacaacattaacagtgtcttggagtccttgtatattgagataaagagaggagtcacggaagatgatgggagacccatttatgcgttggtgaatcttgctacaacttcaatttccaaaatggctacggattttgcagagaatgaactggatttgtttagaaaggctctggaactgattattgactcagaaaccggctttgcgtcttccacaaacatattgaacctggttgatcaacttaaaggcaagaagatgaggaagaaggaagcggagcaggtgctgcagaagtttgttcaaaacaagtggctgattgagaaggaaggggagttcaccctgcacggccgggccatcctggagatggagcaatacatccgggagacgtaccccgacgcggtgaagatctgcaatatctgtcacagcctcctcatccagggtcaaagctgcgaaacctgtgggatcaggatgcacttaccctgcgtggccaagtacttccagtcgaatgctgaaccgcgctgcccccactgcaacgactactggccccacgagatcccaaaagtcttcgaccctgagaaggagagggagtctggtgtcttgaaatcgaacaaaaagtccctgcggtccaggcagcattagccatcgtgccctgctgaggggctggctgccttgagtggcctgatcgccacagcccttcttggaagaaaggcgtccgtgtttcaggttccacgcgagtcacctctttcgtcttaatgttcaccgtccacagctttggaataaaccatcctgggaagttgctgcaaaaaaaaaaaaacacaacaaaaaaaaacacagtgggtggggaccgcacgcggcgcccccgaaaaaagctttaaagcacactcgttggggcgcggcgaccacagagcggtaacgcaacacggggccacaacggtgtcacaaggaagaccgtgggcccagacaccagtctctggcgtttcccccaaaaaaaagcgccggggggaaccgcggttctgaacaactccagatggcgcccgcgaccgcaacggcgcatcaccgcggcgccacggcgcgaattatacgcgccgcgtggacn

SEQ ID NO: 681278 - DNA, 145 bp, Homo sapiens
ggacagacccctgttgcaagaagcacgaacacaccatcaacttgtaggcggccaaggcccttgttgcctgacgaggcccggagcttcttcttgctgcttgcaacaaaggattcgggaggcttatgttcttcttaggggaattgga

SEQ ID NO: 681279 - DNA, 399 bp, Homo sapiens
  misc_feature (43)..(43): n is a, c, g, or t
  misc_feature (85)..(85): n is a, c, g, or t
  misc_feature (94)..(94): n is a, c, g, or t
  misc_feature (114)..(115): n is a, c, g, or t
  misc_feature (119)..(119): n is a, c, g, or t
  misc_feature (148)..(148): n is a, c, g, or t
cctcggtgtccgagtaccagcagtaccaggacgccacggcganggaagagggcgagatgtacgaagacgacgaggaggagtcagnggcccaggnccaaagtgaagctgctcgcnntggnagtgagaggcaggtggcggccggggcaangccagcagtgtctaaacccccggagccatcttgctgccgacaccctgctttcccctcgccctagggtcccttgccgccctcctgcagtatttatggcctcgtcctccccacctaggccacgtgtgagctgctcctgtctctgtcttattgcaagctccaaggcctgacgttttacggttttgttttttaacctgggttttgtggtttatattttcgggggatacttaataaatctatttgcttgtcaagat

SEQ ID NO: 681280 - DNA, 337 bp, Homo sapiens
ggatagccaatcccaggagctgaaattgtggcaataatcaatagtttaccaaccaaaaagagtccaggaccagatggattcacagccgaattctatcagaggtgcaaggaggaactggtaccattccttctgaaactattccaatcaatagaaaaagagagaatcctccctaactcattttatgatgctggcctcatagaatgagttaggtaagttaggtaggagtccttctctgcagttttttggaataattttattaggagtgataccagctcttatttgtacatctggtagaattcagctgtgaatccacctggtcctgggattgggctatcaa

SEQ ID NO: 681281 - DNA, 1412 bp, Homo sapiens
  misc_feature (1)..(3): n is a, c, g, or t
nnnaaaggaagaagagtccaccttgcgaccgtatccgctagcgcggcctgggatgcgcttgggctccctgttcgttcccacatgcagggcagcacaaggagaatgggcgtcatgactgatgtccaccggcgcttcctccagttgctgatgacccatggcgtgctagaggaatgggacgtgaagcgcttgcagacgcactgctacaaggtccatgaccgcaatgccaccgtagataagttggaggacttcatcaacaacattaacagtgtcttggagtccttgtatattgagataaagagaggagtcacggaagatgatgggagacccatttatgcgttggtgaatcttgctacaacttcaatttccaaaatggctacggattttgcagagaatgaactggatttgtttagaaaggctctggaactgattattgactcagaaaccggctttgcgtcttccacaaacatattgaacctggttgatcaacttaaaggcaagaagatgaggaagaaggaagcggagcaggtgctgcagaagtttgttcaaaacaagtggctgattgagaaggaaggggagttcaccctgcacggccgggccatcctggagatggagcaatacatccgggagacgtaccccgacgcggtgaagatctgcaatatctgtcacagcctcctcatccagggtcaaagctgcgaaacctgtgggatcaggatgcacttaccctgcgtggccaagtacttccagtcgaatgctgaaccgcgctgcccccactgcaacgactactggccccacgagatcccaaaagtcttcgaccctgagaaggagagggagtctggtgtcttgaaatcgaacaaaaagtccctgcggtccaggcagcattagccatcgtgccctgctgaggggctggctgccttgagtggcctgatcgccacagcccttcttggaagaaaggcgtccgtgtttcaggttccacgcgagtcacctctttcgtcttaatgttcaccgtccacagctttggaataaaccatcctgggaagttgctgcaaaaaaaaaaaaacacaacaaaaaaaaaaaaaaaaaaacacaaaacaaccacaaacctacacaacacacacacacacacgaagacaaaaaatatctgtggcgggacgccacggtccgccaagaagagagttttcacaaaccaacgacgtgagcgggagccggcgcacacgtagacgattgaacaatcaacctacgaaaaactggttgcccaaagcacatagaaccggctgacacaacaagggggtggtggggctccccacaaaaaaaaaagaacggcgggggacaccgacggtctgttcgaacacccacaaggatgcgtcgcgacctacgggacctacacaacgaggccaccaacggggcggtctaac

SEQ ID NO: 681282 - DNA, 211 bp, Homo sapiens
cacgaaccccaaagtataagaacactcaacagatgccactgaagaacaacgatcatcatacgctagaagctcgtgacacaaacattaacccgtgcctaactggcgaagcagtacactctcggcacttccccctctctaacaacacaactacatcctcccttcttgactgacccacaaagctctggcacaaactcaacgctcacgaggcttc

SEQ ID NO: 681283 - DNA, 218 bp, Homo sapiens
aacacaactttgagagggacagaactgaattcactaacattgaagaacagtaaaggcctatcatctttggatccttcagtatctcagcagttatgagcagaactatgcatctacccatggctctatctttacatcaattaggagtcctggctgttctatttgtaatacccattttgaattgtgttagcttatcttctctattgctaccatcctagtcc

SEQ ID NO: 681284 - DNA, 956 bp, Homo sapiens
  misc_feature (956)..(956): n is a, c, g, or t
gaccggaagtagagtcacggagaggtaggatccggaagtggggctgcctctttaaataacaaaaatctgaggtatacgaagtggagagacaaataagcagaatccacctggtgctgaacccagtataactcatttctacaagtatcttggggagaaaacactggaatcgggtttggtataacacttactgatggtcattcaagcatgactgggacagtttctgaatcagagatttcccaagaagctgatgacatggcagtggaaaaaccgggaacatatgtgggtcgacactgagaaaagcatggttgtcaggagcaggaccagcggatgtatacacggtataattcctctaaagagtcttgtcattgacctttctggaggacaaacacgtgaagggagtgtctcatttcagaagtgtggttccttcaacctagagaaagtttgaaaacccagctgaaaagtcattcagagacactgatgggttatgggttgggcacaccatggcagatcaatcaggccaaacactgaggcacctgcagaaagacaacactgaagggcttctgagacgatgggcatggttgtcagggacgcatttcgaacaaatgttgtgagtgctaaggaagctggcgaagaggtctcatagcgcggataacctgcggtgaatgacacgcacccacacttcccactttgcctatcactcttaatcggttcagaaccagcaaggcctcaacagaagggacctgcatctcgcgaagtagtgacgcgaccacgccagtgacaccgtggtcgaacgtgaacacatgctcctagggggctagccgggacaacgacacctatacactgagcccgatcccatcaaccacaccatcagaccgtggaacacgcgcggagccaacaaacgacatcaggacaaactcaaaaacgaacataacgtaatattagttattataaatagn

SEQ ID NO: 681285 - DNA, 1463 bp, Homo sapiens
  misc_feature (1188)..(1188): n is a, c, g, or t
  misc_feature (1399)..(1399): n is a, c, g, or t
  misc_feature (1453)..(1453): n is a, c, g, or t
gtctgtggaactcggggactggggtcttggggtttcccccttcttgatggggaaactgaggcccagacagggccgcagaaaacagcggactgggatgtcctcccgcaacacacacgcagacatctaaaaatcttactatttagtgaaaaatatttttaatcgtaattacgatttaacagttcgttcccacatgcagggcagcacaaggagaatgggcgtcatgactgatgtccaccggcgcttcctccagttgctgatgacccatggcgtgctagaggaatgggacgtgaagcgcttgcagacgcactgctacaaggtccatgaccgcaatgccaccgtagataagttggaggacttcatcaacaacattaacagtgtcttggagtccttgtatattgagataaagagaggagtcacggaagatgatgggagacccatttatgcgttggtgaatcttgctacaacttcaatttccaaaatggctacggattttgcagagaatgaactggatttgtttagaaaggctctggaactgattattgactcagaaaccggctttgcgtcttccacaaacatattgaacctggttgatcaacttaaaggcaagaagatgaggaagaaggaagcggagcaggtgctgcagaagtttgttcaaaacaagtggctgattgagaaggaaggggagttcaccctgcacggccgggccatcctggagatggagcaatacatccgggagacgtaccccgacgcggtgaagatctgcaatatctgtcacagcctcctcatccagggtcaaagctgcgaaacctgtgggatcaggatgcacttaccctgcgtggccaagtacttccagtcgaatgctgaaccgcgctgcccccactgcaacgactactggccccacgagatcccaaaagtcttcgaccctgagaaggagagggagtctggtgtcttgaaatcgaacaaaaagtccctgcggtccaggcagcattagccatcgtgccctgctgaggggctggctgccttgagtggcctgatcgccacagcccttcttggaagaaaggcgtccgtgtttcaggttccacgcgagtcacctctttcgtcttaatgttcaccgtccacagctttggaataaaccatcctgggaagttgctgcaaaaaaaaaaaaacacaacaaaaaaaaaaaaaatntttgggcggccttggccctgaaaaagttttttaaccctttgcgttgggcgcggggcccccgttggttagtggactgtggccaagagcgtgtcccaggggaaatccgggccaacagacgaaggtgcttggatttcttccccagattatataagagccgcgggggacaacgcatgtgttttctgaacaatctccagagtgaagtcgggagggncaaaagggagcctcattaccaggggtgcccacagaaactagaataaattctcgnggtgtgtggt

SEQ ID NO: 681286 - DNA, 117 bp, Homo sapiens
ttgaaaagtatgttggggagaattctctgcgtgaggggaaaacattcagcaggagctgatcgcattataaaaagctgattgtagccccacagcatattcctgatagttgtttctttg

SEQ ID NO: 681287 - DNA, 1053 bp, Homo sapiens
  misc_feature (1)..(3): n is a, c, g, or t
nnnaaaggaagaagagtccaccttgcgaccgtatccgctagcgcggcctgggatgcgcttgggctccctgttcgttcccacatgcagggcagcacaaggagaatgggcgtcatgactgatgtccaccggcgcttcctccagttgctgatgacccatggcgtgctagaggaatgggacgtgaagcgcttgcagacgcactgctacaaggtccatgaccgcaatgccaccgtagataagttggaggacttcatcaacaacattaacagtgtcttggagtccttgtatattgagataaagagaggagtcacggaagatgatgggagacccatttatgcgttggtgaatcttgctacaacttcaatttccaaaatggctacggattttgcagagaatgaactggatttgtttagaaaggctctggaactgattattgactcagaaaccggctttgcgtcttccacaaacatattgaacctggttgatcaacttaaaggcaagaagatgaggaagaaggaagcggagcaggtgctgcagaagtttgttcaaaacaagtggctgattgagaaggaaggggagttcaccctgcacggccgggccatcctggagatggagcaatacatccgggagacgtaccccgacgcggtgaagatctgcaatatctgtcacagcctcctcatccagggtcaaagctgcgaaacctgtgggatcaggatgcacttaccctgcgtggccaagtacttccagtcgaatgctgaaccgcgctgcccccactgcaacgactactggccccacgagatcccaaaagtcttcgaccctgagaaggagagggagtctggtgtcttgaaatcgaacaaaaagtccctgcggtccaggcagcattagccatcgtgccctgctgaggggctggctgccttgagtggcctgatcgccacagcccttcttggaagaaaggcgtccgtgtttcaggttccacgcgagtcacctctttcgtcttaatgttcaccgtccacagctttcgtggaataaccatcactgaagacagtcatggagacc

SEQ ID NO: 681288 - DNA, 1577 bp, Homo sapiens
  misc_feature (1)..(3): n is a, c, g, or t
  misc_feature (1302)..(1302): n is a, c, g, or t
  misc_feature (1513)..(1513): n is a, c, g, or t
  misc_feature (1567)..(1567): n is a, c, g, or t
nnnaaaggaagaagagtccaccttgcgaccgtatccgctagcgcggcctgggatgcgcttgggctccctgttcgttcccacatgcagggcagcacaaggagaatgggcgtcatgactgatgtccaccggcgcttcctccagttgctgatgacccatggcgtgctagaggaatgggacgtgaagcgcttgcagacgcactgctacaaggtccatgaccgtatgtccttcatctctctgacctctgagaaagagaagcagcgatcctttctggctcgcctctgcattggttgctgagggtctgctgagagcccagggtctgctctcttgggccagctccactcctgcacccccgtctcatccagggcctgccctgccctgtcctcagtgctgtgctagcaggaccgcccgtccaccctgtctgtcgggagggctgtcagagggcaatgccaccgtagataagttggaggacttcatcaacaacattaacagtgtcttggagtccttgtatattgagataaagagaggagtcacggaagatgatgggagacccatttatgcgttggtgaatcttgctacaacttcaatttccaaaatggctacggattttgcagagaatgaactggatttgtttagaaaggctctggaactgattattgactcagaaaccggctttgcgtcttccacaaacatattgaacctggttgatcaacttaaaggcaagaagatgaggaagaaggaagcggagcaggtgctgcagaagtttgttcaaaacaagtggctgattgagaaggaaggggagttcaccctgcacggccgggccatcctggagatggagcaatacatccgggagacgtaccccgacgcggtgaagatctgcaatatctgtcacagcctcctcatccagggtcaaagctgcgaaacctgtgggatcaggatgcacttaccctgcgtggccaagtacttccagtcgaatgctgaaccgcgctgcccccactgcaacgactactggccccacgagatcccaaaagtcttcgaccctgagaaggagagggagtctggtgtcttgaaatcgaacaaaaagtccctgcggtccaggcagcattagccatcgtgccctgctgaggggctggctgccttgagtggcctgatcgccacagcccttcttggaagaaaggcgtccgtgtttcaggttccacgcgagtcacctctttcgtcttaatgttcaccgtccacagctttggaataaaccatcctgggaagttgctgcaaaaaaaaaaaaacacaacaaaaaaaaaaaaaatntttgggcggccttggccctgaaaaagttttttaaccctttgcgttgggcgcggggcccccgttggttagtggactgtggccaagagcgtgtcccaggggaaatccgggccaacagacgaaggtgcttggatttcttccccagattatataagagccgcgggggacaacgcatgtgttttctgaacaatctccagagtgaagtcgggagggncaaaagggagcctcattaccaggggtgcccacagaaactagaataaattctcgnggtgtgtggt

SEQ ID NO: 681289 - DNA, 1300 bp, Homo sapiens
  misc_feature (1)..(3): n is a, c, g, or t
  misc_feature (1025)..(1025): n is a, c, g, or t
  misc_feature (1236)..(1236): n is a, c, g, or t
  misc_feature (1290)..(1290): n is a, c, g, or t
nnnaaaggaagaagagtccaccttgcgaccgtatccgctagcgcggcctgggatgcgcttgggctccctgttcgttcccacatgcagggcagcacaaggagaatgggcgtcatgactgatgtccaccggcgcttcctccagttgctgatgacccatggcgtgctagaggaatgggacgtgaagcgcttgcagacgcactgctacaaggtccatgaccgcaatgccaccgtagataagttggaggacttcatcaacaacattaacagtgtcttggagtccttgtatattgagataaagagaggagtcacggaagatgatgggagacccatttatgcgttggtgaatcttgctacaacttcaatttccgaactgattattgactcagaaaccggctttgcgtcttccacaaacatattgaacctggttgatcaacttaaaggcaagaagatgaggaagaaggaagcggagcaggtgctgcagaagtttgttcaaaacaagtggctgattgagaaggaaggggagttcaccctgcacggccgggccatcctggagatggagcaatacatccgggagacgtaccccgacgcggtgaagatctgcaatatctgtcacagcctcctcatccagggtcaaagctgcgaaacctgtgggatcaggatgcacttaccctgcgtggccaagtacttccagtcgaatgctgaaccgcgctgcccccactgcaacgactactggccccacgagatcccaaaagtcttcgaccctgagaaggagagggagtctggtgtcttgaaatcgaacaaaaagtccctgcggtccaggcagcattagccatcgtgccctgctgaggggctggctgccttgagtggcctgatcgccacagcccttcttggaagaaaggcgtccgtgtttcaggttccacgcgagtcacctctttcgtcttaatgttcaccgtccacagctttggaataaaccatcctgggaagttgctgcaaaaaaaaaaaaacacaacaaaaaaaaaaaaaatntttgggcggccttggccctgaaaaagttttttaaccctttgcgttgggcgcggggcccccgttggttagtggactgtggccaagagcgtgtcccaggggaaatccgggccaacagacgaaggtgcttggatttcttccccagattatataagagccgcgggggacaacgcatgtgttttctgaacaatctccagagtgaagtcgggagggncaaaagggagcctcattaccaggggtgcccacagaaactagaataaattctcgnggtgtgtggt

SEQ ID NO: 681290 - DNA, 214 bp, Homo sapiens
aaaggagagcaagatgagacaagacagaagacaaggcagtccaaccgatggaaatgaatcaaggaatatctcacatatggaaagctcacacggcgagcaacagggtcacattactcatacatcagccagcagaaaaaatttcgagagcttatcctacacagcaatccacactcaaggaaattctgtggacccggagacccccccgatacagcga

SEQ ID NO: 681291 - DNA, 412 bp, Homo sapiens
tgactctgaggatcgctaaagtgacgcgataggctggataagaaaatgtggtacatatatgccatggaatactatgcagccataaaaagaaatgagatcacgtcctttgcagggacatggatgaagctggaagccgttatcctcagcaaagtaacgcaggaacaaaagtaaataccacatgttctcacttgcaagtgggagatgaacaatgagaacacgtggactgttgagggggcagggggagggaaagcatcaggataaatagctaatgcatgcggggcttaatacccaggtaatgggttgataggtgcagcaaaccaacatggcacaggcttacctatgtaacaaacctgcaggtcctgaccattgtatcgcgtcagatagggggtaccgaaactcgaaatacgaaatc

SEQ ID NO: 681292 - DNA, 129 bp, Homo sapiens
tctcctcctcgatcagaaagacaaatttagtccctttctagtacaggataggctgagtcttcactggtattcaaagacacacttagtaacccgcccagagaaaagaaatggtgccggggtccatctcca

SEQ ID NO: 681293 - DNA, 306 bp, Homo sapiens
  misc_feature (159)..(159): n is a, c, g, or t
tcaggagtggttgaggacacagggccccagcccagccttttgcaccccccagcccggccatttgggccccaagccccctttggaggtttttttttggcctccactccctccccaaaggttttggcacagaacttcattttgaaagggtttttttcattntccaaacctcccccagctttcctccagcccttcccaggggtcagccctgctgtcctgagggtttcctgggccaaaaaaaggagatgggggtgggagggactgagttgatgttgggtttttcattcaataaattggtgattttttcca

SEQ ID NO: 681294 - DNA, 258 bp, Homo sapiens
gatacggcggaaatggcaaacgaactagaattagaagtagtgcctgggccgggcacagtggctcacgcttgtaatcccaacacttcgggaagtggaggcgggtggatcacctgaggtcccgagttcgagaccagcctgcccaacatggtgaaaccctatctctactaaaaatacaaaaaattagctgcgcatggtgggagatgcctgtaatcccagctactcgggagggtgagccaggagaatcacttgaacctggga

SEQ ID NO: 681295 - DNA, 169 bp, Homo sapiens
gcattatgtcagatcctctatagagtgcaaaaagctctcatgtttcccccatcatacatatgcgaagaccattcttgtatgttgagaatatactttaaaattacatcaacaagtggcctttattagaggatccacaattgttccacggatatggccctcctggtttcaa

SEQ ID NO: 681296 - DNA, 693 bp, Homo sapiens
  misc_feature (9)..(9): n is a, c, g, or t
ccacgcgtncgtgcctgtgacgcgcggggcgtgtcggtcctgcctgtaacggcggcggcggctgctgttccagacacctgcggcggcggggcgaccccgggggggcgcggagatgtggccctgtgtagcggcgctgttgctgggctcggcggtgctgcggatcagctcagctactatttaataaacacaaaatcgtgtagaattcacgttttgtaatgacactgtcgtcattccatgctttgttactaatatggaggcacaaaacactactgaagtatacgtaaagtgccaaatttaaaggaagagatatttacaccctttgatggagctctaaacaagtccactgtccccatgacttaagtagtgcaaaaattgcaagtctcacaattactaaaaggagatgcctctttgaagatggactaagagtgatgctgtctcacacacaggaaactacaccttgtgaagtaacagaatttaacccagagaaggtgaaaccgatcatcgagctaaaaatatcggtgtgtttcatgggttttcctccaaaatgaaaatattcttaattgttattttcccaatttttggctataactcctgttcttggggaccacttgggtaattagaaccacttaaataatagatccggtggtatggatgagaaaacaattgctttaacttgttgctggacctagtgat

SEQ ID NO: 681297 - DNA, 209 bp, Homo sapiens
atttgcgaccgcgtcgacgggaaccttgcgctttgcctctcgccgggtatcacccggctgccgatgatcgggatcatcgacgtcggcaaggggagtgctggtttgatatctctgctacgcaacgctcttcccgaggaaaagcggcatttggcgatgagcttgcgtctgcgtatgacgccggagttcgccatcaaccctttggtcgacgc

SEQ ID NO: 681298 - DNA, 188 bp, Homo sapiens
ctagaggatcccccgctccactcggaaatcactcccaggaattggaggcttcagtgctgcagtagggaggggactaaaaacaaagtctgtatattgtgcagtaagacctccgggttctcatcccccatcctgtgtgctctcgtggtgactagcccgtctcctctctccagtgtttacgctgggtacct

SEQ ID NO: 681299 - DNA, 137 bp, Homo sapiens
tacagttatggctgggtcatgacattgtgacccacacatgtgcagctccagttacacagagactgggtctggcacatggagacacgtggaggatggtgcagttcaatgcatgatttcagtggatcaagtaaaaggtt

SEQ ID NO: 681300 - DNA, 394 bp, Homo sapiens
atgaacgtagtccgaggatatacaatctggagttatgcaagagagatcagggctgcagatataaatctggagagatacaacacgcatgtaggtagtatataacgtcacaagacagaatgatatcacagagggagtgattatgaatagaagtgagaagctgtctaggactctgacattaagaagttggaaatatgacgaacccgcacaaggaacactggagccagctagggaaataggaaaaacgaaaaacagggatactgtcctggaagacaaaggaaggatctgctataggaccactactgctaaaaggtcagtgagagctgacaattgaccttggcatatagctcataggacggtcactggatgtctaacgggagaatctacatagggaggg

SEQ ID NO: 681301 - DNA, 245 bp, Homo sapiens
tactcctcatactgcaggttggtgatagtgaagttgagggtgaatggcaccaggagagggccaggggctgtgtggccagggagggaggctggagtcccagaggtttccaggtgcactgcagaggtcccaggaatactggtggttggcacagagctccgatgggtgaagccattgacatagagactgtccctgtccagggtgtaggggcccagctctgtaacgctgttggtcagctggctcaggtt

SEQ ID NO: 681302 - DNA, 1537 bp, Homo sapiens
  misc_feature (523)..(523): n is a, c, g, or t
ggtaaagtcgctggagactaaaaaggcttcggaactccaggaactcagacatccatgagctagcgaccattgcaccaccctggaattgaatttcttctacttgcatatagcgtcttataatttacatctcttgtcaagcatgtgtacgcatgatgtagcctaccagagacaacctcgtctgtactcttagatgaagggattcaggtatttattgtaccgaacatgacctgtggggctattatgcaagcatttccttaggtcattacttttcacttcaaacacaaaaagtatgactacatggcagcgtaacaacgtgcatctctgtgacacgcaaatcgttaacaatctacagtttgatacaatccaattataccattcaatgcaatggtcatagacctagcttggcaataaaaagcaattacgcgaaattacgaacttacatttatccccttgtactggaagattcactccgaaagagattttcaaacttaatggaataaggcacccgctcctcgtgctaaanctttctcggaaggcttgccctagtgctatcaatatcgtctatagcaaaccgaaatttctatagacacccactccattgtactaagcacatacgaaatatttatcacaaacaattacttgcaactcactaacgattattagacagcgataaatatgtggctcaggcgtaacatttcaatattcatactttccaaaatacgttattaattccacaatacggaatttagtgtatgagacccacgttgtagcaacgtggattgagacacgtggttaagacccccaaagatctctggaaaaggtcaaccgacggataggcacctcgtgtaaagcgccttgtagggctacacattgcaacaatctggagttcgccaaaaatacgccgagtttggagattaattccactcttggggggaaacaccggaaatctcgggtcaaaagaaccattttggagccaatttaaaaaggggtgtatggtgtaaagattaaagaaaggtaggggggaaattaattttattttcacgtttaaaaataacctctatgcggaaagttttaagttaacaatgacaatattaagctttaaagatctatacctggttgaaccatccggactcgggtgattcttggggagaatactgcggaaaggggcgggatggtggtaatgcccgtaaacgagattgacctttggaatagggccccttgttggagtttgtccatttttccaaggcacaataacatatctggcacttataggaaagttcactggaacgccggcgtcttgtgggacgagtcgttgtgtctggccctcaacagtggcgcgacccactggataacgtcttgcgactgtgtgcgaacaatcgtaggcaaagcaatttccctctttggaattaacgccccccgaaagtattggtgccgaccacaaaaaacgcgtgtctttaagacgtcggtcactctgtgcaagcaacatcggccgcagagtgttagatcaccagcctctgtggtgcacgaactaagtacc

SEQ ID NO: 681303 - DNA, 585 bp, Homo sapiens
  misc_feature (536)..(536): n is a, c, g, or t
cacttgcgagcataaaacaaaagtactctcaaaggtgctaatagcaaactcaatagcaacatctattggtaagggcatggaatgaccaagctcactctttgtctactaaccgcatgacttttatatgtagggatagcaaagggcatactatgtctgtgggcagatgattttttaaataacaatgtttctttgaactaatattaaattaacaagatcagtgtagtccaaatgtgtgaagaacaatcaatatactttatcatggtttctatttgaaaaaacaaatcttgctatgctttaaattttggagctttcataattgtttaatgcattttaagtgtgaggcttataaatattatgggcttcttctatactacgtgatttctgagtttaaatgtcatacacaaatactaagacactttgcatttttaaaaattaagaatcatttgtgaagtccactacgaggtacttcaaaagcccagtaatggtggtcagataccatgtagatggatacagatcgttgactcttttgaagttgnttttttcttatattttatattaccattaaccaataaaatctggcagaaa

SEQ ID NO: 681304 - DNA, 395 bp, Homo sapiens
  misc_feature (251)..(251): n is a, c, g, or t
  misc_feature (254)..(254): n is a, c, g, or t
  misc_feature (361)..(361): n is a, c, g, or t
attctagaggcagaggcgggcggatcacgaggtcaggagatcgagaccacggtgaaaccctgtctctactaaaaatacaaaaaattagccgggcgtggtggcgggcgcctgtagtcccagttacttggagaggctgaggcaggagaacggcgtgaactccggaggcggagcttgcagtgagccgagatcgcgccactgcactccagcctgggtgacagagactctgtctcaaaaaaaaaaaaaaaaaaaanganctttcattactaatggaggaggagaatgtaaatttgtcagtttatttctgactagggatattttctttccttttagaaaagaagaaaaaaaaaaaaccttactgtcntacagagcggtactagcgtcgtgctgtataaaat

SEQ ID NO: 681305 - DNA, 384 bp, Homo sapiens
aacctggaggctcctgacgcctttgactccagggtgggcgattccgatgctgacccgtcctcctgggctccccccccccgctccccaagtgtcacacaggccctttggacccatcctggttttttaagaaggggacttgccctcaagattcctgttccagggccccggccgtttcggggagaacccacttgggccccgggggcagccggagacccccccgagcccctcctcccagtatttccatccccgcatggttttagggggggcctcttttccgtttttgaggaatttttgttttggggcttgtccttcctttgcagctgttttgaatggaggtttccctttttatttatttgccccttaaagtttataattgaatattga

SEQ ID NO: 681306 - DNA, 81 bp, Homo sapiens
cggggtaagattgtcgaccacgcgctcgctcacctaggtccccattacatttgtacccgtaagcgctacgcgcacctgagc

SEQ ID NO: 681307 - DNA, 930 bp, Homo sapiens
  misc_feature (285)..(285): n is a, c, g, or t
ggaggctgaggcaggagaatcacttgaacttgggaggcagaggttgcagtgagccaagatcacaccactgcactccagcctgggcaacagagtgagactctgtcaaaaaaaaaaaagggggggtttgaattgggtgtccccttaaaactatattttcacacaaaaggattgattacattaggaagcagagtgttaaaaaaacggacaaaattatacgcaaaattagcataaaggtccaggcatatataagggaaggttatatttcagtggtgattttgtccccantcttatttcaaaaggtgtaggagatggttaagcctgacttaaaagcggcaaaaacacaggctctatgctggaccgggtccaataatggggccataccccttagatttaaaggacacaactaggttgaaagggtaaagggtgagatcattgcaatatagggagaggcgggagtacctaatatttaatgtcagacagttttaacggcaaagaacttattactagagagagggacattacttgtattgtgaccaaagaggcgcaattacttgagaaaacagattactttttaaagatattctaacaggagaccccaaaaaatacaggaaggcaaaagttgacaggaatttacacggagagtgcctattcaccaagtagtactgggagaatttcactttcccactttcaatattcaatcggattattcgcatattggaggacattgcaggatattaaagacttcatccggcaatagggagttgacgcactccctttggaccgttttgcaaactccgggcgtaatcgcgtctcacactgtctccatttggacaccattgtttatagccggacgatccgcgttcacattatgcgcaggcgcgtatacacctggcacggcgactcccagaccggcgagcaccacaaacgggg

SEQ ID NO: 681308 - DNA, 295 bp, Homo sapiens
caggctatttgcggtgctttccttgccaaggccgtatctctgtgtttgcaacaaaagtccaaatgggacacaggttccttccgccacacaagactgcaatcaaatgtggcttgtggcctaatgtggtccacggattcatgcgttttttttttttttttctttttttgaaacggagttccactctcatcgcccaggctcgattgcagtgccgtgatctcagcacactgaaacctccgccttccgatttcaaaagattctcatcgtttagcctcccgagtagctggaataacaggtg

SEQ ID NO: 681309 - DNA, 396 bp, Homo sapiens
ccggggggccccccccatttatttgggtttgcccccccctttgggccccccggcttttccctttttgcttccggctcgttttttgggggggattgggggggggaaaccattttcccccgggaacccgttttgcctggtttcggattttttacccccccccttaggggatttggccccccgggcccaaaatttggcccaaggggggtgggggggggggccccccccctttccccccttttttttggttttcaccccttggggtcccccccccccatttttttttgtttacccccggggttttttttaggtgggcccctttttttttggttttgttttcccccctccccccccccttcccttttttaaaattttaaaatttttttccgggttttttta

SEQ ID NO: 681310 - DNA, 153 bp, Homo sapiens
aaccctacacatggatagaggtacgtcaaagggagacaggagccagtggccaaagctgaaaactttcagcaacaaaataaataaataattttttggtatttttgtcttatttagggccacacctacagcatatggaggttcccaggctagggg

SEQ ID NO: 681311 - DNA, 104 bp, Homo sapiens
aggatctgagcagcgtggactaatacctgtctacagataccagcctgtagatccccgtggatgtagacattgccccactgtaaggctgtggctcaccaggcaag

SEQ ID NO: 681312 - DNA, 691 bp, Homo sapiens
  misc_feature (1)..(1): n is a, c, g, or t
ngcacaagaaaatttgtcattggggaaaggccaacttggtggccaccttccccagttcaaaggtttcctcgcaaggccactatgacccgtgccagaatccacagaggaaagtcttgttccattgctttctggcgctcaccccccacccaatgcacagtcaagccttttgttcttctaagcactttcccaccaatgtgtggtaagcagttgtgtcagttggttcccattaagcccttgggttgggaagggccaagcatggggagtcaaggttgaaaccaaaagcctggttgtgattagatggattgcagcatgcttgatttttttcattgaactggtcattccgcaagaggggtgttagaactgacctggcttcttggcaagtgttcagctgagactacttattggccctgagcacagcccaaacacctgcttagtcctgaaaccctgacctgagttgtggagatggaggagacctggaggaaatactcattccattggagaggccttgtctcttctgccttggaagctgccccagttagatgaggagacagaattacgtactcaagagagtaatttgcaagaagcacagctgtgatttcattttccaggcatccttagcctatgtctctagacagtggtcccctcaagggcagtactgagttaatactcttttaccttgcctaacatggca

SEQ ID NO: 681313 - DNA, 203 bp, Homo sapiens
  misc_feature (21)..(21): n is a, c, g, or t
  misc_feature (33)..(33): n is a, c, g, or t
  misc_feature (69)..(69): n is a, c, g, or t
  misc_feature (139)..(139): n is a, c, g, or t
  misc_feature (179)..(179): n is a, c, g, or t
caaagtgtaactaccggtggnatggttcaaagnaaaagatgaggagaaggattaggggcccagattcantaggggtgaatccagagagcagtgtggaaaaaaaaaaccaaaaacccactggaccagtgtataaccactntaagagtctctattaaaattactgattcagaaagaccgtngtgtgaaattcttctttcctgtag

SEQ ID NO: 681314 - DNA, 433 bp, Homo sapiens
aggagatctgatcacacttcctcctgaggcacctctcatggatgttgcaataagcattcgggtactatcacccagaaatatgaattgccagaatagaacatttagcatgttaagcgttgatgcatataaaatcagaaatagatgtgagaatggtggaactttttaaaagaacccagtcaaatgtatttgctgctgaaatctgcatatttgggaggcatttcccaccaccgattcacagcccatttgatagtgtgggtagttaggggacttcgtgggagtgggtgttcagacgtccccggggggctttaaatctcttccatatttaggtccattcatttgttaactatggggctttatttggcagggctttcttaaaggggcgttttaactgtgtggagtgggaccaggtgtttcactttttttaaatccaaaa

SEQ ID NO: 681315 - DNA, 169 bp, Homo sapiens
tgggaaggacatcatttaaactctctaggcctccatttccttatatgtacagtggggatgctaatgattctacctatctcatagaattgtgtgagaactaaatccatgaaaaccagtggcacactatttggcaggaacccttaatagctattatattacaacccaacaa

SEQ ID NO: 681316 - DNA, 305 bp, Homo sapiens
tttttttttttccccccctccgggggaaaaacccgggcaaaatttcccttaagggggttagggggcccttttccccaatttccttttgggggggcccttttatttgggggggggggaaaaaaaaggcacccccaaaaaccgcccggggggtttagttttgggttttttaacccggggaaaaaagggccccccccctttggttagggaaaaccctttttttttaggcccccccccccccctttttttaggggtaaatttggggggggggggggcccccttaagaaaaaggggggggggggggcccc

SEQ ID NO: 681317 - DNA, 143 bp, Homo sapiens
  misc_feature (127)..(127): n is a, c, g, or t
ctaaaagtctggaaaacttattgagggaataattgaggaaaacttccctggccttgctagagatctagacatccaaatacaaaaagctcaaagaacacctggaaaactcattgcataaaagagggtnaccgagctcgaaattc

SEQ ID NO: 681318 - DNA, 223 bp, Homo sapiens
taaagtgcggagtttaaaaccggttggttttaaaacaaatctataaaactccttcattgtcagcaaaccaaaaagtccctgcctcaatgaaagttcaaaaaccccctgttacttaaacacgattccgcaaccgttctggttaattttttttggtcattggttacccgaaatggcgtagaaattggttttccggaaggtaaaataaaccaggtatctacttttt

SEQ ID NO: 681319 - DNA, 425 bp, Homo sapiens
gaagaagagaaagaagaaaagttggaagatagtagagggtggtttatgaggtttagggaaagaagccttctccataacataaaagtccaagatgaaacagcaagtgctgatgtagaagctgcaataagttatcaagaaaatctaaaataattgataaacatggttacactaaacaacacatttcaatatagacaaaaaagccttctgttgaaagaagatgtcatctaggactttcgtagctaaagagaatctatgcctggcttcaaaggttcaaaactaggctaattcttttattagggctaatgcagctggtgactttaagctaaagccaatgctcaccatttaagaaaatcctaaggaccttagaatgctaaatctactctgcttgtgttttattggaataatgaagtctgggccagcattct

SEQ ID NO: 681320 - DNA, 125 bp, Homo sapiens
  misc_feature (61)..(61): n is a, c, g, or t
acacaagctacctggttttcacgacaagcacaaataacagagaatgagccagatcacatangaaaaaggctgctataaaaaaaatgcgcgacaggagtaaaagatgctggcgactccacatctca

SEQ ID NO: 681321 - DNA, 119 bp, Homo sapiens
tagaagtagatcatatgtgtggcgattttgttaaatattgtggatgtcttttttctttaactggtcctttgtcgtctcaaaaaagatataaccagccatttgtatggctgaacacaaca

SEQ ID NO: 681322 - DNA, 915 bp, Homo sapiens
  misc_feature (1)..(1): n is a, c, g, or t
ntttcctcatagccacgtatgcttacatattgcgaacgatctcgcgtctttcatccctgctatattgggtcaccccgttcactactttccccgccttttccccaatgtacccctttcccgttactccctctcagccacccttgggaagactctctccacaaaaaaaggggttaataccacccccccagtcctaacagtccctcccttataattacgggtacacaaatttccgtacattaaaagtaaatatttcacacaccacgccgcggaccgcccctgtccacccacaggtcgtgccatttcttgcgcccgacaacactttccacaattaggcgacacttggtgcaccaacctgctgccagaatgggtgggccccacgctttcgtgtaacccagctgggcgcgagacattggtcgtcttactttataaagaggtgttcgccgagaacatgttgccgcccccaccatttgggggtgggaaagcccaccccctgttccggggagaaggagtgacctatatattcacaatgctccccaaactttgtggaggaaatttacaaaggggcgtctccaataatggaggcccaactattgtaggtcactcttcttgtgaaaatagtataccctgcagacacatttcttgcgggcctgcaaaatctttatacacattatagtcccgcgttttgttacaacaaaattctttgctatatatgggatctgttgatatataacatattggatctttgtaaaaatttctttaacgccccaccgccccggactaaccccccctgtcttcttcccattttggtttaaaaccccaatctacttctctggctagcgaccactatatgccacaaagacccccggatccattctcaaccaaaaataaaaaatttcttctccccccaacaaaaca

SEQ ID NO: 681323 - DNA, 224 bp, Homo sapiens
ataacggtaagatacgtgctgtaacggcgtgccacttggctctgggtggccacgatgagaactgtggcatctgcaggatggcatttaacggatgctgcccttactgcaggtgcccaggcgacgattgcccgctggtgtggggcctcactccttgaacttccattcctggcggcacatggtgcagtgttgctgaacctgctgtgcgttgcagccactttgaggat

SEQ ID NO: 681324 - DNA, 896 bp, Homo sapiens
cgatgtgcggagtcacatcttatccgggtgtccgtctgatgataaagatcccgtctgctattactcgtactaaacacattaatagtgatagttcacgagtgccagcgctagcatgactcgaggcgtctctaataccaattagtcacaaccggcaatcgactcataccaatgtgtgacaatgtgctgaaaatctggttcgcactaatactatggtgagagatcgtggtgctcggtacgtgatcagggaagaccatactggaaggtactccggttgcagtagggtgaaagacaacacagtgaagcatcgcatgcagtgtccactcgggatgtcatatcgcaatcgaaggagtatctttgagggcttctaggtgaccttgcggaccactgtgtgtgactgactcctagggccctagaatgcttggctatcttaggcaatgggagtgatgcctgcaccatcatgcatgcattatcattatgtcggaactggagggtggattacaaactaaaatctttagcttgtggctcattccataactccttagttggatcatgttgcccaagaatcaaatacacttttccatttaattgaatccagggaccggcatggttccacacggaggtaccagaatattcagcactataagaaaattagttcacactgttgtgcccttaatgggtcggggagcatgtggtgggctaagcgtgcattggtgagcaacagtcctcgctttgcaacggttaattggaggactcctgtctgatgaacatctttggacgtaggttaaagagcttgaccgtagccataaaaagaatgtggaccaagataagtataggcccgcgacaatccttcctatccggaactaatccctgacagggactcctggggggccacctcc

SEQ ID NO: 681325 - DNA, 317 bp, Homo sapiens
aggttatgtagactcaatcctaactatatgaataatcacatgaaatgtaaatagtctgaatatcctaagttaaaaaacagagattgggctggcttagtggctcacgcctgtaatcccagcactttgggaggcagagatgatatttttatttttgctttttttcagctcttaactccaatggatgcatatttttgtcaagacccaaatcataacttctaaagagatgaaaatataatcactaagggtgaacaaaacagtggcatgagatgacactggcaaattagaccttgcagaaggcaaagatcagtgaacttgaa

SEQ ID NO: 681326 - DNA, 125 bp, Homo sapiens
aggagataggccaagtctagttcattctagggacatgaaaatgggagttctcgtcgtgtgtgtcatgttgccctgagttcccagtttatgttatgtcgttcgaggtcaaaatgacggtgtccggg

SEQ ID NO: 681327 - DNA, 461 bp, Homo sapiens
ggggggaagacgaaactgaaactttttcaggccagcgccggcacagtggccgacggcggctatagctaacgagtacaagagactaagacgaaacagcctaacaacgcgaacaactgaaagagccaagactacgcacaagcccgaagacgccgactgcacgagaacaatgacaacatgacagagcggcagcagcgggcagacgagaacactgaagccgccaagcgcagtgcgacacgcgattacaacccgctagccgttcacatgaggcactgcagcagaggacaccacgctagcgccagctaccgaacagcacaacagaccaagaactgcaagaaactcctacaccatagaacgacagtgagcgtacgcgctcaaggagcggataagcccctgtcaatgtgcccactccaatgacgacgggagacgaacaccacaacgccagcgacagcctcagccccacc

SEQ ID NO: 681328 - DNA, 522 bp, Homo sapiens
ctcacagcctctcctttacatgccacgttctctaaggagcttttttttttcaaaagaaaccacccattgtggctgctttgagacagattttagggggagtttcatgctctataagcctcagtagtgaccagggtgaagggtctgcttaaataccacaagtgtgcccaatgatgggatcaagatgcaaacccaggcctataatagtgactacttttcttttaattttactttgaccagcgcatcttgagcccattacaatgcgcccagcgaagttctaatcattttataaaatgtttagcccttcgatgatcctaacaatcatatgaattcagtatcactattatcctttattcaacagtcaatgcccagttactgagccttttatacctgagaaaagcgagtcaccgagaagctaagtgacttgtgtaaagtcacgccccagagcccagattagaacccaggaactcttgctctggaacttgggcacatagggtccatgttaagctgctctacactgtagct

SEQ ID NO: 681329 - DNA, 156 bp, Homo sapiens
gttcaagcccaaccagacgcggacctacgaccgcgaggccttcaagaagcgggcggcgtgccttattctttccgagcgagcaggaggacgaggtccttcctggttagtagcaaccggtacccagaccatgtggatttgtcccaggaggaggaattg

SEQ ID NO: 681330 - DNA, 248 bp, Homo sapiens
tggccaggctctctacgcgtgcgggtcccatttaacggaaaaggaagctggaggcacagatgtgtacgtccctgagcagggtcgtgtgtccaaggctcggcggcagtggcttgtgtcccaccagacatagttggattatctggaagtggtgactgccccccaaggtgcacgggggtggcacttgtcttccggccccaccgcacctttgtgtgcccccattgaattcttagtgtccccaacccactcgg

SEQ ID NO: 681331 - DNA, 220 bp, Homo sapiens
gaggattccccatcttgatgccccattgtatgcgcttcagactggcccgcctgagagacactaggggaaatagcttttgtgggctagcagggttggccggtggtgctcagcattctttccagtgtctgtgttcctcctccaaatgtggacaggccatgacagagtctgtatcccaatgtccactatgatccccataaagtttctgttcgattagcttcag

SEQ ID NO: 681332 - DNA, 449 bp, Homo sapiens
ttattactgaacaatatgataaaggaaatatccagttttaattaacttatgcaaggaggagtgttgctgggaactgaatatgccataatcctatatcttgtgaccaaaagcagtctcgatgtatttagagccttgagatgttttctgtacctgacacactttgtacatacttgcagcttctctgttcagaacgttaacttctgttctgtggtcttattaaccgtctcaagtagctgatagtccttcgagcgtgttttgtttttcctgcttgatgtggatgatggtttggcataaacccatcttctgcatttggactctggtcttttgtttttggttggatttccggtgcactgcagtgatgacaagggccgcatgaggaattgtatctgtattgcatttagtcactttggacatgacctgtgactcaataaagatttttttccctgtga

SEQ ID NO: 681333 - DNA, 283 bp, Homo sapiens
gtctgtctgcacaccgtcacatttccacaatcgatatgtaccaaatactgtctcggtgtacctgaatcagattcagtctccttcccttctcccgtccccggtgtgacctcataatccgcaagcctcacaggacagactctccgcggccttcctcttacactaatcctcctcagcacagacccttaatgggcatcgggctggggagacggtgaggtctcacccttcccaccactgcctcagccccaccagtgcctcgaagcccaaccactgcctcgggcgggga

SEQ ID NO: 681334 - DNA, 583 bp, Homo sapiens
cccactagatgaaagcgagaatgtggtgtctgtaagaagtgtatctctagcaattctgataagctgctaagcaaggtcgaaaagttagttataaagcattagtattacgtcgtctgcttatgggtagaacatgtagcccgtgtggctttggaacttaataagcctcctccatgaggatctaagtctgtaaagaggatcatactgaggataaagtgtattctgcagatgaaatttagtgtactgtataactctttcaatgacatcctcaatgtacacggctgagggcatgttaggggatgtcataagtgtggatagttgtgggagaagcatccgctgatgcggtaactctctccataataaggtctctcgataagctatcatcttcatcagtatcgtaataatgaggtagcaaagtggcaagcttagaaccatcgggaatattcttctcgaagatatttgagacgttcaggagagggtcagtcgaaagcttatccagttatacccatgggttatattttagcagattcactgcccagttcattaagctgatgtagcctaagagcagtcctgaggaattcatcat

SEQ ID NO: 681335 - DNA, 230 bp, Homo sapiens
ccactgctcatcaattagcggtgaaagtgtaggtttagacgtccgggaatagcatctgttttcaagcctaatgtggggacagctacatgagtgccacgacgtcttgtgatgtaattattactacgaattgggggcttcaatctgggagtactactacgattgtcaacgtccaggcagtcgcacggtcgcctgagttctagcgaataactgggggaagtatgtagagagtt

SEQ ID NO: 681336 - DNA, 532 bp, Homo sapiens
tggggtccagctctgtgagtctgtagccaacaagttggcagggaaggtgatggggccgtcagcacggtgacattccacatgtcaagcactgccctacaggagtccctggtgcagattctgcagccacagcgtcgtgtcgacatgctccgggacatcatggatgcccagcgtcgccagcgcccttatgtcgtcaccttctgcggcgtaaatggcagtggggacacatctcactcaatcttgccacagatttccttctggtagttcagcagcacatggcttcagtgtcctcattgctgcctgtgataccatttcgtgctggggccgtggagcagctgcgtacacacaaccggcgttggcagtgccctacaccctccagagaagcatggtggccgcaccatggtgcagtttgtttgaaccgggctatggcaacggctgctgctggcattgccatggaagccattgacttatgccgtacgccaggctttgacgtgtgctggtggacacggaggccgaatgcagacaatgcccctct

SEQ ID NO: 681337 - DNA, 551 bp, Homo sapiens
  misc_feature (501)..(501): n is a, c, g, or t
atgatcccctgcctcgatgtcctgcacacccgtcccgagacaccactgcacacccgtcccgagacaccactgcacacccgtcccgtgacaccactgcacacccatcccgagacaccactgcacacccatcccgagacaccactgcacacccatcccgtgacaccactgcacacccatcccgagacaccactcacacccatcccgagacaccactcacacccatcccgagacaccactcacacccgtcccgtgacaccactcacacccgtcccgtgacaccactcacacccgtcccgtgacaccactcacacccgtcccgagacaccactcacacccgtcccgagacaccactgcacacccgtcccgagacaccactcacacccgtcccgagacaccactcacacccgtcccgtgacaccactcacacccgtcccgtgacaccactcacacccgtcccgtgacatcactcacacccgtcccgtgacaccactcacacccgtnccgagacaccactcacacccgtcccgggacaccactcacacccgtcccgt

SEQ ID NO: 681338 - DNA, 291 bp, Homo sapiens
ggccccagtactgctcttgaaaggcggcgacgagggttactgcccaaacattctgcctggttctagatatgcagctgctcacccttggcaggggaaggggcactggggaaagagactagccctctcctcacttggtgatatggagtgaaggagtgaggggtatccctcagcctaggtggctttatttgtctgatccctatcctgcctgcaaccctcactccagtaccctctacaatcccaaaagacttaagaatagcctgggctataggattttcaagaagcaggaactgg

SEQ ID NO: 681339 - DNA, 780 bp, Homo sapiens
  misc_feature (661)..(661): n is a, c, g, or t
ggcgagcgcagcgaagcctgggagagaactgcgcttggctgcgaaggcgcgagggtgcgaagacagggaggcaagcggaccccgaccggacccatggcgcccgtcgccgtctgggccgtgctgggccgttccggactgcgagcgttcttgggcgtgcgggaacacgccttgccgcggccaggcaacatgcaaaatgtcttctgtcaccaagtagctcggacgaccgtgtgtgactccatgtgaggacagtacatacactccagctctggaactgggttcccgagtgcttgaactgtggtcccgctgtagcgtctgagcacggtggaaacgtcaacgctctgcactcgggaagagaaccgcatctgcacctgcaggcccggactggtactgagcgctgacgcaagcagtgaatggtggtgtccggtgctgtgatgcgccgctgcgcaatgtggcggccgggcttcggggtggtcataacatggaactgagaacatcagacgtggtgtggatagccctggtgccccgggtgacgttttccaacaagacttcattcacggtgtattggcatggtcgccgatcagatctgtaacgtggtgggcatgcgctgggaatgcaagcatggatgcagtctgcacgttcacgtccccacccggagtatggncccaggtgcagtacacttaaccagcgtgttcaacgatccaaaaaagcagcaatcagaaccaagatgtccagactcttctgtccatgggccaccccatgaggagatggattgctccttgg

SEQ ID NO: 681340 - DNA, 351 bp, Homo sapiens
ggggcgggggggggggttttggggtttttttaagggggggccaaacccccttttttttttttcggggtttttcgggggtggaaagccccccccgggggcccccgtttcctttttttggtgggttttttggcccaacccccgggggggtttttttttttttggttggaagggggttgcctttccccccggaaagggtttttttttttatttaggggggggtttttttggcgccgcttttcctttttttagaagggggccccccaattttggttttttttttttttgggggacccttgggccccccccccccgttttttggtgggggaaaataaaaggggccccggcccccca

SEQ ID NO: 681341 - DNA, 553 bp, Homo sapiens
  misc_feature (11)..(11): n is a, c, g, or t
  misc_feature (94)..(94): n is a, c, g, or t
  misc_feature (100)..(100): n is a, c, g, or t
  misc_feature (105)..(105): n is a, c, g, or t
  misc_feature (109)..(109): n is a, c, g, or t
  misc_feature (111)..(111): n is a, c, g, or t
  misc_feature (156)..(156): n is a, c, g, or t
  misc_feature (189)..(189): n is a, c, g, or t
  misc_feature (196)..(196): n is a, c, g, or t
  misc_feature (198)..(199): n is a, c, g, or t
  misc_feature (203)..(203): n is a, c, g, or t
  misc_feature (222)..(222): n is a, c, g, or t
  misc_feature (224)..(224): n is a, c, g, or t
  misc_feature (238)..(238): n is a, c, g, or t
  misc_feature (241)..(246): n is a, c, g, or t
  misc_feature (251)..(252): n is a, c, g, or t
  misc_feature (254)..(254): n is a, c, g, or t
  misc_feature (259)..(259): n is a, c, g, or t
  misc_feature (261)..(261): n is a, c, g, or t
  misc_feature (269)..(269): n is a, c, g, or t
  misc_feature (276)..(276): n is a, c, g, or t
  misc_feature (278)..(279): n is a, c, g, or t
  misc_feature (286)..(286): n is a, c, g, or t
  misc_feature (292)..(293): n is a, c, g, or t
  misc_feature (305)..(305): n is a, c, g, or t
  misc_feature (307)..(307): n is a, c, g, or t
  misc_feature (312)..(312): n is a, c, g, or t
  misc_feature (317)..(318): n is a, c, g, or t
  misc_feature (320)..(320): n is a, c, g, or t
  misc_feature (335)..(335): n is a, c, g, or t
  misc_feature (352)..(352): n is a, c, g, or t
  misc_feature (357)..(357): n is a, c, g, or t
  misc_feature (366)..(366): n is a, c, g, or t
  misc_feature (371)..(371): n is a, c, g, or t
  misc_feature (389)..(389): n is a, c, g, or t
  misc_feature (394)..(394): n is a, c, g, or t
  misc_feature (400)..(400): n is a, c, g, or t
  misc_feature (403)..(403): n is a, c, g, or t
  misc_feature (414)..(414): n is a, c, g, or t
  misc_feature (431)..(431): n is a, c, g, or t
  misc_feature (443)..(443): n is a, c, g, or t
  misc_feature (462)..(462): n is a, c, g, or t
  misc_feature (471)..(472): n is a, c, g, or t
  misc_feature (488)..(489): n is a, c, g, or t
  misc_feature (551)..(551): n is a, c, g, or t
gaaggctagtnatgctaaacatccactgtttaaacttattcattaacaaaggcacagcagaaataactagaactggaaggaaaatggaaatttnattccncgatnaaanancactttgtataacaaggctaatgtgtttgaaaatctgcatgagcngtggtttgctaagagaaaacaggttaagtttgncacaaancnnagancaagcaataaccatacaananaaggaaaaaaaggnagnnnnnnctcgnngncctancnccaaaccngcaaaancnnaggcgcntccagnngatgtccctgcngngttcncttanncnctgctagtgagactngggctttttttcccacnctagncccccgtcnccgcngcaaaatcctcaaaattnttttnacacanccngaatgtctganatcaaaacatgccaaanatagcacaaaanagaaaaatcacagcatttntttcacttnnttgtatacttgtaaannttccaaatctaattataataccctcaattaagtagtaaattaatagaataaaatcatttttnat

SEQ ID NO: 681342 - DNA, 365 bp, Homo sapiens
aaaaaaaatttggggtttttattttttttcccccccccccaaaagccttgtccttttaaataggagcctttttaaaaaaaaaaaacccggtagggttttaaaataaaaatcaggggcccatttcccctttaaatttgtcccggaaaagttttttaaatccaatgaaagggggccttgcccgaaacttcccctttacttgccccactaggggaggggggacttagggaagtttcccgggtcggaagggctttttttttttttaaaagaacaattttgttgggattttccggatttcctttttccaaggtaaaaaaaaaaaccttttgggaacttgggggggggaaaaattaaagttttccccctga

SEQ ID NO: 681343 - DNA, 86 bp, Homo sapiens
tttgcccatgaggcattttatttgtagatatatgtattacatccctataaaaagaatgccgtgtagtccccttctgtcgtcttctc

SEQ ID NO: 681344 - DNA, 346 bp, Homo sapiens
ctcactcttcaccaggctggagtgcagtggtgcgatcttggctcactgcaacctccacttctctaggttcaagtaattctcctgcctcagcctcctgagtagctgggattacaggcatgaaccaccatgcctggctagcttctgtatttttcgtagagatggggttttgccatgttgtctaggctggtctcaaattcctgacctcaaatgatccacctgcctcagcctctcaaagtgctgggattacaggcatgagccaccacacgcaaactccatgtgcctctttctaatattgctgatattttcatgttggagaaaaagaaaattaaaaggcaaagaagttatg

SEQ ID NO: 681345 - DNA, 375 bp, Homo sapiens
ccccctccccgggtataaaaaaaaattaatacattctcaaggttatattggaaaggtattaaatttatgtctgggatcaccatttaatatttaaaacagaaaataaaattttaaggggaggatggaaacataggcatcaaaaaagatcactaactttcatattttggctaaaaatgagctttgtggccaggcacaggggctcacacctataatctaagcactttgggaggccaagatgggcggatcacttgaagtcaggagtttgaggccagcctgccccacatggggaaaccccgtctctactaaaagtacaaaaaattagctcagaggggtggcctatgcctgtaatcctagctacccggggaggggggggac

SEQ ID NO: 681346 - DNA, 1091 bp, Homo sapiens
tcctcttcttcttaagaacaaaccacaaagggattgtgagggaaggagggggttctctttatactccgtgagcccagacacctcactcggtcccggtctagagctggtttggctgaacactttttttcaaaaagggaaaaagaaagggagttggctgtgagtggtgagaggtgaaagtggacgtaagattttatccaccttcacgagcccagcccgcgcgtgtgcgcccgacggcttccctgtgttctgtgggacactttcttcccctgtgcccagtggaccccctatacttatgtgtgcaacaagggttgagacggggtagaaaaaacatgtgttattatgtgacgcatgtgaccagagacgccggacgcacagggaccatatgtgtgtgcacaagcacaaggcacatgtctctctatacccgcgtgggtctcccaaggcgtgtgggacatatgtgttgtaagaacttttcaaaacaattctcccagcacaattatagctctcctattccttttccctttcgcacaaagaaacacaactctcgggctgtgggtgccaccctgtgagagatgtggacaagtgtgtggagtctcggtgggggatatcaccacatatctctctccgtgggtgtttaccaacgcccgctatgtgatacacccccatataaatggtggggccctgtgtctttcaccccatttttcttcaacttccacagcgaaagaaaccacatggtgggacgcctctattccccctgtggaaaataatctccagcagaggtgtctcttccacgaaattatatgatggcctggtggggggccccaccaggggcgaatgtgggggcaacaccaacttcgttggcctattattctccgattaaatgttctccaccatagtttccagccgttggggtggaaacgtgggccccaggaaatacttattttaagcgcagaaaaaaaagcccgccgagatgaaagggggggaaaaacctactactgaggaattaaaagcgcaggtgttctctccccacagaatttcccttttcgaaggagtatgttggggacaagtgggcccccatgttggtaagtaaaccc

SEQ ID NO: 681347 - DNA, 146 bp, Homo sapiens
gctatgactggaagatgcctcttatagtccagtttagggtccaaggcagacagttccatactgtgatccccaagaaccctcaagggccttatgccaatctttcattttatgccacagtcctctaacaacgcatcagcggtattaca

SEQ ID NO: 681348 - DNA, 195 bp, Homo sapiens
aattaggggaagtatcgacggggagaaagctccccccagatatggtcacacgctcccgagggccgtctcacgacccatcttcatctggcggactcgcgcaatacccccgtgctctaggccctccgcttcccaccagtggatcgtgcggcgcattccccccccatcctcattcatttgatgtgctgcgcttgtacg

SEQ ID NO: 681349 - DNA, 770 bp, Homo sapiens
ccacggtcattctattccctcgcactacggctaggtactgaggcctgggtttctggaagtagtgactgtgttgcgcttgagtgagcccactgattctcccggacccatgttgaagcggcactcaagatgctgcttgcctggaggcccgcctgcgcctgtgagtacctgtaccgcaaggcccgggaggaggcgcagcgctcagcccagtgagagtgaaggagcggctgcggcgctgcgctggaagaaaacctgcctgattcccactgagttacgccgagaggctctggccttacaggggtccctggagtttgatcgattgctggaggtgaagtgtgtgaccagccacgtggatgattgaatacctgatgggcaggagtctgatagatcccaacggttatgatcactacctcccgagaccccagttacccgcctcaagatgtttgcaaatgtgagctgaatgctggtgttcccggtgtcgcgcatgcgaatgaacctgaggtcgacactgaatgtgggcggcactagttgtcagagccttgcaaaagccaacgggctgtaaccgatcttgcctggtcgtatcacagagcatcggggcaacaccctgtggggctcatcgtcaggccccttgccctttggtcctactgcctactttcacgctgtgccgtgttgtcttgcggcttgcatcccagactgggccccatgtcggaggccagcccactcttccacacggctccctccgcctggcagggggtctctgctctcgtcctttc

SEQ ID NO: 681350 - DNA, 459 bp, Homo sapiens
  misc_feature (350)..(351): n is a, c, g, or t
gcccgccaggggagagccccagcctggccagctggagcggatttgggggaaggaggaaaatgggggctcccaacccctctccagcttccctccgccgccctccctgattggctgtgcgtccctggagcccaacttcagtcgctccagactccatttgagccctgagggagtcggagcgccgcgccacggggcgggaggggcggccacgaatccaggggttagcatctctgggcccctggggggaggggcgcggacggggtcggcccccgcagcctctgcgaggcccatctcgctgcctctcgcagcctcggcttctctcagcccccgccctttccttccctcacagcggnngcctccctcctcccgccccccccgccccgcacccgcctgcccgcccgccacctccccccggtttctcattcctgccactagcgcgctcggcggctcattccgcggccg

SEQ ID NO: 681351 - DNA, 168 bp, Homo sapiens
  misc_feature (76)..(76): n is a, c, g, or t
aaaagtggatggggaggggctagcatcgtggagggtctagaaatctgtggcatcgctgaaaccttttgcatcatgntttttgatgttggagtcatgaagtgtacatcccccacccacacaccactacctgtgtacagaccttttaaaacatgtcttctttgtctgatc

SEQ ID NO: 681352 - DNA, 120 bp, Homo sapiens
tttatctatttatcctaaaaagcctcctcctcatgttctctttggggagctccctagccacttctggcttggagctgcccaattcatggatccctgctcaaataaactcttaaatattta

SEQ ID NO: 681353 - DNA, 561 bp, Homo sapiens
ccagcactggagactccattgcacgcagcctgcctcctgtgcgcaacgcctgcctcctgctccccctcatccctcttctgcaccccctcaaccacgcactccctatacccctgtactcctgtactcctgacccctgccctcctgctcccccaaatcctgccctcctgcgccctcctcacccctgccctgatcagctaactctgaggtaagcagaaggacaaaagtactctactcccataacacagtatagaggaggaaggtacacttgtgattatggttgtcattaaggctctggatattttgtggccttacctcccactgctaagatgcttgtaaacacttaaagattctgccacaggattctgttcccatcagaagcctctcacacagctgtagcaggtcactgaacaagatctggaaaactcaaagggccccactctaaaaatggggcttaagatgtctacattgacctctcatgatgccgaaaatgtcttctgtgagtttaacgtatgtcttcaacccaaagtctggtccagtgttgggaatcccagggagaggcca

SEQ ID NO: 681354 - DNA, 615 bp, Homo sapiens
tctaataagaaaatagttggatctctttctcagagtccagctgctaggccacattctgccaatgacttacttcatgttctggagggctctgcaaagataccaacttcgtctgttcatggtatcatccaaaatcgtcagctgctgggtattgtccaagacctcaatcctgtggtgtgtatgggtcgtatcgaactcagaagggcctagctattgtggcagcagagtcccttactttctccttggcatcattaaaactctctgccacgtaatacagcggctgatactccgtgacagtgtaattctgaatggctgtcttctccagctccattgggataagctatgtcttctctgataatcagagctgtaactcaccaaagcatgacagaagcacagctccatatgcctttacggagtctcagtgtctgcagagcgctcactccacagtgactcagtacattgtgtcgagcttagcaatgtattcaccaggtgcatccacaaaggcaagtcccatgtcctggcagaactgggcacagctgcgatctgaatgcaagggcacatgtccccacagctcatgtccgctgtcaggtcgggggtatacatgggcttggatccatg

SEQ ID NO: 681355 - DNA, 203 bp, Homo sapiens
gtgctctagagcgatcccttggttctgtgctggtctcgaattcctaagctcaagagatcctcctgcctcggctcccaaagtgctggaattacaggcatgagccactgtgcccagctaagactatctttgagatatattcaatacttttttttttggagacagagtctggctttggtcatcacaggctggagtgcagttacgca

SEQ ID NO: 681356 - DNA, 355 bp, Homo sapiens
  misc_feature (1)..(1): n is a, c, g, or t
ngaaaaaagtaccaccttgggttccattatccactgggtcttctaaatttccaatgaaggaccagttctctttcccaggtcgcaatagcctatcgctgtgtcattcgctctctaaattctttggcctcctttgatcaccattaagagaatattgtggcttcatcagttagaaaaaaggtccaaagaaagaatataaattaagcttcgaaaggctctcgacctaaaaaaacccacagtcctatataatatatcacaggaaagtgggtacagagctaatgtgtggaggggttataagctctgagggtgttctgccctgtacccatcacatttgtgccgcgtgccgtattcctacagc

SEQ ID NO: 681357 - DNA, 429 bp, Homo sapiens
  misc_feature (2)..(2): n is a, c, g, or t
  misc_feature (102)..(102): n is a, c, g, or t
  misc_feature (112)..(112): n is a, c, g, or t
  misc_feature (120)..(120): n is a, c, g, or t
  misc_feature (135)..(135): n is a, c, g, or t
  misc_feature (142)..(142): n is a, c, g, or t
  misc_feature (164)..(165): n is a, c, g, or t
  misc_feature (175)..(175): n is a, c, g, or t
  misc_feature (190)..(190): n is a, c, g, or t
  misc_feature (192)..(192): n is a, c, g, or t
  misc_feature (233)..(234): n is a, c, g, or t
  misc_feature (252)..(252): n is a, c, g, or t
  misc_feature (258)..(258): n is a, c, g, or t
  misc_feature (270)..(270): n is a, c, g, or t
  misc_feature (273)..(273): n is a, c, g, or t
  misc_feature (276)..(276): n is a, c, g, or t
  misc_feature (281)..(281): n is a, c, g, or t
  misc_feature (290)..(290): n is a, c, g, or t
  misc_feature (293)..(293): n is a, c, g, or t
  misc_feature (297)..(297): n is a, c, g, or t
  misc_feature (301)..(301): n is a, c, g, or t
  misc_feature (329)..(329): n is a, c, g, or t
  misc_feature (344)..(344): n is a, c, g, or t
  misc_feature (346)..(346): n is a, c, g, or t
  misc_feature (368)..(368): n is a, c, g, or t
  misc_feature (379)..(379): n is a, c, g, or t
anacactaatcattcaaaaaacccttgtgtttaacgaagacagctaaaaacatcacttcaaaaaggcaactttttttttttcttggcatcaatgaatatgcncttcagaaanctacaganaacttttttcacttngtatttnttccacaccattctagccaggnnttcaaaatangagcccttcatatcncnacatgaagcatggcccacggagccttcagccatccagagcnnctgaccatctccttaatntccacncacttcccagtntanccncctcncaactcacnagncccngcgnatttggttatttatcatttccagttctnttatcttggaatgantncaaaggtttctgacaacctttngaaacgtaagngcgcaaaaccagtgttgacaacgtcactgagctaatcgaagaatataccc

SEQ ID NO: 681358 - DNA, 298 bp, Homo sapiens
gagcaaattttccctcccttttccccggagggcccccaacgtttgttgccggttttggacaaaatttccccagtgcccgaaatccagggggcccataagtacatgggggcccacaaaaacataggcaagtttttcctggaactccccccgtgaaggaggatggggcaggacaggaggcgcccccccccgccctttccagagcaaacctggagaaaattcccaataaacaggcccaaaaacccggggcttccccccaacccgtttaaagcttatatgaggaaataaagagtgacctgga

SEQ ID NO: 681359 - DNA, 396 bp, Homo sapiens
tcaagtgacctacccacgtcagcctcacagagtgctgggattacatgcatgagacactgtgcctgacctatatttttcttttgaaacagcatctcgctctgtcacgcagactggagtgcagtggcgtgatgtcagcttgttgcaacttctgcctcctgggctcaagtgatcctcctgcctcggcctcccgcgtagctgggactataggcgcacactaccatgcccacctaactcttttgtatttttagtagaatcaggatttcaccaggttgcccaggctggtcttgaactcctgggctcaagcaatctgcctgcctcggcctcccacagtgctgggattatagatgctgggattgcagatgtgagccactgcacccagcctctgatttcctcgtg

SEQ ID NO: 681360 - DNA, 418 bp, Homo sapiens
  misc_feature (29)..(29): n is a, c, g, or t
  misc_feature (42)..(42): n is a, c, g, or t
  misc_feature (44)..(44): n is a, c, g, or t
  misc_feature (46)..(46): n is a, c, g, or t
  misc_feature (50)..(50): n is a, c, g, or t
  misc_feature (53)..(53): n is a, c, g, or t
  misc_feature (56)..(56): n is a, c, g, or t
  misc_feature (197)..(197): n is a, c, g, or t
  misc_feature (215)..(215): n is a, c, g, or t
  misc_feature (312)..(315): n is a, c, g, or t
  misc_feature (317)..(317): n is a, c, g, or t
  misc_feature (319)..(319): n is a, c, g, or t
  misc_feature (324)..(326): n is a, c, g, or t
  misc_feature (328)..(329): n is a, c, g, or t
  misc_feature (369)..(369): n is a, c, g, or t
gctgcgtgattcctgcctggtcacgtgcntgattattgccantngngcgnatntgncgtcattgctgagctcatgcttattgctgctgattgcgtggttcgtgtctgctcagctctttgagtattgcctcctgaggtccctgttcggtcgccacctgccggggaccagccccaactgatccagggtattcgaagganagatggcctaggcgactntttatatgctaatcagagatgtcaagaataatagtatgaggagagctcagtaggaaaattcggtggagaaaagagactgagtagcttggtttatgcnnnngncnaatcnnncnncaagacaagaagtttgccccacttacgtaggccgcagggnccctctcgaatagcggaaaggtgcctcaccctagacaactttctcggag

SEQ ID NO: 681361 - DNA, 162 bp, Homo sapiens
  misc_feature (110)..(111): n is a, c, g, or t
gcagctcccctcctggaatagaatctttctttccatcctgcatggctgagagagccaggcctcctgcttggtctccacaggaggctgtggcagctgtggcacccactgtnncatctccgtactgcccaccttcttaagaggcgagatggagcaggcccatct

SEQ ID NO: 681362 - DNA, 277 bp, Homo sapiens
  misc_feature (6)..(6): n is a, c, g, or t
  misc_feature (12)..(12): n is a, c, g, or t
  misc_feature (239)..(239): n is a, c, g, or t
ggtttnaaattncaacagtattaaagtccagtgacagtgtgattataggcgtatttttgaaaaattttcaaaattactgtatcacagtgatatagtaattcaaagtctgattttaggttcagtttactttgatgtttggtcataagttgaaaggatacttttgatagaaaattttcttgtctgagcattaggacaagtacctaatgcatgtggtgcttaaaagctaggtgatgggttgntaggtgcagaaaaccaccatggtacgtgtatacctatg

SEQ ID NO: 681363 - DNA, 259 bp, Homo sapiens
  misc_feature (81)..(81): n is a, c, g, or t
  misc_feature (146)..(146): n is a, c, g, or t
tctacaggatctcggaaattgtgtggtgttatgctaaagaaggatagaacttggctgatgtgtatagattacagggcgttnaataaaattatgctcaggaacaaataccccctacccaggatagacaatctactagataaattgcngcaagcaaagtatttcaccaagcttgagttgaagtctagatatcaccatgtccaagtcaaagaagaagatacatggtagttgccttcatacaccacacaattcaggagtcctc

SEQ ID NO: 681364 - DNA, 203 bp, Homo sapiens
gattgtccttgggttctttaagaaaacttgagcctctggaggtatttcctgagtattgtcctgaacctggcccaataaactctctgtattaattttgactctatttctttcttaaggtcaacagatatgaccaatatctatacaacttggggccaggctcacacctgtaatgccagtgctttggggagccaaagtgggagcat

SEQ ID NO: 681365 - DNA, 634 bp, Homo sapiens
  misc_feature (12)..(12): n is a, c, g, or t
  misc_feature (51)..(51): n is a, c, g, or t
caacttgggagnacaaccatatgttacgactaaaagcctccaaatactggngaaggctatgaggccaggaacctccacatgatactgagcagacttgatgactacgggaaaaggtgatgcaggtctggactgagaagcagaagtctctagggcagaaacggaatcagtgcctgaagaaaatgatacaggtattcaaccagctcaaaaagatacatgaattgaatcttagtcaacctatccccttaatcatcgaagaaaagcagatacctgcctctaccacatttgttcaaaagccattcttaaaattactaatggaagaggacagaacctctgacatatgcaagaaatttaggcaacaagaggaccagacagaggccatctggaatgttgatctgtccacttcaagctacccaatagcagagaagacatctatgcattcactctgggcccagctgggtgggtacccagatattcccaggctgcttcagttagaagtgcagtctaccttccgaaaatctcttgcatccctccaatcacgggttaagaagattcccaaatgactgtaaaattaaatacaagcatgttgaaagtacatttcagtatctttcagtaaaatgcctattttgttctcaaa

SEQ ID NO: 681366 - DNA, 128 bp, Homo sapiens
agccctaacccccaccccccctggggggttttttacttgggggccccccttgcccctgcccccaggtaaaaaaaaatttaattgtttttttttttgggcccaaaaaaaacccccgctagtttttccca

SEQ ID NO: 681367 - DNA, 470 bp, Homo sapiens
  misc_feature (12)..(12): n is a, c, g, or t
  misc_feature (51)..(51): n is a, c, g, or t
caacttgggagnacaaccatatgttacgactaaaagcctccaaatactggngaaggctatgaggccaggaacctccacatgatactgagcagacttgatgactacgggaaaaggtgatgcaggtctggactgagaagcagaagtctctagggcagaaacggaatcagtgcctgaagaaaatgatacaggcaacaagaggaccagacagaggccatctggaatgttgatctgtccacttcaagctacccaatagcagagaagacatctatgcattcactctgggcccagctgggtgggtacccagatattcccaggctgcttcagttagaagtgcagtctaccttccgaaaatctcttgcatccctccaatcacgggttaagaagattcccaaatgactgtaaaattaaatacaagcatgttgaaagtacatttcagtatctttcagtaaaatgcctattttgttctcaaa

SEQ ID NO: 681368 - DNA, 289 bp, Homo sapiens
tgagacacggcagtgcacgcttgacattcctgctagtctgtctctacgagtatcccctcataggttcgcaggggacagcggagcagacaacacacaacactaccgtttgtgcatgctcaagaccgtggatgattttatagcatcctgggcatttcacatccatgacagtacgacttggggctctgcaccaggtcttttcttctcgtgtttcctcttctcctcttctggagagggactaaggagatcctttgtcgagaggtcatgttctcgtgccctgcgaaccctataa

SEQ ID NO: 681369 - DNA, 983 bp, Homo sapiens
  misc_feature (12)..(12): n is a, c, g, or t
  misc_feature (51)..(51): n is a, c, g, or t
caacttgggagnacaaccatatgttacgactaaaagcctccaaatactggngaaggctatgaggccaggaacctccacatgatactgagcagacttgatgactacgggaaaaggtgatgcaggtctggactgagaagcagaagtctctagggcagaaacggaatcagtgcctgaagaaaatgatacaggtattcaaccagctcaaaaagatacatgaattgaatcttagtcaacctatccccttaatcatcgaagaaaagcagatacctgcctctaccacatttgttcaaaagccattcttaaaattactaatggaagaggacagaacctctgacatatgcaagaaatttaggcaacaagaggaccagacagaggccatctggaatgttgatctgtccacttcaagctacccaatagcagagaagacatctatgcattcactctgggcccagctgggtgggtacccagatattcccaggctgcttcagttagaagtgcagtctaccttccgaaaatctcttgcatccctccaatcacgttcttcaggttgaacatcttcatttctgggctactactatgaccactcaagaaagagtatcttctgctctacattactggaaacacaaaggttcaacaaccctggggtaggctgagtcatgaaagggacatcattatgggcccctaacatgatggcaaagtggcacagtctgcctttcccagtctaaacccgaagatgcctcagaaggaagaaataaatgagtataatgaaggaaactaaaaaccagcagacacccctgaagaattagaaggtggttatgattggtaatgaagggaaatcataatgttaccagtagagggttgtgactgcaagttgtccaggttcttggcattttgaacaaagaattgggcaaaatgcccagcaaagcaaataaagaatgaagccaccacaaaaaaacaaatcgggcctccctggcctcatggga

SEQ ID NO: 681370 - DNA, 462 bp, Homo sapiens
  misc_feature (19)..(19): n is a, c, g, or t
  misc_feature (41)..(41): n is a, c, g, or t
  misc_feature (67)..(67): n is a, c, g, or t
aaaatgcctgtggtggggncctaactggaaaaccgggcaantgggggccatcctgaaaaaaacaccnactttgcaagtgaatgcaaaactgctccccttaacttgcctgtgtcccctatcaggcaaagttaactttgccctctcctgaagccctcagtttcctttattcattaaattcaaatatgaaccccaggtatggtggccccacgccctgtaatcccaccgctttgggagggtgaggcagtaggatcgcttgagcttgggagtttgagaccagcaacataggaagaccccatctctacaaaaaataaaaaaattagctgggcatggtggtgcatgcctgtggtcccaggtactcaggaggccgaggtgggagatttgcttgagcccagaaggttgagactacggtgtgctgtgatcgtgcactccatcctgggggacagagtcaggccctgtctcaga

SEQ ID NO: 681371 - DNA, 486 bp, Homo sapiens
agcgttctagaggataccggaggtgacgctgcctgtactcccaggcatatgggaggcttaggcggatgaatcacttgaatcaggagtggaggccagcctcgtgaacatggtgaaacactgtctctaataataatacaaaaattcctgaacaccctcaacagccagaagtggtggcaggtgcctgtaatcctagctactcaggaggctgaagcaggagaatcgcttgaacccgggaagcgggggttgcactgagccgagatagtgccactgcactctggcctgggcaacagagtgagattcggtctcaaaaaacaaacaaaacaacaacagcaggcaacaattctcaacttatggtataaggtcaagtattaacctggtatcaaaagtagatcacgatattacaagagaataaaactgtagcaccaggatctcttacaaatgcggacattaaaatcctcaacaaaactctagctaatcaaatctagc

SEQ ID NO: 681372 - DNA, 346 bp, Homo sapiens
cactccagacctgttcccttagcataataccacaccagtcggagaaatacaacttcccaaacttctttgtcaaataaattctataacattttggctcaaaatttatcataaaaaaattcctaccaccaatcgggttggcggcaagctctctcacaataccacccaggtccgcacttctctgactaaatttagcagtggttactactgcggcagtctcaaaaaaaagcgtcaaaggacttcacgcgggtgcatgaaaattttctacctcccccttgtggagatcgttatacatttgtcactcctcatccattcgtacatttcaaagaggtaaatttattgcatctaa

SEQ ID NO: 681373 - DNA, 440 bp, Homo sapiens
  misc_feature (101)..(102): n is a, c, g, or t
  misc_feature (128)..(128): n is a, c, g, or t
  misc_feature (143)..(143): n is a, c, g, or t
  misc_feature (202)..(202): n is a, c, g, or t
  misc_feature (438)..(438): n is a, c, g, or t
ctgaaaaaaacaatcacatcagaattaagtaaggccaaaagacaaagagagagaaatgaaaacaagcccagtattcaaatggggcctaagggggaaaattnnccctgggcttccaggaattacagganagttggggttttganaaggtaaaaaagtgggcccaggtgcggtggctcaagcttgtaatcccagcactttgganacccaaggcaggtggatcacgagctcaagagattgagaccagcctggccaacatggtgaaaccctgtctctactaaaaacacaaaaattagccgggcgtggtgcgggcgcctgtagtcccagctactccagaggctgaggcaggagaatcgcttgaacccgggagggggaggttgcagtgagccgagattgtgtctcagtgctccagcctggcaacagagcgagactctggctctnaa

SEQ ID NO: 681374 - DNA, 863 bp, Homo sapiens
gaaacacctcactttatttccatgtaatcagaaacattagctgcagaaaagcccccagacagagccctggcggagaggcaggcgcttggggctcctacggtggtccctggtgcagctgtccccatcaggccaagtagctgacgcgagaggcgctgccccagccaggaccaccagctctcacagtcagtgcacgcaagcatgtggacatttcctaggccatgctggtgggacactggaacattcgggaaagccaagagagacggaagaaggacgatcgcctcctccaactggcgggtgtgaaggaagccagccaggggtccgggctgtccttggcctgctggcaggcatcactcgatcaggactgcgcacaggctcagccgctccgccggagctccaggtcatctggatgtccagatattaggccccgtctcacacagtagcctgtcagcagggtgccgctgctgagcagtgcacagagggatggcaggtccttggcgacggtagcccctgtgcttagatccacggtgagctctctttcccgtgccgaagggggctgtctacttaccaccagcagggcgctgaggacagcaggccgagctgtgcgtctccatgccgtgttgccctcgacacagcgtggtaggcaaacacgcattgtgccatgatgggcacccacgagccgggagaccttggggggcacactcatggcagagcgtggtggtctccctgctctgtccccgacgacggtaccttcaaattacaggcaagcaggcattgccgggtcccggacgggtccgggtgaaaccgagccccgtctccagcttgatgccgccatgctgaatgcgactcggctgacgcttggccgc

SEQ ID NO: 681375 - DNA, 160 bp, Homo sapiens
tgtacaccatctatgggggaggggaatatacacattgcttttatatttaatactttagctgatgcttttgaaaatgtttatgccacagaattgctaatatattgtaatcacattcctcaggaggactttggtaatgggttttatgcatagatggttacag

SEQ ID NO: 681376 - DNA, 246 bp, Homo sapiens
cccccgggggcccccgggggtttttttttgggggccccaaaaaagggggcccccttttgggggcaaaaaaaaatttttttttttgggggtttttttccccccggggggttttccctttttacccccctttggggttttttttccccccccccttggggggggggggttttaaaaatttttttttcccccccccccgaaatttttttttttttttgggccccgggggggtgaaacccctttttttta

SEQ ID NO: 681377 - DNA, 106 bp, Homo sapiens
atgaaatatctaaaaaattacctgaggtttggatgcatgcacttgtagtaccagctgttgggaaggctgaggcaggaggatcactagagcccaggagattgaggct

SEQ ID NO: 681378 - DNA, 81 bp, Homo sapiens
acctatacactctaacacctataacctgatacagcatgtgctacccttccttcaaatatataaatgtgcatcttttttttt

SEQ ID NO: 681379 - DNA, 657 bp, Homo sapiens
  misc_feature (4)..(4): n is a, c, g, or t
  misc_feature (27)..(27): n is a, c, g, or t
  misc_feature (39)..(39): n is a, c, g, or t
  misc_feature (62)..(62): n is a, c, g, or t
  misc_feature (69)..(70): n is a, c, g, or t
  misc_feature (86)..(87): n is a, c, g, or t
  misc_feature (150)..(150): n is a, c, g, or t
  misc_feature (275)..(275): n is a, c, g, or t
  misc_feature (285)..(285): n is a, c, g, or t
gaangcgggtttccaatcagacgttgnacgcggccagtnatgtaatcgcccctataggccanttggacnnggcctccccgatttcnnggccatgtcactgggacaaaatctgtatgtaagtatagactaactatatcgatacttatttantacaccacacagcagcggcaccatacttatatagccagagcttctcgcattggccacggccttcctccagcttttctcatctgcttcacacagctatgtgagatagctgttttcatagctggganaactgaggcncagagaggtcggcacactggcctgaggtcacacagcaagtctgtagggctgggagccgagggaagggcataggggtccaccggatccagccagggcagagagggggatttcaggtttaggtccagaggagagtgcctcaccacagtctggcagtcattagcagggtgatggtgaggctgagatgggcagggccaggctgaggagcagccccactgcggtactggacatccaggtctgggtggttacagccacttttagtacagcaggagacatcaatgtggttcatgctgaaggcgtcactcaggtgggcatgttggcacattgaggcggttgcacagcctcttaccatatagctttggtttttcctcgtgc

SEQ ID NO: 681380 - DNA, 113 bp, Homo sapiens
ttctacactggggagacgtggaaagagagagagagggagaccgtggggagagggagaagagagggagagggagagggctatttgtagaacattgaaccgggtaccgatgctcg

SEQ ID NO: 681381 - DNA, 373 bp, Homo sapiens
  misc_feature (84)..(84): n is a, c, g, or t
  misc_feature (149)..(149): n is a, c, g, or t
  misc_feature (334)..(334): n is a, c, g, or t
  misc_feature (362)..(362): n is a, c, g, or t
tttctccagtaatggcgatcgtagcgctgtgtgttgcagctatcgggtttattgccgtgcagccagtgttctggacgatgccgnacacaactgctttccggtacgcgctggctgcgggaattggttttgtaaacctgtttggtgcagtnggcgggtttattgcccgatcctgcgcgtgaaagcagaaacgttatttgccagcgatgcggcgggattactgacgctggcagcggtggcggtcatcggttcgctgattattttcactctgcgtgtaaatcgcactgttgcgcagaccgacgtggcacatcattaaataggttaaggaacacgatgnaccgattattaagcaatcctttaaagancgtttacgcaa

SEQ ID NO: 681382 - DNA, 317 bp, Homo sapiens
ctagaggataaacctaggtgcaaagcgaccgtaaacaagagtctggccacgtttcttgtagcgagaatgtgctgcagctgaggcacctcttccaccccgggggagcttgggctctccaaagcccgcaggccagaatggctagtcaccgaaagagcaaaggtgggggcctgcccctctccgggagctctgtcccaggaacatttcacatttccattggccaaggaatgctggtgggggtagctggaggccccagttgggaggtcctgtccagtgaggtggaacaggatcaggggcctgcttacagaagcagtctggcg

SEQ ID NO: 681383 - DNA, 144 bp, Homo sapiens
gcctgatagacgtctagagcattttgagatgtattgatgtgcagttgaggagcaagtagcagcttcgtgtcgtagcattgctcagaacagagaggagagcggcggctccacagctactaacatgaaacagtaatgagcaggagc

SEQ ID NO: 681384 - DNA, 495 bp, Homo sapiens
gctctctccttcccccattgtgtgtggaggttttttttctgcttgttggtaggaggcttggagtaaaagaaagaataataaacatccccaacgagagtgcagcaagccaaccctttatgccaaagcatatacacagaagaatggagggtaatgattgggtggagtgataattaattttttctcttggctgaaagatgattgtgaaaaataaactcagagtcattggcaagtatgtcctatatggttataactttgttttgagtgaatttatcaccaaatacagggtctaggaccagtgtggcaaccttcttaggcggatgcagtcaaccaagagcagggagaaagaaagatttgaaagtggtagtgcgaggctgggcgaggtcgtcacgcctgtaatcccagcactttgggaggccaaggcgggtgaatcacctgagatcaggagttcgagaccagcctggctaacatggtgaaaccctgtctctactaaaaata

SEQ ID NO: 681385 - DNA, 323 bp, Homo sapiens
cccaccgtgtggcgggtttcatttgaagcggatgttacatataaaggttttcacatctttatttcctgtctgaatgtgctgggttattccaaagatatttgcaggtccgctactttggaaagaacatagcttttttatttatttattttttatttttattttttttgagatggattctcactctgtcacccagactggagtgcagcggtgcgatctcggctgactgcaacctctgcctccccaggttcaagtgattctcctgcctcagccttccgagtagctgggactacaagcacgtaccacgacacagtgaccacgacaca

SEQ ID NO: 681386 - DNA, 422 bp, Homo sapiens
acaagatttaggcccctgctttcccctagttccagttacaagatgggggagatccttcgccaacttcatgtgcaagacaggactttcatcctggcctccaaatccaatatcaaaaaggtattggatgggcagaacagaaaatatcatatgataaggaggagacaggaggagttgatggcagcattatcttaaagaccaagagtcatatgataatagattgcttatggagatgacgtgtaaagaatggccttatttcatgtatgagcccaccaggagctaaacagagacacagagaagagaacagaggggagacgcatcactttgattgcagaggagcccacgagaaattatgccagctgcatgacatcagagatcagcctttgtattcaggtcgactgtaggtgcattactgtcacactggg

SEQ ID NO: 681387 - DNA, 85 bp, Homo sapiens
  misc_feature (23)..(23): n is a, c, g, or t
  misc_feature (62)..(62): n is a, c, g, or t
  misc_feature (67)..(67): n is a, c, g, or t
  misc_feature (78)..(78): n is a, c, g, or t
aggccctgggccggccccctggnccaggacatccaggtagacaggaggtgcctgggccaggnctttntgccgggcgtnaaaataa

SEQ ID NO: 681388 - DNA, 552 bp, Homo sapiens
gagagagagagaatcgtacgggagaggcgagtgacctgtctggtaagcatgggctaatgtgaggatcgctgctctgcggttctctggggtccagagcaagcaagtattagatgctcggagaggagagggagatgagtgatgctgggggatcggcgcgcagcaagccatgctctgccggatttgtcatcggtggatcgcacatgccggagcgcaaaacgtccgtaggctgagcaatggatggtgcaggtcgcattggttgaacacccatcttcatggaactacctgctggcgtgggcttctataggagttcgcgtacctctcgtgcaagtctcagggacagagaagatggttggcgacgatgaccgggggccaggcatattgcctccaccgctagagtgacctgaacatctgtggccctgatttggggcatcattcatgaccattctgctcatcatcatgaccagtgttggtcgtccaggcccagcgatcgatcaggaggcatcattgaggccagggagctcgtgccgtgagctgtatgccatgtactctatc

SEQ ID NO: 681389 - DNA, 103 bp, Homo sapiens
ccgaatgaaatatcagggacttaggggcgatgactgtagaacagggtacagtccttgacagaatagactataacgttgaacagtcctgtatcaaaactgaaga

SEQ ID NO: 681390 - DNA, 221 bp, Homo sapiens
  misc_feature (43)..(43): n is a, c, g, or t
  misc_feature (79)..(79): n is a, c, g, or t
  misc_feature (125)..(125): n is a, c, g, or t
gttgggtcgtggcggcgggaggggtggcctcctgcgctggtcncccaggggacctgagaggcgcgacaaacagtcggcngtttggtactcgcgctgcagagctttcaacctccgcgccggctgcnctgttttctcggccaggggagcaaggccacgcggctatcgcagccgagtcggaaccaaccggttgtttggtgaaactaccccagagcctcccgcgg

SEQ ID NO: 681391 - DNA, 305 bp, Homo sapiens
  misc_feature (35)..(35): n is a, c, g, or t
  misc_feature (51)..(51): n is a, c, g, or t
  misc_feature (100)..(101): n is a, c, g, or t
  misc_feature (105)..(105): n is a, c, g, or t
  misc_feature (246)..(246): n is a, c, g, or t
  misc_feature (289)..(289): n is a, c, g, or t
gtttcgaactcctgaactcaggtgatccacctgcnttggcctcccaaagtnctgggattataggcgtaagcaccatgcccggcctgcaactttaatattnntttnttagaggcagggtcttgctcctttgcccaggctggagtgcagtgatgcaatcatagctcactgcgaccttgaactcctgggctcgttaccctcccacctcagcctcccaaagtgctgggatcacaggcatgagccatcgtncccagctggggaagggcagtttatggttggtttattttgtganggcagagtctcactct

SEQ ID NO: 681392 - DNA, 415 bp, Homo sapiens
gaggatgatagtagaagagagagaggagtttcataagtcgagtgaatagtaaaaaatattagtactgctgatcgggagtcccatactcatgtctcagtagtgattagttgctgtcgacatcgtggagatgatctcgctggacttgtagccagggaaagtaaagagtgctgcagagaggttgaaggggagtatgcctcctagtgagataattagtccagagaaacaacagcccttccagaatctcttacaagagtactttacgtctttgaccaaacacctgaaaagggaccacagggagctccagactcctgagagacacaacaggcgcattctacattctaaaggggcgctcagtgaagatagacataaacagtatgaggaattcgctatgtcttaccagaagctgctggcacct

SEQ ID NO: 681393 - DNA, 827 bp, Homo sapiens
  misc_feature (109)..(109): n is a, c, g, or t
  misc_feature (116)..(116): n is a, c, g, or t
  misc_feature (135)..(135): n is a, c, g, or t
  misc_feature (172)..(173): n is a, c, g, or t
  misc_feature (194)..(195): n is a, c, g, or t
  misc_feature (335)..(335): n is a, c, g, or t
  misc_feature (434)..(434): n is a, c, g, or t
  misc_feature (436)..(436): n is a, c, g, or t
  misc_feature (444)..(444): n is a, c, g, or t
  misc_feature (446)..(446): n is a, c, g, or t
  misc_feature (450)..(450): n is a, c, g, or t
  misc_feature (453)..(453): n is a, c, g, or t
  misc_feature (455)..(455): n is a, c, g, or t
  misc_feature (457)..(457): n is a, c, g, or t
  misc_feature (459)..(459): n is a, c, g, or t
caaatggacatgtctcttgactggacatcattaaactgaaccggagccagcgaggcggctggggcgggtgccggggcctgcgtgccgtgtgccggctcccagttgcggnccgcggnggtggggcgcagccgccgnagtgaatcgaggcggcggcccatccggaaccggccgnncatcgcccgcggcgccggganngcggcaggaaccgaccggcgccctacagcaggccaaaacaacttcccgacaagtggcagcacgatcttttcgacagtggcttcggcggtggtgccggcgtggagacaggtgggaaaccgtgcgtggtgtccatctggatnttggagtctcagacgccgatattcaggaactctttgctgaatttggaacgctgaagaaggcggctgtgcactatgatcgctctggtcgcagcttaggancncagacgtncncttngancngnangcagatgccctgaatggccatgaagcaggtacaacggcgtcccttctggatggccgccccatgaacattcagctttgtcacgtcacagattgacgcacagcggagggcctgcacagagcgtaaacagagtgtggcatgactagaaaccgtggcgctggaaggtaaagggtgagttggtggagtgcaccccggagaaggcacaccgcggatggcgcccgtggaagaggcaaggaggttgcaggaagaaattcaacaggcaagcaagcttacggcagaggagctggatgcccatgtggacgcctataatgcgaaaatgacacagttaaaaagaacagcaatccagcgtctgacatgaccaggagtatcac

SEQ ID NO: 681394 - DNA, 322 bp, Homo sapiens
gaggatcacgatgtcctgtgagagagttatgatgcgactgtgagtgcgttcgtagtttgagtttgctaggcagaatagtaatgaggatcagatgtctgtgggcgaatatgaaaatgagtgcggcggtaaatcttcagggggtgtggatgagagtgggtgttactacgagggctatgtgggtgattgaagagtatgcaagagcgcgattttaggtgtctgtgtgtcagtacgcagatggcgcttgttataattatgcctcatagggtgatagacaaggaagggagtactctatgtgttgtgccagggggtcgagaatgatgtg

SEQ ID NO: 681395 - DNA, 119 bp, Homo sapiens
  misc_feature (40)..(40): n is a, c, g, or t
ttaggtacagaaaaatcagatccatttactgttacattgngtgcacacttacttgctttattctatttattcctcaccatagcctgtgagatcagtatggttttttccagttagacttt

SEQ ID NO: 681396 - DNA, 260 bp, Homo sapiens
ctagttttttgtttattaattgagatgcagtgttgctctgtcacccaggctggagtgcagtgccagaatcatggctcactgccgtctcaggctgctgtgcttaagcaatcctacctcagcctcccaagtagccgggactacaggcgtgtgccatcatgcctggctattttttttttttttttgggtaaaatcagggtctcactattttgctcaaaattgggtttcttattcttggctctgctgccaacaggctgtgtgta

SEQ ID NO: 681397 - DNA, 126 bp, Homo sapiens
ggtttgggcccccgggccttttcccctttggggggggggtttcgaaaaatgttgcccccccctaagggttaaaagcctttgtccgttctcccctggggggtttgaaaaaataaaaataatttttta

SEQ ID NO: 681398 - DNA, 229 bp, Homo sapiens
cagggcatgtttatatggaaatgtgttaatttttgtcttgtccaaataattcacatgtgtttgtttttgaagttaagccttagaagttacatgtcgagatttgaggaaaagtcctaatcaatacttcagttagcctgagtaactgagtaagtagaggccgccctattatgcttatgcatccagtcattgctttaacatttaagttttggttctctgaaatgctttggct

SEQ ID NO: 681399 - DNA, 84 bp, Homo sapiens
gagagagatgaagggtcttactactgtgcctgtgacaccccccgtcgggggatggggaggggaccatacaccgataaactcact

SEQ ID NO: 681400 - DNA, 409 bp, Homo sapiens; identical to SEQ ID NO: 567613

SEQ ID NO: 681401 - DNA, 348 bp, Homo sapiens
cctgatcttagctcgttccatggataacgacgcgccagcgatcgaccatcacaggaagatgtcaaacgagatacagagaattgtcttctataatggatctaaaaagccaaaggagctagactatccagaaacaatttagaagaagaaaataagaggggcaatcatcagtgtacctgataccaaggcttattatatagctatagtaatcaagacaatatattatcagctggggaacatacacagatcaatgaaatagagtagaacatgcaaacacagatgaacagatatagtccaagtgacttttgagagaggtgcaaaaaaaattcaatggagaaaaaataggcttta

SEQ ID NO: 681402 - DNA, 122 bp, Homo sapiens
  misc_feature (4)..(5): n is a, c, g, or t
taannggacaaccttccgtaacaacacacccgccggccttatgggccggtcaggggcggccctgagggggatttttcttatcacctgggcgggtttaaacccacaaaaggataatttttttg

SEQ ID NO: 681403 - DNA, 238 bp, Homo sapiens
agctggaaagccaataccagaggactgcctgggatctttgatgacaagtacacagagacctggatatggtgcctatgatgcgtataagcatgcagtctcagacccatctattttggatagtatagatatgaatgaagatgaacgggaattactcattaataatattaataggcgcttgaccccacaggctgtcaaaattcgagcagcaccacgattttttccacgaatacaccgggga

SEQ ID NO: 681404 - DNA, 1100 bp, Homo sapiens
agcgaaataggccgagatctgtccatgctgcggtgagaggaacgctgaatcgccgaagagaattggctgcgcttccgttggtttgtgagctagaattagaatggcgactcagtccacgaagcgacgcgaacttgtctcgcagtcgtggagaatcgagactaccttcagaggagtcctcgaacaagagaacatttgcactagacttgaagaggaaatatttcatactgaattcgtcgagctgcctacgttaacctgtcgttcaatataggcagcgtctgcgcaaagatgattatatcctagacagcatccaagcgttctacgtatatcagagtgtgcagcacatgaatgacctcgaagcaaggaaggtaaaatcgccgatacgtacaattatgcgctgagtggtaacatgcctgactggcagatactctcttgacgtacattcacacggtattctgttaacacgtgtactactagtgactaaacccaaagcggagcagatatgctcatcaaagtagcctaccgcttaaccaaaatatacctaggcaggctttgacccatgttaacaatgttgacttgccgctcaaccccaacgtttatatggagaaaaaagctccattcattccagacaatagtgcgttccccgtcgtttggagattagggaggaacgctcggaattcgacccgaaggataagcgtccacaaaataagatcctagttcacccacgtgacgatattacattccaacttaatagggaataacacaaagatgcgttttgaattccccaacggaaaatacccaatttttccgctttcatcacacctttcacaacatcggtgtgtgacctcgcccttacgagaaggaacggttctccttttttaacccttagggtgccataggcaataacgcacaaggcgtggaaaatggattggcaaaacaagagaccaaattctttgggtctatccacgttgttccattcgagaatggtttacccccactttaggagttgggtagcccttaaacagttgagtcggtaggactgctggaatacaatgaaccttccaaaggacgggtttgacactctcggtggatgcgcgcaaaag

SEQ ID NO: 681405 - DNA, 726 bp, Homo sapiens
ccctttttttttgtgtttttttaaccggggcgtcctgagttaattgggggcacacccggacaagggccctgccctaaaaaaaggtgttggcgcctctgtggtggtgaagcgtggtttgtgctgacggcgcaggacccggtggggcaggggaacttgatctcggagtcgtgggaactcgtttgacaggccggccggaggcacttgttgggccgcgatctcttccaccttcatgatctgaatggagtggcgctcggcgctgcggtgccgggcacccattgtctcggaggcaccttgggtgacagccgcctgcggttgtcaggccccggtatcccccggaccattgttgatgggttgccagcccgggagttcatagcgcagccagatcccgaagttactttacacccgcaggggggaactctcgtaaaacgactgtgcccacagtagacatgtctccctgtgaaggatttcttcactctcctgttaacactgaggatacaaagttacccaagaaagcggcaactttggcggacagacctttgattggggcggcaaagtatccgcaattgccggccagaaagcggtgccggttgttgtgggacaattagcgggggggtgttgcgccaagggcaagggaaccccatataacgctttgtaatcctctcgtaaaggagtagcccagaaggccctttcaatgggggtagcactcacggagttaccgccggaatt

SEQ ID NO: 681406 - DNA, 232 bp, Homo sapiens
gctgataccctcgatagggccaccagcttctaagggtacgtcgctgtgaggcgtaatgggacatgaattgcatagggtctcgctttctccttattattcttgtggttacatcatccctggttgtggtttttgcctttaagtaacaaatgctccctccttaaggttatagggctccctgagtttgggagtgtggaagtactacttaactgtctgtcctgcttggcttatcgag

SEQ ID NO: 681407 - DNA, 392 bp, Homo sapiens
gtcgatgttcctcatgattagactgaggttcgggtttggagaggaagacagaggtcaggtgccattctgccacatcttatgaagggttcatgctgactttgatcacctgactgaggtaaacttagccagacttctccatagtaaagttactcttttttcttctttctgtactggaccctttggaagagaagtcactgtgtgcagcccacatttaagaattggggaattatgttctacctccttaagggcagaatatctacacaggcttttttttttttttttttttttttttttaaccccgagggggacaacagaattttttcacaaaaaacacaggggttggggggatagggccacaaaatctaaacgggactcccaaaaaaagggaaaac

SEQ ID NO: 681408 - DNA, 261 bp, Homo sapiens
cttgtctgtgtaaaagaaacctgggctcaagtggccatccagcctcagccttcctgagtagctgggattgcaggcaggcgccaccatgcccagctaatttttgtatttttagtggagatggggttcactatgttggtgaggctggtgtcgaactcctgacctcatgatccacccgcctcggcctcccaaagtgctgggatgacaggcatgagccaccgtgtctggcctctctgcctgttttttaagacttttgtctttgga

SEQ ID NO: 681409 - DNA, 481 bp, Homo sapiens
ttttctttctctctctctctctccccctccctctctctccctctccctctctctccctgtctctctgccccctccctctctccccacctttccctctccctctgcctctctctcttcctctccctctccctctccacttcctccctccccttcccttcctcccttcctctaccttttttttttcttgtaatgtaatatgtagtctggagaaaacatctcccaagttctgttgggccattctccctattggaagtatactaatagtatctgctcactggaacatgccatatatgtcacctgccccacatactgatatcacaataatatgtaaaaccttcatttaaattgtttttgaatgtgtatatcaattgttacagcatatgactgaacttttttcatccttaaaaatttttttaagcaatatgacacaaccactaatgaagaaaaataaagattactgattgacattaaaaaaaaaaaa

SEQ ID NO: 681410 - DNA, 560 bp, Homo sapiens
tggttgtagtaaggggtggaaggtgatttatcggaaggggaggtgattcctagggggtggttggatcccgtttgtgcaaaaataggaggtggagtgctgtagggtgaataatgaagggaaaatgaattgaagggtaaagaatcgtggtgagggtgggactggtctacggagtagcctcctcagattcattggaactaggtctggtcccaatgtatgggatggcggatagtaagtttggtaattactgggggcccctcagaatgatattgggcctcacgggaggacatagcctatgaaaggtgtcgctatagttgcaagcaggaggataaggccgatgttctcgggtttcggagtagagaaaggatccgctaatataggcctcgcccgagtgtgtacggacagaggcgcgataaagactatggcggcgccatgggccgtgaacgtacgcggatgatcacccataatcacgctccgagtgactgtgggccacggactgaaacagggggctgaggcgtcggggagtactcgctggtaggaactagccccgcggcgatcggcag

SEQ ID NO: 681411 - DNA, 458 bp, Homo sapiens
taaagcaaggtgtctcacagactgtcccttcacaaccggtcagtagtactgtccctcctccaacaaccaggactctttatcaagctatgcagcctcatcctcagcatttggcttctatgggttttgatccaaggtggctcatgatgcagtcctacatggatcctcgaataatggtaggaagacctgctatggatattccacccattcatcctggaatgattcctccctaaaccattaatgagaagagacagatggaagggtcaccgaacagttctgagtcatttgagcatttagctcgatctgcaagagatcacgcaatttccctttctgagcctcgtatgctgtgggggtcagatccctatcctcatgctgagcctcaacaagcaactactcccaaagcaacagaagaacctgaggatgtaaggtctgaagctgcgttggaccaggaacagattact

SEQ ID NO: 681412 - DNA, 257 bp, Homo sapiens
ctcacatacttcatcattatctccaaaagaacttatagcaagaatactgaaggaatgaaagtcagattaaaaaacaaaattatctcacaaagttcatcatcagatgatgcagctcaattacccccgctttcagtcactaactaataatgattataaaacgcgaaatactttgcataactcaagtatattgtttaataggcacaaagttgttcaaactatgtatcaatcagcaaaaatatctgcaaggtcattcatat

SEQ ID NO: 681413 - DNA, 369 bp, Homo sapiens
ccgttgtcaacagacgagctatcgacaggtgcttgtgcttgcgttgtgcggcaaagagcaataacgccaatgcaagcactggcattacaggaatcctcttcataggtcaccattcacgcggcttgctgggcgtgtagctgcccgactgaaactgcgcattggcggcgctacgacaattctcgtcacgcatcacaaggtcaggatcagccttacatttttcgagcatgactttccgctcgtcctcgtgctgtttgtagtattcaatcgaatgcaccggttgactacacgacgcgagcaagatactccctaaacacatacaaccaatttgaatagctcgtttcatttatatttccttggaattaccagttt

SEQ ID NO: 681414 - DNA, 842 bp, Homo sapiens
gggacaagtgctaagcggaccagatagaatgatgaaggtgaataccttgggataatgatacatcaacaggtgaaccgtctacaacagacttatgtattgtggaagcatggagcaaatccatggcagaactcagggaaaatcagtgaaagataaagatacacatcagaaggtctccaggcaaacccattacctgacgtgactgttgagtataacactgatgtccaaaacagatctgtgctactatagaggcttcccaactgttgcaattcttgtgacataaacgactggttagaagataaaggtcaagtactacatatcagatgagagaccattgctaaagcatttaagggatcacttcaggtggtgtgggatcgcatggagtctgctaagaaactttggtggagccccctgccagaagtacaaagaatacagaccctgctattactttgcatggacgattacttgtgccataaaacaatgtatgaaggcaatagcaaattacaggggaagctaatataagagctaaacaggagcaaggaagcaaccaaccagtttgacagacgatgctgaagatgattcgtctagaagaaaaggatgtgaatggtggcgaaatttgcgggtgattaggatgatcagacctggtgagaacgatttcccttactgtctccactctgttcacctacaagggtgagacttgccagagggcgaaaggggcaaatcctatagggaaaacaggaccttggtaccccaatccaaatggccccctagacaaatgtttgcgcctcacgaggggggcagaccgggaataagcacaaacccaaagggacggtaagagaagacac

SEQ ID NO: 681415 - DNA, 402 bp, Homo sapiens
tctacacttgctgcatgggcgctcatccaggcagcttgacggcagctatgcgtcaataaagaaaaggatagaaaatacacaaaaacaaagccaccccacagtctgtcttttctcaaactataggagaaactaagggatggtgtggcctccggcgtgcctccgatctttcagagatgatggctggggaccaccggggcagagtcaggttgtctgcactggcctgagcgcttcctcgcggatcttcttaggtccttgtacttgtcctcgcataggcaagagatggcctcaagcttgtgagccctctccctgctcaggggctccaagggaaagctcaggttgtacgcttctgccaaagaacgaagatcaaaataatacttggcatatacaccgaaaggaacatta

SEQ ID NO: 681416 - DNA, 443 bp, Homo sapiens
tcgccgccaccatgtgcgaatgaatgttctggcggatctctcaagagcatcaacaacgctgagaagagaggcaaacgccaggtcctcatcaggccatgttctaaagtcatcggttcggttcttaaccgtgatgatgaagcacggatacattggtgaatttgagatcattgatgatcacagagctgggaagattgttgtgaacctcacaggaaggttgaacaagtgtggcgttataagccctagatttgatgttcaactcaaagacctagagaaatggcagaacaacctgctcccttcacgtcagtttggcttcattgtgctgacaacctcggctggcattatggaccatgaagaggcaagaccgaaaacatacaggagggaaaatccctgggattctttttttaaacgtaaagcataaataaaaagcctctcgtgccgaattc

SEQ ID NO: 681417 - DNA, 85 bp, Homo sapiens
aaaaaagtgtcccatttttaataactatattctattattttataaatgtgtaataaaggggtccctctttaaaaaaaaataaaaa

SEQ ID NO: 681418 - DNA, 713 bp, Homo sapiens
agcggggtggcgtcgtagtctcctgctccgtctgcggttccgttgctgtcctcggaaccaggatctcggcgtggcctatggagttatggtgacgaacgccgtgatgcgtgctgaaatggcgacggcccagtgcagggcatcatcaattctcgagcagaaggacagtcctggaccagtgatggtgtgcgtgaagcattactaggactgactgaaaggcctgcagtggcagtgccagtgtctcatgacgttccgtgaggataagtactggcaggctgtaccagctgcaggtcctcactttaatcctctatccagaaaagacggtgggccatcggatgatgagcggcctgttggacactgttgggcaactgtgacttgctgtgactaatacgatggtgatggccgactgtgtctacttgaagatcgcgtgtgatctcagctctcatggaggaccatgtgcatcatctggccgcacactggtgggtccagtgaaagaagcagatgagttgggccagaggtggccatgaagaaagtacacagacaggaaactgctggaagtcgtatggctagtggtgtactcgggatcggccaataaacattcccttggatgtagtctgaggccccttaactcatctgtgatcctgctagctgtagaaatgtatcctgataaacattaacactgtaatcttaaatgtgacacaaaacacatgaaatta

SEQ ID NO: 681419 - DNA, 408 bp, Homo sapiens
cagtggcgcaatcacagctcactgcagccttgtcctcccaggctgaagctatccttgcacctgaggctcccacgtagacgggaccacaggcatgcaccactacgcatgactaattgtgtaaatatttgagacggtgtctccatgtgttacccaggctggtctcaaactcctgggctcaagtgatcctgccatcttgtgctcccagagtattgggattacagacatgagccactggacctgcccagctacccaactacatgccagttgttaagagacagattcgctccatcgtccaggactgagatgcagtgatgtgatcatagctcactgtaacctcctctgaggctcgcagttctgccaccagcctgctttttattattttgtacagatggcgtcctgcttgttgcc

SEQ ID NO: 681420 - DNA, 429 bp, Homo sapiens
cccatcacattatcatgtgcaatacttctgcagtctaccagactcattgtacagctggtcattactgcgtgacatacacccaaagccatataaattctagctatctacatcatcagagtgaaacggtcacctttactcaagttgcctcgtttgtcgaaccatacgttcctatgtgcgcttcagagtcctaatgtgtcattggcttagtcagtattgaggcatagttatcttccacgacagggtaacagtctacagccaaagactagtatagcatagtccatggtggtgttcactgaccggtatctcttctgcccacgatagcatcatctgtgtattcatggccgttgtccggacggtccatcacgatgagagattgtgaataatccatgctatgcagcggttgcacccagctcctcgccagccagacac

SEQ ID NO: 681421 - DNA, 123 bp, Homo sapiens
cggggtgcaggcagatgcatgaacctggagttatggtgaattgagatggatccgtgtggagacgcttcaggcttgtgtggagggagcggcgtttggtaaatatgcaggagttgacctaatgca

SEQ ID NO: 681422 - DNA, 299 bp, Homo sapiens
tccagcgggccccaagcaggaggagggagaagtcaggcggcacaagaggacaggacccggcccaaggcagagcggcttggccccctcttcccctcaggcatcccggggacccggccgggtggtccacccacatatgcacggctctctcggtctgggaccacggtaccatcacccacaccagcttctgagccagccctccataggcgtctgccctgaatcatggcattggtctcagaagattttggatattaatgtcattctgcactaatgagtccagcccactggggggccagctggag

SEQ ID NO: 681423 - DNA, 475 bp, Homo sapiens
cgatctagaggatcccgtctcatgcacagttggacaacggatccaaagaagtaagcagatggtccaagaggatccagctagtgagtgacagagccagaactagaacccaagcaggaaagagggggggggggctgaggataattcctagaaggcagatggcacacctaccggtactgcataacggctgcatgcaggcgtggggatgcaatctcagggcaggcatatgcatatgcatatgtactcacacatgccttcatagggcagctatacatgcacccatttctaatccccatccccatacacatcgggacagatatctctcatcttaacccaagccttttcagtcaccagagcactagggtgcaccagtagtacattggggggagtcatttttcttccagccatagcagccctccggtgtcttgaagggccctactttatggcttgccttgattggccggaatcctctctgata

SEQ ID NO: 681424 - DNA, 292 bp, Homo sapiens
tacaaccgagctcgtacccctaattgcttcttcgatgacgtgacctccgtcatttaggatgcccttatggagcatattctgtgacctaggcactgcaggtgcagcagtgaacaaaacagacccaccccctcaaaaaatccttgccctccttgtgtttatatgccagtgtgggggttgatgtggacggcaataaacacataaataagcaactctatggatttccaggtagtggcaagtgccacagagaaaaacaaagcaaaaaaagggaacccgtcatcgaagaaccaattag

SEQ ID NO: 681425 - DNA, 428 bp, Homo sapiens
cccgcgctgtacgaattttgcacgaggagagagagagagagagagagagagagagagagagagtgttctgtcaaacatacactcttgtgtgccactctccacaaatttggagaaagagctttctcagcatgtgcactaactctcctgagccacatatttccccaagctgagtttgcagataacttccacggttatgaccgatcttatcaaagtccacacggtatgctgtcctggagaactgcttgaatgtgctcatgacagaggcgagaccttggctatatgcgtgaaccaagattctgaacccagtacactgtatgaatgcgtgtgagactcccctgtttggaaattccactttattgttcgaatggtgatagagattcctgttgactctcctctatttcctcctgttcttttcgggcgtctttttc

SEQ ID NO: 681426 - DNA, 286 bp, Homo sapiens
tttttttttaataagcagcaacgttgtcattccgctatggacctgttttctgcatattaattctccagtcagtaaccggtgcaaagtgtgtttatcctgtgtttccatttaattggctagtaaataaataaataaaccagtttgtgtagtactgaatcataagtaaggctatgggttttgcagatgcaaggagggtatgactgttcagaatgatgatatgatacgaggttatgattaataagttgactgtttatagatgtgataggtaaagaccgtttaggtcgac

SEQ ID NO: 681427 - DNA, 218 bp, Homo sapiens
gagactagcctcaggaatatagggagtccccatctctacaaaaaataaatataaaaataaactaaccagacatagtggtgtgtgcctgtgatcccagctactcaggagactgaggcaagaggatcacctgagcccaagagttcgaggctgcagtgagccatgagccatgatcatgtcactgcactccagcctaggtgatagagcgagaccctgtctct

SEQ ID NO: 681428 - DNA, 898 bp, Homo sapiens
ggctgccggacgcggagcgagaggtgagagagtcggagacatatccgttcatccgtcgcgcaacctgcggagcgtgcgtatggatgatcgagaggatctggtgtaacaggcgaagttggccgagcaggctgagggatacgacgaaatggtggagtcatgaagaaagtagcaggattggatgtggagctgacagttgaagaaagaaactcctatctgttgcatataagaatgtgatggagctagaagagcctcctggagaataatcagcagattgaaccagaaagaagaaaacggggaggagaagacaagctaaaaatgatgcgggaatatcggcaaatggttgaagaccttgagctaaagttaactctggtggtgaccattcgtggattgtagtgacaaaacacctcattccagcagtaacaatgggagtccaagggtttctatttatacaaatgaaaggggggactaccacgagggtatccgtggcagaatttgtgccacaggcaaacgacagggaaggagggttgcggaaaaacagcctagtggctataagcgtgtagtgatattgcaatgacagaacttccacaagcattctattgagttaggtctgtgtcctaaattttggcggatttaatacgaaatttttaattcccctgacgggctgagggtgtggaaaaagagcttgtgatgtgaatcgagacgggatacgtgagtgaagaaagttacggcattacttttatgagggtagtgtaattggactaggattcaaatgggggaggggaacgcaaaaagaaggggggtgggaaagaaatagggataggcaaaaattttgactttcaacacgtggacacggggagaccatttttggaaaaggggggtgaaacaaagagtaggagaa

SEQ ID NO: 681429 - DNA, 685 bp, Homo sapiens
cgcggtggctcacgcctgtaatcccagcacttgggaggccgaggtgggcggatcacgaggtcaggagatcgagaccatcccggctaaaacggtgaaaccccgtctctactaaaaatactaaaaattagccgggcgtagtggcgggcgcctgtagtcccagctacttgggaggctgaggcaggagaatggcgtgaacccgggaggcggacgcttgcagtgagccgagatcccgccactgcactccagcctgggcgacagagcaagactctgtctcaaaaaaaaaacaacacaaaccaaaaaaaacccacgaacatggctggtccttacaacctactctttccggtacccaatactgccacaaatatttcgccatctttataatcaggctactaaccacctaaagagacacggttcatacatcggatcgacagtacatgaaggtgcctcagaaaccaatgaaccaggtacgcatatctggattggctgaaaaggataccggggaagactccgcacacacgagcatgggccggaggacacaaataccacagcgtcttaatacaatggcttagctccaaaccatagcaaaaagagcgagaacacacacaacagaggacgggacagcaagaacggggcggcacactccataaacacactacaacggggaacataaccaaggcacaggaga

SEQ ID NO: 681430 - DNA, 304 bp, Homo sapiens
ggcaaccaaaacttagcctcactccacttttctaagatggaaattcttttttgggccttggactgcttctagggtagcattttgtaggtcactctggcctttgtactattttgcttcttgcctgatgtccttaggtctccatcctactgctggctaacttggcctcatttctcagcttctgcatttccttcctgctcctaacagatgagaagcaggctgcagctcgatgtgtggaagatctcagcctccttgtaggggataaggggatgtgcacatgcatgtgattcgacgacaagttccagta

SEQ ID NO: 681431 - DNA, 224 bp, Homo sapiens
aatgtgtaagtaggtccccatcatgtttaaaagaatcattttggctgggcgcggtggctcacgcctgtaatcccagcactttgggaggccagattgcttgagcccaggagttcagggccagcctggccaacatggagaaaccctgtctctacaaaaaaagtaaaatattatctgggggtggtgacagatgcctgtagtcccagctactcgagaggctgaaatgg

SEQ ID NO: 681432 - DNA, 233 bp, Homo sapiens
cttagaagagctagttttgcatatttaacacaattcataaaacagggccaggcatggtggctcacatctgtaatcccagcaccttgggcaggctgaagtgggcggatcatgaggtcaggagtttgagaccaacctggccaacatggtgaaacctcttctctactaaaaatacaaaaaattatccaggcatggtggcgggcacctgtagtcccagctactcgggaggctgaggc

SEQ ID NO: 681433 - DNA, 1757 bp, Homo sapiens
  misc_feature (227)..(227): n is a, c, g, or t
  misc_feature (256)..(256): n is a, c, g, or t
  misc_feature (380)..(380): n is a, c, g, or t
  misc_feature (397)..(397): n is a, c, g, or t
  misc_feature (1059)..(1059): n is a, c, g, or t
  misc_feature (1757)..(1757): n is a, c, g, or t
caggagatggagaccatcctgtctaacacggtgagagcccgtctccgctaatatatacaaataatattaggcctgcggcattggttggctaggttgtccctgataggtcccaagactacatcgcgcacgagcatgtcaggcaatggaaaattggtcagtaaatcccgggcatggtggacgcttgccatgtgagcactgagattgcatctcactgacagtatcctagngcctgggttgaactgagccgcaggactcntgttcttcatacaaaagaacaaaataagaaagagagaagaagaaatgaatgaaatacatacacaaacaatagaaaagaagcgtgtttcctctagaaccgatgtgacacatgtgcgcgctgttgntttgtacgtgtgctcanaaacacgaggggttattaaaactgcccagtgttgacgcacctcgagcctatagaacatgagcgtgcgagtgtgaatctattgtgtgtgtgtctttagaccaccagactcaaaggacagaagtcactcgccgagagacaaacaatctccccgggggccccttgtgtgcgcaacggtgctgttgtgcaccgatgggctgctctctacgacgggtgataatgatgcgagtttatttctcctacgacgccctattaacagtgccaatgtgctgcgcttgagagctgggctttggggttacgatgtgaggtgtagccggaggggcggccacgaggggcccccctgggtcttcacgacgtttggctccttctctattatttttgcgtttcataccaagagtgatttttatcacccaacttctttttcccgtagtgataatttcatatatgggaggacgccagtattaacattagtattggggcggggaagagaaaataccgcatattaccacctttttgggcatttttttctccttcgaaaaatataacaagcgcggggtgtggattccaactttttgggttatgagaaggaccgccggctcctagcggatgagtaacaccctttgtgtggcaccttttcaccacaatgttgcgcgcgggtaatgtanacaccgcgagcgttattatactgccgcctctagaacctttatggtgccgccggcgggacgcaaatccgcggcttgttaggagggcattctgtgttttcttattattccaccgcccctttgttatgggcgcgtttttagagggcgaaatttctgccccatatagaggggggtttctccctgttgccggccggacgcaccccccagtgtttttttacaccagcgttgttcccccccacgggcgggcgggagaagcaacacttttgtgtttcgactcgccacaaggtgtgtcgtcgtctacacaagagacaattttgcttcggacaccatccttgtttgttgtacacacacggtggccgccgacgaggggagaacaccccgctcgctgaagacaaaccccccccagagagagagagacttctttttcttgcgtgccaccgccccgctcacaaattaatttctccaccacaaaatgttgtgtctatttcccagaaagcaagcccgcttcacaggctgatggtgttcgtaacgacggacgagattctacatcttgacatgagctacaagcaataggatgccggcccaacgtaggagagcagggagagcccctcatattcatggagggacgtgctgcttgaaagcacccgcctcatgcagataactgtttccctccttgcagagcaaacaagaacaccctcttn

SEQ ID NO: 681434 - DNA, 638 bp, Homo sapiens
cccaccttagccgtgggggatagaagagagcgggagggggcggttcccgttccaccgcggagccggatgtttgccgagccttgacaggcgtggcagagggagcagtgcccgagcgcggtttctcttaaggttctgcagggcaaggctgtctgggacaggcttggccatggatccgctctcagagctgcaggatgatctgaccttggatgacaccagcgaggctctgaaccagctgaagctggcctccatcgatgagaagaactggccctcggatgaaatgcctgacttccccaagtcagatgactccaaaagcagctccccggaacttgtcacacacctgaagtgggatgacccatactatgacatcgcccggcaccagatcgtggaggtggcaggagatgacaagtatgggcggaagatcattgtgtttagtgcctgtcgaatgccccccagccaccagctcgaccacagcaagctcctggggtacctgaagcacaccctggaccagtacgtggagagtgactacacacttctgtatctgcaccacggcctgaccagcgacaacaagccacggtcatcccactagccacggtcaatcccacaagccacggtcaacccacaagccacggtcaacccac

SEQ ID NO: 681435 - DNA, 453 bp, Homo sapiens
cggcttcctggtcacaggtgggttcaaagactttctgattaacaattggttgagagagttaagttattatctgatcacctggactcaacagaaaggagtgtctggattaagataaggggttgtggagaccaaagttcgtattctgtagaagaaatctcatagggggctgcccttcaaggcaatagatggcaaatgtctcctattgagacctttgaaatgtgctagatgctaagcccatctctccagcatcagaaaaagccctggaaagggaagaggattctctacagaatgtggattttccccacaagagacagctttgcggggccgtttaaaattatgtcaaacactctattccttccaggacctgctccctgtcatgtgatgttatactagactcgggttggaatttggtgtcttattgctacaaacagcctgtgctgtcagtcaaaaaaa

SEQ ID NO: 681436 - DNA, 112 bp, Homo sapiens
tggaaagatagatgtcctccagagcagagggcagcctggaatgtggcccgcacgcggactcgaggtaggtgcggagagtggcacgtcgatcgcgggcgcagctctgtgacag

SEQ ID NO: 681437 - DNA, 897 bp, Homo sapiens
atatcctataatatatataagtatcaataaaaacatgaagcacagcatcataataccgttacgacaagaaccggaatatacaatatgggctcccccaccgcctatggaaccccaatttttacaccataaattatcttcgccgccaaaccccgattctccttctccgcggggaaaactatttaaaaacaacagggccgaaagagatccccaacgacgactggcccaaccacaccgaattcctctccgaggcacaaaaaattacccccccatttcccattatattaaggcccctcctctgcttgtacctgcgagggacttcccccccgaggggtgccccagcttgtctacccccaacgggttgaccaacaccgatggcggtttctttaagggctttgcttagcgccaacacaaaagggtgtctttaacacctggggaatccgacttcaagtccctctgcgcttgcaccatttcttctttggtgccgggggactcccccccccacccttcttgtaactgccccgcccaggtggacaccttagtgtgagaacacccaacccaggggagcagcatacttgcaaacagtctcagcaacatcccgcttctaaaacgcatactagtcccaaatcccaacacgggttgaatcaagttttctccacccacacaccttgagaattttggagtatcttggattgaaaactcggtcttgaacagacctcctctcttatattaaaatttttaaaaccctgtttgcccagaaggccggaaatgcaccctaataataagaggagtcgcttctgttaaagacactacccaccctcaatctccgagagttgaaatccccccccacaaacttggggggcccttttaaaatttttttccccgcccccacaaaaacaa

SEQ ID NO: 681438 - DNA, 603 bp, Homo sapiens
catgagcatgattgtgcagtataaccagagaagtctctatgcggtgatctgacgagtggcattatacaccgtatctggagatcactgcttctaggtctctgaataaccgatatcttagacaccaaggccactgtgcacaggcgtcagatacatgtctggagtggaataaccttgcgcaagagataccgtgtttgagcaagtgcatttgcaattgcactggcatgaacatagaggttgtatgatagcattcgtatagcaggtatttcccaaatgggagaagccctgcagttgctgcagttggtgagaggaaaggggcactcttggttgattccagccagtgtaatcctggattacacctcagttttttaacagaaagaggaagctggccgaggaaaaaaatcccaaacttcttttggcagagggagtctggcttgaaacattagtcctgtctaagttagtgccaccagaagagtgttccttggatccagctctgctaccataaaaggatgatgactgtaaaggtaaaagccctgatgtcctattctcttctgactgtttcaaactcagctgcttttctctactgctggtcaatactttctggag

SEQ ID NO: 681439 - DNA, 928 bp, Homo sapiens
  misc_feature (43)..(43): n is a, c, g, or t
  misc_feature (64)..(65): n is a, c, g, or t
  misc_feature (89)..(89): n is a, c, g, or t
  misc_feature (119)..(119): n is a, c, g, or t
  misc_feature (126)..(126): n is a, c, g, or t
  misc_feature (177)..(177): n is a, c, g, or t
  misc_feature (187)..(187): n is a, c, g, or t
  misc_feature (204)..(204): n is a, c, g, or t
  misc_feature (206)..(206): n is a, c, g, or t
  misc_feature (224)..(224): n is a, c, g, or t
  misc_feature (242)..(242): n is a, c, g, or t
  misc_feature (248)..(249): n is a, c, g, or t
  misc_feature (264)..(264): n is a, c, g, or t
  misc_feature (275)..(275): n is a, c, g, or t
  misc_feature (282)..(282): n is a, c, g, or t
  misc_feature (299)..(300): n is a, c, g, or t
  misc_feature (303)..(303): n is a, c, g, or t
  misc_feature (306)..(307): n is a, c, g, or t
  misc_feature (313)..(313): n is a, c, g, or t
  misc_feature (330)..(330): n is a, c, g, or t
  misc_feature (334)..(334): n is a, c, g, or t
  misc_feature (337)..(337): n is a, c, g, or t
  misc_feature (354)..(355): n is a, c, g, or t
  misc_feature (407)..(407): n is a, c, g, or t
  misc_feature (412)..(412): n is a, c, g, or t
  misc_feature (439)..(439): n is a, c, g, or t
  misc_feature (443)..(443): n is a, c, g, or t
  misc_feature (502)..(504): n is a, c, g, or t
  misc_feature (702)..(702): n is a, c, g, or t
  misc_feature (849)..(849): n is a, c, g, or t
  misc_feature (916)..(916): n is a, c, g, or t
aaaacaaaaacaaggaaacaaagaacaaataacttgaaaatangcttgtcaaatgatgtaaatnnatcctttccagggagggagaaggnagagcctaacagaaagaaaagatgcttagntaatggnggttaaatttaaaaatacagttaaattcaggctaacttctgaaaatcccgntttattcacntcactgtgggaccagtnantatactgagtcaggttgntttacagttaactatgtnacctannacacaataatccatnaacactctaanaacagtnattgggtgtggtcatannggnganngttaancatatagttgtgttggnaatnttnttttttaaagaataaanngtcttagtataagtgactggatttgtgtaacaaagtaatgaaagggacagcnaatcnaagcggacttaaccctattcaacaacnagcngaaaaaatactttggttcttcaaggaaaaaattacaaaaaaaaaaagaggggattgggnnngagagttgttaattttcatagctgtactccaagagctacataaaaatattccagaagaaccaaattatgtagcaatgaatgaacatgcgtgacagaatttgtgcattcaacatagctggcagaaaaactagttaaaatgctaggtagaacaaattggtctttaaaatatcagtttcctgtcctttaaaaaaaaattanctagtctaccaagaaaatacaaaaacataaggctgtaagtaaataagagttgtgtttaggctattacagtgcaggttatcctcaaggccacatacatcctgcttcactgctgcttgcactctgctgggttttgatccttctttgggncatagtctggatcatttcctcatctccttcttcttccccttcctcatccgcttcttcaccttcttcntataatcatcat

SEQ ID NO: 681440 - DNA, 122 bp, Homo sapiens
tattgaaaatgaatttttcacaaatgtttcttgtacaaatgaatggaattgcaccatgctgccctgtggacaccattagtgtggcctgatacccaactggtgacctggtgacttctggggat

SEQ ID NO: 681441 - DNA, 1059 bp, Homo sapiens
agcggagtttcggccgggagagactgaacagccgtgaactagagcgcgagcagtgatgcacagtccgtcgagtcgacaagctccagcatcccgatccaggggttgcagtgtgtgtgtggaggcatagaatacatagtgactagaatatgggcttttcgcattggtacatctttctcgttatgacgtaggattcgtgcaaagtatggctacagtgtgcgctatctttcgctcttgcaaggaagactcattgtgtgacattgtcaagatgaatatgtataatcgctattacagtcctacatggtgtaatgatgcaaaagatgatttcgtcgtatcctcgttcacaatggaccgtactttggcatccttgtcagaatgggcatatgactgggaatctttgaggggacccctaggtaatcttatcaccagaaaaaggaagattcccgtccaactccaactggggattaatgaaacaggtccttataagaaattgaggtggaaacgaaattttgacattatcttttggaacgggagttttgactaaacctattgagttgagcttgacttaaataggtaaggaagcgcaattaatggttgaattgacaaagatttgggcaaagtggtccctgtgtatatgttggcgagtaattggacttttcgagtggttcaccattgaagggaagttttttgatgcaccaattggagtgtagaatataagtacttgtttaaagtgtcacggtgaggtcattattcactgctgtgaacgtggcataatcaaagaaagaggtagggcccgatgagtcccaaaggataaggattcaaatgaaggttgggggtggaaggaatgtaaactataaataacgaaatcgttgggtggacaaggaattttggggtagataaccctcgaaaggtgaatttttggaagttgctggccgaggtgtaattctgggtccctcaatttaaatgactggtgcatacttttgaagggggaaactggaaagttcgacaaggttaaggggttgtcacaattcttataaaacgctttattttcactacagtgat

SEQ ID NO: 681442 - DNA, 445 bp, Homo sapiens
accctgttcgttttcagccaggccttttttggttttttgttttgttttgttttttgagatggagtcttactgtgttgtccaggctggagtgcagtggtgcaatctcagctcactgcaacctctgcctcctgggttcaagcgattctcctgcctcagcctcccgagtagctgggattagaggcgcccgccaccatgcctggataatttttttttttttaaaatttttagcagagacagggtttcaccgtgttagccaggatggtctcgatctcctgacctcgtgatccacccgcctcggcctcccaaagtgctgggatttcaggcgtgagccactgctcttggccagggccttttttttttttttttagaagaaatttctgcggatactctcatatctcttcacctgcctcttcttcccccttgtgctgccaccgtgcttatctca

SEQ ID NO: 681443 - DNA, 255 bp, Homo sapiens
actctagaggacccttactgtggtgtaccgtgctctgtatgtgagatagctttcttgtgctgttaaacacagtgtgcccacaaattagtccatgtaataatgcatgtctagtgcactttctttttttaactaaagctaaggaagaaaacattgccaaagattccgtgtaagcctttgttttaagagtcactgtagacagatggaactgttaaaagtgctgacatcttttttttcaagttctgtatatttcacttt

SEQ ID NO: 681444 - DNA, 328 bp, Homo sapiens
  misc_feature (163)..(163): n is a, c, g, or t
  misc_feature (192)..(192): n is a, c, g, or t
tacttttcacagggggggaaaaaacagaaacctcaagtttgtagcttctcactacataaacatgtactaaattctaaatttgaattttttttaagtgtgccataccatctaatgaatggaaggcaatacaatgtagacctggctttaaggatcaatttcaggngcgatctacggggggactgatatacaggngtgctaagaagtttctgcttaccctcagaaatacctctcctaccaagcaaactaacgcctaaaatttgagaattttattttcttagcttagacttttgtcttcttttaaaatacaaatatccctgtggtaaaagta

SEQ ID NO: 681445 - DNA, 205 bp, Homo sapiens
  misc_feature (52)..(52): n is a, c, g, or t
  misc_feature (54)..(54): n is a, c, g, or t
  misc_feature (57)..(57): n is a, c, g, or t
  misc_feature (71)..(71): n is a, c, g, or t
  misc_feature (118)..(119): n is a, c, g, or t
  misc_feature (149)..(149): n is a, c, g, or t
  misc_feature (154)..(154): n is a, c, g, or t
attgaaaactccttgcacttagatttaatttatatgttagttacattattantnttnataaggcatttatntgagtcattgctctacagagagcaattaatggcttgtaataataaanngaatattttttttgtaatgcattgttgaangacanccagaatatcaggaaaatgtatataggaatatgctacttgcctcctccctg

SEQ ID NO: 681446 - DNA, 171 bp, Homo sapiens
aaagaaccaagagcctctgaccagctgttactcactaggtcttcctaaccaggggtaccttgctgtgtgaactgaggcagagtcagccatcccaatctacatgccttggatatcatgagagcatggatcaccaatcctcaaaagtgtcctggaccccaggtttctgactag

SEQ ID NO: 681447 - DNA, 856 bp, Homo sapiens
  misc_feature (176)..(176): n is a, c, g, or t
  misc_feature (229)..(229): n is a, c, g, or t
  misc_feature (250)..(250): n is a, c, g, or t
  misc_feature (260)..(260): n is a, c, g, or t
  misc_feature (269)..(269): n is a, c, g, or t
  misc_feature (272)..(272): n is a, c, g, or t
  misc_feature (275)..(275): n is a, c, g, or t
  misc_feature (279)..(280): n is a, c, g, or t
  misc_feature (284)..(284): n is a, c, g, or t
  misc_feature (292)..(292): n is a, c, g, or t
  misc_feature (298)..(298): n is a, c, g, or t
  misc_feature (300)..(300): n is a, c, g, or t
  misc_feature (306)..(307): n is a, c, g, or t
  misc_feature (309)..(309): n is a, c, g, or t
  misc_feature (317)..(317): n is a, c, g, or t
  misc_feature (433)..(434): n is a, c, g, or t
  misc_feature (439)..(439): n is a, c, g, or t
  misc_feature (444)..(444): n is a, c, g, or t
  misc_feature (453)..(453): n is a, c, g, or t
  misc_feature (456)..(456): n is a, c, g, or t
  misc_feature (460)..(460): n is a, c, g, or t
  misc_feature (467)..(467): n is a, c, g, or t
  misc_feature (478)..(478): n is a, c, g, or t
  misc_feature (498)..(498): n is a, c, g, or t
  misc_feature (503)..(503): n is a, c, g, or t
  misc_feature (505)..(505): n is a, c, g, or t
  misc_feature (511)..(511): n is a, c, g, or t
  misc_feature (523)..(523): n is a, c, g, or t
  misc_feature (526)..(526): n is a, c, g, or t
  misc_feature (529)..(529): n is a, c, g, or t
  misc_feature (533)..(533): n is a, c, g, or t
  misc_feature (538)..(538): n is a, c, g, or t
  misc_feature (540)..(540): n is a, c, g, or t
  misc_feature (550)..(550): n is a, c, g, or t
  misc_feature (555)..(556): n is a, c, g, or t
  misc_feature (558)..(558): n is a, c, g, or t
  misc_feature (586)..(586): n is a, c, g, or t
  misc_feature (588)..(588): n is a, c, g, or t
  misc_feature (597)..(597): n is a, c, g, or t
  misc_feature (602)..(603): n is a, c, g, or t
  misc_feature (608)..(608): n is a, c, g, or t
  misc_feature (611)..(611): n is a, c, g, or t
  misc_feature (621)..(621): n is a, c, g, or t
  misc_feature (624)..(624): n is a, c, g, or t
ggggattatgctgcaatttagcatgttggaacgtctagggagaaggttgactttttgcacttctgtatatagtcaaaagagagaaacctgtataatagtaagatcttatttgaataaaaagtctataattacaaggagtttgttaaggctaatacaatgacagatgagcaaaatgnttgcaaaagtggcacagagttagcactccataccccttcaaacatgtggcttngctttcttgtggacagcttgnagttgccagnattttttanctnganaganncgcnatcctttnaaaccntnatgatnncnaaaactcnatggggccaaatctgcctgagagatcattaccaaaaatagcaggtacttctaccattaaggtgaaatcatggatcagatattccttacatttttcaaaactactgcatgtttaaannttacnaaaanagagagaangantatnctaagancatatattatncagatcagtttgtgcaattncaggntntatgtncacaaaaaaatnttnaanacangtatngntttcacaaantttanntnataaacggcaaaccaaacagcacactgnanctatagtgntatgnnatgtnttnaattgtgtangancctgttttttcagcgaggtgaaaaataaacgcagtttcaaaatttcagtggtttaaatttccagtcagaagcatcaaaaatgcaaatgtgatatgggcatgttgaaaagaattaggtatcagcttcatccagctgttaaatggtgcttatcaggaaccctaacattcattgtcggacaggccaatgtggtggtgctattatgtatcaaattattttggtgaatggttaaatt

SEQ ID NO: 681448 - DNA, 212 bp, Homo sapiens
gtggtcgacgaaagggtttggtttgtatgttctcctccccagaagaagccactaaagcagttacagagaatgaacggtagaattgtggccacaaagccattgtatgtggctttagcctcagcgcaaagaagagcgccaggctcaccctcactaaccatgtatatgcagacgaatggcaatgtgtacagagcgtgttcccacacccgtgtaat

SEQ ID NO: 681449 - DNA, 757 bp, Homo sapiens
  misc_feature (1)..(1): n is a, c, g, or t
  misc_feature (74)..(74): n is a, c, g, or t
  misc_feature (190)..(190): n is a, c, g, or t
  misc_feature (228)..(229): n is a, c, g, or t
  misc_feature (240)..(241): n is a, c, g, or t
  misc_feature (249)..(249): n is a, c, g, or t
  misc_feature (263)..(263): n is a, c, g, or t
  misc_feature (288)..(288): n is a, c, g, or t
  misc_feature (467)..(467): n is a, c, g, or t
  misc_feature (485)..(485): n is a, c, g, or t
  misc_feature (510)..(510): n is a, c, g, or t
  misc_feature (578)..(578): n is a, c, g, or t
  misc_feature (682)..(682): n is a, c, g, or t
  misc_feature (714)..(714): n is a, c, g, or t
nagaaaggtgtgtggatgaggagtgtgggtgcacatcacgtagcagcctcttgaggtggtcctcgggtcccccnctcgattctccagtcccccagagactgacccttgtccgagtcgttctcgagccgcacaaacttgccccccaggccgatctcctcgatgctgacgctacccgaggccgaggcctgcngggccagggggaagccaccgctgccacccgtgcccgcnncccaggacgcnngggccgcngcccaagggctccnccacctccagccgctcccgcttacngcggcccaggcgcccgggggcggacaagccgccgctgctgcccgaggtggctcgtgagagggtgacgcgcgaggatgggctgggggacagcctcagcctctcctcctcgccctccaggagcttccggtaggcgtggatctccatgtccagggccagcctcacgtccagcagcccctggnactcggccagccgctgcngcatcacgtcccgcatctccgtcanctcctgccccttggcgtccagcatctcccggaacttgtcccgctccccggccatggcctcctccagcncccgaatgcgatcttcagcggcactggcctgcttctggaggccggagagctggtagctgagggactacaggcgcatgcgggcctccttcagctcctcgcgagcngcactggccgccttgtcgttctggtcagagcncagcttggcgctgtccagcttggcctggtaggtctgctccagc

SEQ ID NO: 681450 - DNA, 255 bp, Homo sapiens
tgggggccgggaaaaaaattttttgggggggttaaaaagggggggggcccatttggaccccttttggggggcggccccccttttttcccaaagggcccatgtggggggttgttctcaccccccccccctttgggggggcccctttttaacccccccttgtttaaaattcttacagttgggactggggggacccccctttttttggaaaggggattttttgggggccaaaaaaatttaatttggccctgggggggg

SEQ ID NO: 681451 - DNA, 154 bp, Homo sapiens
agaggatcccagttaagaagttcaatagcatcttacacacacatgtccataaggatatctttggttttaatgaaaatgagatggtgcattatgtattattctggtaaggtggccttttttcactggattgtatctgtggtattttttccatatg

SEQ ID NO: 681452 - DNA, 880 bp, Homo sapiens
  misc_feature (129)..(129): n is a, c, g, or t
cttggagagccagcccagtaagaaaacggaggaccacatgtgcccgagaatctgattcattactttgcattggatgacggttgggtgaataccagaggccctaaataagaaagctatccagattattancagggttcgagataagctcactggtcgggacttctctcatgatgacactttgtgatgttccaacgcaagttgagctgctcatcaaacaagcgacatcccatgaaaacctctgccagtgctatattggctggtgccctttgctggtaactggtaggcccagatgtgcccatcgacgttattttctggaggctttggtcactttagataagatagctatccacttaaactagaaaccatggtgcagaaagtttgactttgttaacatatttggaagatgtaaatgaccaagaactactgtagtattgacaaagttggtttgaaccaactttctagctgctgttgaagcaatatatcgtcagaaaacagcaaggcttgatgtaggttcccaggacagtgaaacatagtaataccacgtaaactcaagccattcattatggggaacagaagatccataacctttagcaagatacgggttattgacttaagctcacaagagaactcatcataagtactttgctgatggacgactgacctagtggctcctctcaacatgggtagcagcacaactcagacacagcaagaagcctcaggtcgtgggagaaacatggcttacggaatcgtaagactggaaacagcaccaccgaacgatgctggacctcaacccatggcagctaatccaagacctcactggatcggtgcacagcaggaagacaatgaacgcacgaaaaggccaaaatgagtacaaccaggt

SEQ ID NO: 681453 - DNA, 397 bp, Homo sapiens
ggaagtcaaggatgcagtgagccatgatcaacccactgtactccagcctgggtgacagagtgagaccttgtctcaaaaaatataaatttttttggccaggtgtggtggctcgtgcctgtaatcccagcactttgggaagcagaggcaggtggatcatttgagtccaggagttgaagaccagcctgggcaaaacagacccgtttctaccaaaaaaaaaaaccaaaattgggcctgttgtggtagtgcacacctgtagtcccagctgctccagaggctaaggtggaaggacaatctgagcctggggactttgaggctgcagtgagccaagatcaagccagcgcactccagcctggacgatggcaaaaccctgtcttttcaaaaaataattcatatcctc

SEQ ID NO: 681454 - DNA, 476 bp, Homo sapiens
aaaacatacatggggatcccggatcccacatggtaaattgattttgttttgtttttgagaccaagtcttcctctgtcgcccaggctggagtgcagtggtgtgggatttcagctcactgcacctctgtctccaaggttcaagtgattctcatgcctcagcctcccaagtagctgggactacaggcacccaccaccacacccggctaacttttttgtatttttggtagagacggggtttcaccgtgttggccaggatggtctcgatctcctgacctcatgatctgcccgctgggattacaggcatgagccaccgcacccaaccttattgtcattttaatgtctgtggagtctatagtgaaatcccctttcattcctgttttagttcattttctattgctatagcaaaatacccgagagttggtagtttataaaggaaaaagatttatctggtttatgcgtctggaggctgagaaatct

SEQ ID NO: 681455 - DNA, 210 bp, Homo sapiens
ttcagcgtggtctgcgccgcgtcggtcatcactgcggtagcgcccttcaaaacccgaggcacatgcacaggtacagcagctccagcaggtacaggcgttcccgtgggctttgcagacagtggtcaagcaactggaaaaccttttcaccaccccaggcttcgttgtgcacggtgatcagcaggctctgcttaccccagtcactggtgctgc

SEQ ID NO: 681456 - DNA, 1151 bp, Homo sapiens
  misc_feature (41)..(41): n is a, c, g, or t
ccccgggcgtctccattttggtctcaggtgtggactcggcnagaaccagcgcaagagggaagcggagttatagctaccccggccgcggaccggctcactgcactaccacccgaccccctatctattccatccagacgcacgaagatcgcggagcgcatcatggcagggcactggaggatacatgatatcgacatcgagacaagcgccggccacatcaccatgcagtgcaggacgcgacatcgtcatgcatatctatgaccatatggagaagatggatgacaccacggattacatgcggacattgaggatgtcggatgaccagaccggagatcccaaatgactaagaagctcagaacctcgctgccagcatgggtggaacaacagatacaagacctgtatgtccatccggtacatgcagtataaggatgggatccagaaaagcatccattgatgaacagccatcacacggtggcagagcagacatgctcctcaaatggtgcgtggacatatgcgcatcaacagacaaagatggccagacattgtacacctgacacttgggactgaattatcatccgatgctagacacaccatgggcgtgaccttccaccaggaccatacaagaaaccagtgaggacgctacgggtacccgaactcgctgtcatggacatcaatcaacaaccatatcccatgacgccagtggcgaacacaagctcactgctcagacagagcccccaacccggaggaaggtcaaccgacattggcaacacgcagacagcaagagggctggaaccccaaatcacacggaactacccacacaaagacaaacccaccaacaacacaggtacggacaagggcatcacactgagctagtgacaccaccatgtagcgcacagacaaggaaaggaacgaaggagaagaaacagccttcagccacccccctaaactaggaggacaacaggaacgccacgatttggcaaaagacagataggcaggaaacgccgccgttagagacacatgcgacttgccacacgagaacgcaccacgtaggacacgccttagcgtcccaggaccctccggagatcccagcatagcctacaccgggggcccataggaccccccacgaagagcacgcgaatgaaactccccatgag

SEQ ID NO: 681457 - DNA, 126 bp, Homo sapiens
actctagagatcccggaccttacctgcgggggctgagtcagacaggacaagttgaaccggcagtaccacggacggtcacactgtgcggggcatgggtcagacagaccaggttggacccggagtaca

SEQ ID NO: 681458 - DNA, 676 bp, Homo sapiens
  misc_feature (41)..(41): n is a, c, g, or t
  misc_feature (107)..(110): n is a, c, g, or t
  misc_feature (112)..(116): n is a, c, g, or t
  misc_feature (119)..(119): n is a, c, g, or t
  misc_feature (123)..(124): n is a, c, g, or t
  misc_feature (126)..(127): n is a, c, g, or t
  misc_feature (133)..(134): n is a, c, g, or t
  misc_feature (140)..(140): n is a, c, g, or t
  misc_feature (142)..(142): n is a, c, g, or t
  misc_feature (146)..(146): n is a, c, g, or t
  misc_feature (148)..(148): n is a, c, g, or t
  misc_feature (160)..(160): n is a, c, g, or t
  misc_feature (174)..(174): n is a, c, g, or t
  misc_feature (179)..(179): n is a, c, g, or t
  misc_feature (182)..(182): n is a, c, g, or t
  misc_feature (185)..(185): n is a, c, g, or t
  misc_feature (187)..(187): n is a, c, g, or t
  misc_feature (192)..(192): n is a, c, g, or t
  misc_feature (198)..(198): n is a, c, g, or t
  misc_feature (201)..(201): n is a, c, g, or t
  misc_feature (212)..(212): n is a, c, g, or t
  misc_feature (214)..(214): n is a, c, g, or t
  misc_feature (216)..(216): n is a, c, g, or t
  misc_feature (219)..(219): n is a, c, g, or t
  misc_feature (222)..(222): n is a, c, g, or t
  misc_feature (225)..(225): n is a, c, g, or t
  misc_feature (229)..(229): n is a, c, g, or t
  misc_feature (261)..(261): n is a, c, g, or t
  misc_feature (270)..(270): n is a, c, g, or t
  misc_feature (276)..(277): n is a, c, g, or t
  misc_feature (280)..(281): n is a, c, g, or t
  misc_feature (286)..(288): n is a, c, g, or t
  misc_feature (302)..(302): n is a, c, g, or t
  misc_feature (307)..(307): n is a, c, g, or t
  misc_feature (310)..(310): n is a, c, g, or t
  misc_feature (313)..(314): n is a, c, g, or t
  misc_feature (317)..(317): n is a, c, g, or t
  misc_feature (330)..(330): n is a, c, g, or t
  misc_feature (339)..(340): n is a, c, g, or t
  misc_feature (348)..(349): n is a, c, g, or t
  misc_feature (351)..(352): n is a, c, g, or t
  misc_feature (375)..(375): n is a, c, g, or t
  misc_feature (382)..(382): n is a, c, g, or t
  misc_feature (385)..(385): n is a, c, g, or t
  misc_feature (395)..(396): n is a, c, g, or t
  misc_feature (399)..(399): n is a, c, g, or t
  misc_feature (402)..(402): n is a, c, g, or t
  misc_feature (414)..(414): n is a, c, g, or t
  misc_feature (421)..(421): n is a, c, g, or t
  misc_feature (423)..(423): n is a, c, g, or t
  misc_feature (430)..(430): n is a, c, g, or t
  misc_feature (445)..(445): n is a, c, g, or t
  misc_feature (465)..(465): n is a, c, g, or t
  misc_feature (486)..(486): n is a, c, g, or t
  misc_feature (499)..(499): n is a, c, g, or t
  misc_feature (572)..(572): n is a, c, g, or t
  misc_feature (670)..(670): n is a, c, g, or t
ccccgggcgtctccattttggtctcaggtgtggactcggcnagaaccagcgcaagagggaagcggagttatagctaccccggccgcggaccggctcactgcactaannnngnnnnnttntttnntnnagaagnngaagtngngggngntaatggagggantggaggtaatgttngaatnggnagngnagganataaantgnaggaaggaagngntnttntgnttnttgnattgggaagtggtgaaaaaaggttaatgaggnttgggtgtnggtgannagnngggtnnnaatgataagaagtnagaantgntgnnagntgggtggaaaaanaataaaganntgtatgtnntnnggtatgagtataaggatgggtanagaaagntanttgtgaaagnnatnaangtggagagaagnatgatantnaatgtgntggaatatggataanagaaagtggaagaattgaanctgaaattggatgattatatngatgaagaaaaantgggtgaattaaaaaggaaataaaagaaaagtgaggagattaggtatagtattgtgtatggaataataaaaantataaatgagaagtgggaaaaggataatgtaagaagtaaaaaaagggagttaaaaaatgataaagaaagagaggtggaaaaaataaggattaataaanaaaaaa

SEQ ID NO: 681459 - DNA, 118 bp, Homo sapiens
tgactgtgactacgtggagtatattaggcttatgtagaatagaggttacggagtggtgatggtggctatatggtggggatatgaggctattgtttttttgtgaattcttcgactatgg

SEQ ID NO: 681460 - DNA, 253 bp, Homo sapiens
tggtgacgtgggatacggttcacagcacaccgggctaaaatttttttttggtggaaagggtttctttttttggcccaggggggtctcaggctccggggctcagatggctcttcctgcctcagttcccaatgggcacaggcacatgtggtagtttggtccctgtgcaatcatgcccaccaagagtgtcatatacctttaagtgaatggactttccgtttggttgcaacaaacaaaaaaaaaaggggctccctca

SEQ ID NO: 681461 - DNA, 758 bp, Homo sapiens
agcgggcgggtgcgccacgtctgaggccggctgctggccacgtctgaggcggctgtgtgccgctgttggtgtccgcgtcggaggagccggggcgaatggcacgatggaggactgggtctcgtggctcagagcccgggcgctgtggaagatattctagaccgggaataacaatgcgaagtgtgctgacagccttggccatccgaaagctcaccgaggctcaaaatcgtcgtcgcccgtggatctagtcgtaatacggcgtatagcacgagggcattcgaagcaacaacccggggtatccctgcgaacttggggccgattgagaaccttcgcgcgacttgggccaggcaaacggccacttgatcgcctagagacctttgcgtatagccacgagtcgagcgggtagaaaccgctgcgttgtttcgcaagcataaacttggggcagaagaggttcccctgtgaacctaaagggagctaaagcgcctgtggaaatctggcctgtcggttaacgtttggttaggggcaacgtttgttgccccccggtctggcggggggcgttcccgtttaacgacgacttctgtggcggcattagccgcgcgtccccatactatcccctgttgtcccagggtttcacccgtttgccatttcgccgggttatgcgtgtttacgcgttttggctgtccccccaagagtggggggcgactaagcggccacctcggtctcgaatggtccccccgagtggtttggcgcttgcaaaggcc

SEQ ID NO: 681462 - DNA, 391 bp, Homo sapiens
  misc_feature (26)..(26): n is a, c, g, or t
  misc_feature (36)..(36): n is a, c, g, or t
  misc_feature (40)..(40): n is a, c, g, or t
  misc_feature (58)..(58): n is a, c, g, or t
  misc_feature (73)..(73): n is a, c, g, or t
  misc_feature (85)..(85): n is a, c, g, or t
  misc_feature (108)..(108): n is a, c, g, or t
  misc_feature (113)..(113): n is a, c, g, or t
  misc_feature (167)..(167): n is a, c, g, or t
  misc_feature (388)..(388): n is a, c, g, or t
aatggcctaaggttgctagtggtggnaagggttagnctgncagaatttccagtttagnaagtccaacggaggnctcagttccagnacagggcattaaccgacttgtgnctggntatctaggtgcttggattgtccgagttgagtttgtctggtaagggaaatggggnctgcgtcggggggtcccgacaggcctggctgccagttcggcttccgcgaaaacgactcttgctgtccacatagccagccgtgaagccaaactgcaggcctctgccctcccctaaatgtcctcctaggatgcagtcactcgggaggaagatgtgcctgttaccaagtgcttcgtcccggccccagcgcagacctatgaatgaagatggatggagagctgatntga

SEQ ID NO: 681463 - DNA, 246 bp, Homo sapiens
cccccccaaaaggaaaaaaaaaggggagcccccccccgggggggccccttttaaaaaaaggggtcccccccgcccccaaaaattccccccaaaaggtttggggggccacccccccccttccccccccccgcccccccaaaaaggccttttcccggggggcccccctccccctggtaaaaaaaggaggggggggggggggggggggacccaaattcccccccgaaaaaaaaaccccccccccccgga

SEQ ID NO: 681464 - DNA, 223 bp, Homo sapiens
ataggtagtgaagttcccaggaagagcattagttttcatcgagagcttaagagaaaacaagaacagacgagatgggaagagatgttctgatcagcctttcactgagggcatagctctctgaggctccagctttatgaagaaggggaggtctcaattcaatttctctagttaatgtagttctaggtctgaatcttctttatttctatcggctctgcacgtctgc

SEQ ID NO: 681465 - DNA, 111 bp, Homo sapiens
atgacgagacgttcttactttaaaaagctaggagtgattacagcttagtgaggaaggcgtgttgaaagccaaggtaggctgacagctaggccttttgtgccaacagcctag

SEQ ID NO: 681466 - DNA, 441 bp, Homo sapiens
tatctgaagagaaaggaaagttgcatgcatggtgagtgagtgacacaggacatctgccaggatctatgggcggctgggcggctgacgataggagagtctggcatctagtattgatggttcaaataagccaactgtctggtctagtgctcacctgaatcggacgatcaatcactcggaaggccatggacggggcgaccattttaatcatggctatatccaaggctgcagcctatgtaacctgccaggtccatgaggtgggcagctctcagcaccagcagccgtgcctgctcagatctccacgcgcgaatgcgcaatgtccgccagcactgtgccctgctccaccaggggcttcccaaaagccaagcgggacttcacctgtcgacacaggagatgtgcggcagaagacaatgctgggctggaggtggccacgagaggcagggg

SEQ ID NO: 681467 - DNA, 976 bp, Homo sapiens
cagatatagaacactaaacatactcagttcttgtggggtctgggccttactttgctcttatatgtcgcactgtggatgtttgggtgctattggctgtggctgttgtattaccctcttggcctgggtataaggcttcggttttagtacccgtggagtggagagcttcaggttgcgttcttcgtggtccaccatggtgatgggctaggggagagactgttgaggacttgtgcggtgggggtcagtgacttgcctgtccctcggacggggggtgcgtataccagtgccttgtcgtttgtccgaggcccctctcggagctcttaatttgggagcggagatggcagaggcgggccataatgcccgcggtatgccagtggcagcagtcttgcgtgctcgagactgtaagtgtttcccagcgttcaatttcttccctcgctcgatgggtttgagttatttagccccatctttgcaggcgcgcttgcagctcatggtgccatgcggattctttcacctttgaaactccacccctcagctatgataaagtagtcttggcagaacattcgactggggcccctgttttgtaaatgcccgtggcgccgtccagatgttcaggttcgatcaattgtgctggcacccgctgcgttgagcggaagtagaggaccccggtgcatagccgattcccagccctgatagaatatggctacgagtcccaccgtagcgtggaagggagcgtgatgacagatattgcacaggtcggcgtggtacaagattcggtgaccttagagctaataagccgggaattataagtaaacaccagaagaaaggttcgtggccccccaaagataaatgaagcggtgcccgatatagtgttggacgtgttaactgaacacaatttgctccgacaaggcgaagggtggccgctggatgcttcgcgacaacccgcggaacagctcgatagcggctcttctcctgtcattgg

SEQ ID NO: 681468 - DNA, 965 bp, Homo sapiens
agaggagcgtggttgtctcctcttctccgacatgtgcgctgtgctcgcgcactgatatcaggtgtacgtacctgaatacggggaatcatcatgggaaaaatgtcactttgcctgctagtacttcaagtgctcctatgtcgagcacgatattgtgcaacactttgtatcaaaccgaatcttgctgtcgaattaatacctaacaagacagcctccatatgtctcgttcacgtggaattatgccacgtgtcatccatactatattctgagtctgtgagggtactggcagagctgtggctctaattcccagagttcgaggtgcgtgggactcaccgctctggccaggatgcttgtgtaaatcatgtgtcgtgaaggccgaatgtttgtgccaaccaacaagctggcgccgttggcagtcgatagagtgaacagctacagtcacataaagaggacgataactgggcaccattcggtgttcctgcgcctgtgcctgccatacacgaccctaccagcatctggtcgactgtctcaagtggtcatcgtgtagaggaagtatcctgaagcttacttgggtagctcgcgagatcaagttgaagggtacgaggaatgatcatactgaagctgtgagctccttaccgacatttacagctggtgatgtatatcgctcagggtctatgccgtctcagcgaatgagatgctgggctataggggcaaaactgaagacaaggctcgtacggaatccagcggacggagccccggggcattatgtaataactgcagactacttggtattcctctatcgccctcttacaacccatccctgggacttctcctgtttattgtaacaagtggactttagacactgcactttgtgacagtgtgcacttcggtgggatgaactgcccaaatgataaagaggtggtaaggcaccacagaaaattcaacagagtgccgttccctcaacaaca

SEQ ID NO: 681469 - DNA, 1642 bp, Homo sapiens
  misc_feature (1)..(1): n is a, c, g, or t
ntgtgtcttcgccgcgggcggggcggtgggcgaccgcgcctgctggatgaagggggctgccccgtacccgtgtggggcgtgagctttctcctccggcggtggagtgtcgcggtgccaagtgtgtgctgtcgctggtgtgtttgttgtcgacccactgtggttggcggcgcgctgtcggtgtggttgggccagtgtcgggggcccgttggggcgggctgttgcgggggcgcgcggcggtcggaccgggcgcccggagtggcggtgtggtggcgggtgtgcggcggtggggacgtggttgcgcctggtgtgtggtgcggtgggtggcctgtgggcaccccttgttggtggcgcgcttttcgccggtagtgggtgccgcggggttgccagtcgtcccaggcggggggtcgtgcgcgcggtcgccggcgtggcgttgcgtgggttgttcgaggttcgcttggccgcgtgtgcgcgcggggggtgtgccgcttttgtgcgtgcccagtctcggtgtagtggcgtggtgtgtctttggaggtcctagtgcgccattgtgtgctgctctgccggggtgccatcggcggttgcgccgcgaggtctggcttctgtgtctgtggctgtcgggcaggtgcgggtggggtgtgtggtggcgcggggcggcgggtggctgggccgggtggtggtgttggtcgtgcgtagccttccccttggcggtggttgtgctggggcgccgcgggcggactgtcgtttgctcgtggtgtgcagttgtgtgtggttttgattgccgggcgaggttgtggcgctccggtgtggcgctgtgggccgggtcttcggctgctccggcaggcttgttgggagtcggatgtgttgtccgttgtttctcggtgtgggtgtatgtcacttcctcttgtgtttgttgttcgtcttgccattggctcggtgcccgttgttgcggcgcttatgtggtgtcttcttgtctccgtgctgcgggtgtgccctctcgctctgtgtttctcagactgtgtggtgctcgtgttttctctcttttggcgcttttcgcgatgcgacctcaagtgttggtgtggggcggtgtgttgtgtgcggtgggcgtcctgtgtctgggggtgaggtgactgctggtcgagatttgtcgctgtggtggggcatgtcgttgtcatggcgttttatctgtttgttgtgttgttgtgggaggctgtactcatctgtcatggggtttctcctgttgcgcttcttgtcccgatcgggtgctgcctcgttatgtccccgggtcgttgttcgccgcccacccactccccgaggtaaattcacatggcacatttgtggggcttcacccccacccctccacgggtctctgtccaaggtgcgccctttggtcccctggggctgaatggccccccacgtctcccacgcacttcactggcccttgttgccacggtccctggtccctccctctcccacagccgcccctaccaccccttttggtgccaccaccttttcacaggctggccccccctggttggggcaccccgcagagccctggggttccattggtgcaaagggccctggaattgtgactacccgggccctatccggaacctaccgggtaaacctgtgtttttctgga

SEQ ID NO: 681470 - DNA, 691 bp, Homo sapiens
cggtctctggagtaatgcgcgcctgtcgacgtccgagcctacgatccgagaccgatccatgtggctagacatcctcctcactatcagatgctagggctattgccatactactggttcatctcccgggacaaagaggaaactttgccacttgacgatgggtggtagggggccatggcacgaggtccgcagccaggaaggacgacagcatccgccctattcaaggtggaaacgtcagatgagtgagataccacgacttacaccagaggatcgataagttaccgtatatcaccccacctttgggaggacagctgcttccactatggcttacaactaccaactacctgaagaaagtacatactcctactggcggaatgaattctgactggaagaagcaggtaggagatatctacaacagataaccctcacttacaagactaagattgaagggctggacataccacttacataccacgtgaagcccccccagtagatccgcaggacataacacccgaagcacctatagctagataggtgcacaggctaggaccggcaactatactacgagtattgataaggatcattcccagctcctgactgaacaccaagaaccatggcctgagcgatgagcacgtatatgaagtcatctgccctttccatacctgaataatggtactcagaggctcctccagaa

SEQ ID NO: 681471 - DNA, 791 bp, Homo sapiens
  misc_feature (28)..(28): n is a, c, g, or t
  misc_feature (61)..(61): n is a, c, g, or t
  misc_feature (63)..(63): n is a, c, g, or t
  misc_feature (131)..(131): n is a, c, g, or t
  misc_feature (158)..(158): n is a, c, g, or t
  misc_feature (165)..(165): n is a, c, g, or t
  misc_feature (170)..(170): n is a, c, g, or t
  misc_feature (202)..(202): n is a, c, g, or t
  misc_feature (258)..(258): n is a, c, g, or t
  misc_feature (283)..(283): n is a, c, g, or t
  misc_feature (285)..(285): n is a, c, g, or t
  misc_feature (315)..(315): n is a, c, g, or t
  misc_feature (318)..(318): n is a, c, g, or t
  misc_feature (322)..(322): n is a, c, g, or t
  misc_feature (325)..(325): n is a, c, g, or t
  misc_feature (337)..(337): n is a, c, g, or t
  misc_feature (342)..(342): n is a, c, g, or t
  misc_feature (383)..(384): n is a, c, g, or t
  misc_feature (386)..(387): n is a, c, g, or t
  misc_feature (389)..(389): n is a, c, g, or t
  misc_feature (392)..(392): n is a, c, g, or t
  misc_feature (395)..(396): n is a, c, g, or t
  misc_feature (427)..(427): n is a, c, g, or t
  misc_feature (446)..(446): n is a, c, g, or t
  misc_feature (449)..(449): n is a, c, g, or t
  misc_feature (458)..(458): n is a, c, g, or t
  misc_feature (472)..(472): n is a, c, g, or t
  misc_feature (499)..(499): n is a, c, g, or t
  misc_feature (501)..(501): n is a, c, g, or t
  misc_feature (505)..(505): n is a, c, g, or t
  misc_feature (543)..(543): n is a, c, g, or t
  misc_feature (560)..(560): n is a, c, g, or t
  misc_feature (569)..(569): n is a, c, g, or t
  misc_feature (573)..(573): n is a, c, g, or t
  misc_feature (703)..(703): n is a, c, g, or t
  misc_feature (706)..(706): n is a, c, g, or t
  misc_feature (712)..(712): n is a, c, g, or t
  misc_feature (721)..(721): n is a, c, g, or t
  misc_feature (731)..(731): n is a, c, g, or t
  misc_feature (772)..(772): n is a, c, g, or t
cggaccataggtcttccctaattgttcngggaacttttgctgcttgaagaatgcgtgaatngntatattgttcaccagaaagacagaagttaatccccagatggaaatttcagatttttcttttggtttgntttttggtttttcatttttgtagaganggggggngttgntatgttgcccaggttggtcttgaactcctganttcaagcaatcccccagcctcagccttctaaagccctgggtttaaaggaatgaaangactcacccagcccccagattttanantttaaacagccacactaagaactggaaatntgngggnggnggtctcagaggnggggnggaaagcctgtttgtgtgtgacagtttaacagtctataagnngnngnggngtnngggggcacatgggcacgcccatccctgggtnggggggttcgttctggtcnttnccagggggngtttttgtccttcnttccttcctcacttctttctcttgttngntttntcttcccaaatcacaatatagggggttttttggttttngatgggccctgaacttngttttgtgntttntttttggttaagaagggggggagagagagggagagtgggagtccccacttgtcctgctccatctccaaaatcagctcaaatctcccaggaactcttcaggagctcaggctacgtttctagcttaaaaggngcnaatgancattatccnaatcccacancacatcctcactgcttcacagtgcccttccttccgtggtantgtgtggccaagaaataca

SEQ ID NO: 681472 - DNA, 226 bp, Homo sapiens
  misc_feature (92)..(92): n is a, c, g, or t
  misc_feature (148)..(148): n is a, c, g, or t
  misc_feature (150)..(150): n is a, c, g, or t
  misc_feature (225)..(225): n is a, c, g, or t
ctgggcgcctcggcgcaatcggtcttcagcggtgaatttggtgttgacttctctcaagccacggaggacgtggttcgggggttgcctcgtgnccggagatcctgtcgcacgggtcacctccttctgccccaccctggtcacttcccancngagtttatcacaaggttgttcctcagatccctgtgaagagtggtggtccccatgggcaaggggtcctcgggctgna

SEQ ID NO: 681473 - DNA, 378 bp, Homo sapiens
ttcagatggagacacaggctcaagatggagctggagaccattatcctgtgttaactaatgcagaaacagaaaacagagtacctcatgatatggtttggcttcgtgtcctcacccaaatctcatcttgtagctcccataattcccacatgttgtaggagggacccagtgggagatgactgagtcatgggagtggatatttcccatgcttttctcatgatagtgaatgggtctcacaagatctgatggttttcaaagtgggagtctccctgcacaagctctccttttgcctgctggcacccacgtaagacatgacttgctcttccttgccttctgccatgactatgaggcctccccagccatcttgagcctgtggggtac

SEQ ID NO: 681474 - DNA, 1538 bp, Homo sapiens
  misc_feature (63)..(63): n is a, c, g, or t
  misc_feature (66)..(66): n is a, c, g, or t
  misc_feature (116)..(116): n is a, c, g, or t
  misc_feature (147)..(147): n is a, c, g, or t
  misc_feature (1117)..(1117): n is a, c, g, or t
tgtattggtggtgctctctgttgcccaggctggagtgcagtggctcaaccttagcatactgcnccnccacctcctgggttcaaggggttctcttgcctcagcctcccgagtagctnggattacagtgcacaccaccatgcccagctnatttttctatttttagtagagacggggtttggccatgttggccaggctggtctcgaactgctgacctcaggtgatccgcctgcctcggcctcccaaagtgctgggattacaggcgtatgccactgtgcccagcctgagtttctgtttagaaacaacagtctatgatagtataatcctctcttttttgtacacagagtaaagaggacaaataggtgaaagaataaatgaaaggctggaatcccacttcccccgctgtcccagggcattggatattgacggataggaggcagcaaaccactcacagagccaggaagaaatgaatgcgttggtattgccaggaggggaagccggcccggctgaaatacgctatgaccatagccaggagatactgatggagagaaaggaacacagagagggagaggtcacatcttggaagaggaagattgtggagagggggaatgagggtctggggaggggctgcccatcagagaagggacctcagtgttggggtgactactcatttggaaattgcgggatggaggggtattcgaaggtcggatgcaaatccgagaagccagaggaagggttttgggtgatgctcccaggatggtgggctccgatgggatctttggagggggtgtgtctaggtcggctggtgtcaggagggtcttttgtgtgccaggcagagaactgtcccgaagagctgagagtagaggggccaggagcttcagggctgcggccagactgtggcccagagctcagatcccaaaggacccataggagaggcaggggccactcattcactctgcaagagaccagcagaatcctgagggagatgctgacaaatcataaaaagaccaagaatagccgggagtggcggctcaagcctgtgatcccagtactttttgagaggtggagacaggaggatcatgtgagcccaacagttcgagaacaacctgggcaacatagngagaccctgtttctacaaacatttcaaaaattagttgagcatggtggcatgtgcctagtcccagctcctcgggaggctgaggaaagaagattgcttgagcccaggaattggaggctgcagtgagctatggtcgtgccactgcactccatcctggggagcagagctagactctgtctcacaaaaaaaaaatttgtgggtgccaagactcaagaccatgggagctggtcgggcacagtggctgacgtctataatctcagcactttgggaggccgaggcgggtggatcgcctgaggtcgggtgttcgggacagcctggccacatggcaaaaccccgttctactgaagaccaaaaattggcaggcgtggtggtcatgtctgtggtccagtgcttggaggctgaggcggggattgttgaaccggag

SEQ ID NO: 681475 - DNA, 828 bp, Homo sapiens
ggaaattaggggtgaagtggtttctggtaattgttagccaggatggaatgacttgtgatcaccaaagatgaagtctctggaagttctgtcacagctgacgtagtcaataagtgtttggccctcatggacacaccaagtggagcacacagcaggtgtatttgaagaaacgtggtgatgtgaacgactttatgggacatgatataggtcgtggatagtatggtggaatgtacaaagagtcgtgccatgaggtgtgatgctgtgagttctaatacaacaagttggatgcggtcattcaaggagagccaagatctcaagaaattgccaggaagttacctgcaggcggatcatgttattgtctgcggtatgaatacacacatatctattacatgggataatttaaacctcatacaagcttataaagagtgattgatattttctggttggagtattatcttttctgtggcattactgatcgttgcatattacatacatgctcagaagatggtggaaagtagatcttttgttgacctaggatatcactgacagttgcataccttgtgatgtgattagtgacttatgtggtaccatggcatgggtattgatgagcatcttaaccctctgcaaagttctgatttgcctgaggctacaataggtagcataaattgtgatgagcaagcactagcatttgcttgctcccacaaggaaatgggttgggacacacatgagttatgacgggactacttctgtttctatttgtggacttttggtccacaataatatgactgtgaatgaggtttctatagagtgggcgcaggggtctgtccttct

SEQ ID NO: 681476 - DNA, 989 bp, Homo sapiens
  misc_feature (568)..(568): n is a, c, g, or t
tgactagccctgaatcccgactagcccgacagtccccgactagcccgacagtccccgactagcccgacagcattactgcccatcagagaagggacctcagtgttggggtgactactcatttggaaattgcgggatggaggggtattcgaaggtcggatgcaaatccgagaagccagaggaagggttttgggtgatgctcccaggatggtgggctccgatgggatctttggagggggtgtgtctaggtcggctggtgtcaggagggtcttttgtgtgccaggcagagaactgtcccgaagagctgagagtagaggggccaggagcttcagggctgcggccagactgtggcccagagctcagatcccaaaggacccataggagaggcaggggccactcattcactctgcaagagaccagcagaatcctgagggagatgctgacaaatcataaaaagaccaagaatagccgggagtggcggctcaagcctgtgatcccagtactttttgagaggtggagacaggaggatcatgtgagcccaacagttcgagaacaacctgggcaacatagngagaccctgtttctacaaacatttcaaaaattagttgagcatggtggcatgtgcctagtcccagctcctcgggaggctgaggaaagaagattgcttgagcccaggaattggaggctgcagtgagctatggtcgtgccactgcactccatcctggggagcagagctagactctgtctcacaaaaaaaaaatttgtgggtgccaagactcaagaccatgggagctggtcgggcacagtggctgacgtctataatctcagcactttgggaggccgaggcgggtggatcgcctgaggtcgggtgttcgggacagcctggccacatggcaaaaccccgttctactgaagaccaaaaattggcaggcgtggtggtcatgtctgtggtccagtgcttggaggctgaggcggggattgttgaaccggag

SEQ ID NO: 681477 - DNA, 220 bp, Homo sapiens
cggatctctttccgccgccatttaatcagctcatacaacgctcgccgccgctgctgccgcgacccggactgagcgccagacccccctgccgacagctccgtaactatggaggatatgaacgagtacagcaatatagaggattcgcagagggatccaaggtcaacgcgagcaagaattaacagggtgacggtaaaaatgtttaatggaggcttgagctggg

SEQ ID NO: 681478 - DNA, 169 bp, Homo sapiens
tggtgggttcgagcccaacttcagcgctcttcgagaagtgcgaggcgaacggtgcgggggcgcctctcctctccaccttcctgcgggaggccctgcaagctctcagcgacgacgccaccatcttctgaccaacttcaggctactaccccaacttacaatgccaccgcga

SEQ ID NO: 681479 - DNA, 446 bp, Homo sapiens
ctgctaagtagtggagccaacagtgtgctggagtccacttgcattggctcacaagagccaaatgtgcacatctcttctcagctctgtattcagtaacctcaggttggcagcttgaaatagcctacagtgggagtactacaccacagaaattggcaaatgctacaaaccagagacctcttttggagaaccacttgttaaatatttaccagcacattactgggtagagtaaggattctaatccaagaagcctaactccacatctttttctgtatgatgtatttaccttttttagttagtattaacacttttagaaatgtggactggccgggtgcagtggctcacgcctgtaatcccagcactttgggaggctgaggtgggtggatcacgaggtcaggagatggagaccatcctggctaacacggtgaaaccccatctctactgaaaat

SEQ ID NO: 681480 - DNA, 920 bp, Homo sapiens
acctcccccaccaacaacagattgtggacaccagtttgcacagcggtgacaaccacagtcagaacacaccttggccacatttctaaccctctcaaatcccggcttgttccaatttgggctagtgaaaatactgtcaccaatatgccctggaaatgttaacgtttcccccaaaatcaataacttccgcccctcttttttcctcccactcttacaagacgtcgcgcccagagacctacaagaattgctcccaaacaaccttcccccgaattataagcacacgctttccgagcctcaatggaaatttccctaactgcaagtcggtggccctctctccgttgcaacagtcccaaagacgggtgttgccaaacaggtgtgttgtgcgcgtcagtcctcgtcctctttttccgccgtcaagggggcccccggatgttacgcgccacaatgcgggtgagccctcccgaaacgagctttgtcacgggcggagaagacattatccaaaggggattttgttgtccccccagacagcaagcatttcttctgccaatatgcctgaaccaccatttccccccagaaatctagttgatagagaggcatggtccccccagagggcggggggtaaacgccgtcgttcccccggaataaggcgactgaagtcctccgcgtcaagccgccaaactccgtgagtaatcgggcgcagagtgggaccggccctgggggatagagagcaccccgccccatgggaggacgcaagattcgatgatcgagagcacaagacggcccggaggggatgcagggggccccaaacggcgctgtgttaacacccgctatttcccccccgacatcctccgggggataatctaaaaagccaacaagtaaaaattccaaaattacaaaaaaaaattaatacaccacacataaca

SEQ ID NO: 681481 - DNA, 125 bp, Homo sapiens
ccctgcttttaagcaaagtgctgagagcctctagtcgcctcctgccatctgatttccctccccacaattcccgtactcagttgttctttggtctattcggaggccacggtgctgaggccctgcag

SEQ ID NO: 681482 - DNA, 188 bp, Homo sapiens
cggctgcggcagtgagatcagttgcggtcaggagttctatgaccaacctgaccaacatgatgaaacctgtctttactaacaatacaaaaattagccgagcaccccagctactcaggaggctgagccaggcgaactgcttgaacatgggaggtggcggagattgcagtgagctgagctcagatccacag

SEQ ID NO: 681483 - DNA, 339 bp, Homo sapiens
tttttttattttttggagtcagggtcctgctctgtcgcccaggctggagtgcagtggcatgaacacagctcactgcagccttgacctcctgggctcagatgatcctcctgcctcagcctcccaggtagttggaaccacaggcatgtaccatgatacatggctaattttttaatctttttgtagagatgggggtctcactttgttgccaaggctggtctcaaattcctgacctcaagtgattcttcggccttggcctcccaaaatactgagattacaggcatcagccatcatgcccagcctatattttcttcatattaaataaaatcatgttctcatcca

SEQ ID NO: 681484 - DNA, 673 bp, Homo sapiens
ggagagcaagtaaggaggatctaggctgtttaatcttgctgggcccgcgagtctgcgccccgttaagagcaaaatgatttatgccagtctccaaggacgccgattcaatgaagaagctgatcagcggactcaatgacattgaaattgccgatgcaatatgtgctgtatctgtatggcaggatcaatggaccgcgtgtaccctggcatgacgaaggctggaggaggcacgtgccgatcatctgtcccttggcagggtcaatgccatttgttgagaccccttgtgcttggtcccgcacgtgcccttgtgtagggcattctaggtcacgtctcactcaatcaacactagcccccctctgggcgcgtgttttggcagagacttggccgcctctgttcctagacgcgagagccgtgatggtgaggctgggcgggtgactctcccatgggaggggggggggcgtcaaagtggcatatcagggcgactaggattgtgcgagaacgtatgcagggcgccctcccattctcgcgctggggtaatattttttcccatatacattcactcgtgcgcaagtccccgcatatgaaacggggtctatacatgggagactcgtgttaccactcgggaaaccttcgtgcttatatagaggaaataccttgtaaaaaggaatgttcactt

SEQ ID NO: 681485 - DNA, 617 bp, Homo sapiens
gaatgtgggaaaccgcttcggatctgcccagaaccttcgaactacctgagaggacacaaacacacagtatgcacgtctgtagagagaccttataaatgtaagatatgtgggaggggcttttattctgccaagtcagtgtcagagatacatgaaaaatcttacagtggcagagaaacccttatgagatgtaagccatgtgggaaagcctttgctctccttcacttcacctttcgatatcatgaagaggactcgaccacgggaggcagaaccccttatgaagtgtaagcaatttgggaaagccttcagatctgtccaaaatcttcgatttcataaaaggacacacactgaagagaaaccctgtgaatgtgagaaatgtagataagcattccataatttctctcctttgcaaatccatgaaaggatgcacagaggagagaagctctgtgaatgtaagcaattgtgggaaagcattcatatctgccacgatcctttgaatacatgcaagaacacacaatggagagaaaccctatgaatgtaaagaatgcagaagagcattcaggcttgcctacttcctttcatagacgtgaacagactcaactggaaggaaaactatgaat

SEQ ID NO: 681486 - DNA, 513 bp, Homo sapiens
ggggttatcggaggccacagggactctcagggggctccaaaatcgatttggacccccggacccggtctcacggaggcatagcatccaccctaagtaaggatttagccaggaaggacagctttccacggagggtgatgggggacagtataaacagttgggaaagcaagtgaggaggggggagggctagcaatcattaaaagcacattaaaaaacaatttttaaaaatctttataagagaaagtggtaaaggcatatcggtaacagaattccggggattggtagagttttctagtcagtttggaatataaataggtcacatatcttaatcttttggcatacttggttacaaatatgcaaataagataggcatactggctacaaaataggtacagcaggaaggtaatatgtccagaaaaggcgaacgggttattaaaacacattagcgggtagggagtttctaatattttaaatactaaaatttgacaggtgtatctggaagtttttaaaatggaa

SEQ ID NO: 681487 - DNA, 116 bp, Homo sapiens
agttcccctgcttagctacgcgcctgcttggccgcgatgtttagcacgtacaactaacttgagtttttattagaatattatgtattacatttcacactatttttgcatgagtattg

SEQ ID NO: 681488 - DNA, 618 bp, Homo sapiens
agtaatcaacgttacgacttctagtctgtccactagtctggagcatagtcgtgcactagctgggatgctactgtgtgctgacacattatatttgaaaaatgtactttgatcccatgtgttagggaccccctctgattccttgtctccttgtatcctaagtgctgatagcttcatcattgttctactactgctgtgctccatgagtgacaggtctccatttctgacatatacttctgctctattcactcctttgtggtgttgtctcctgatacatgtggttgcccagtgccatgaggaaggataggagagccacttgaggtcatatgttaaggtatgtaaaacacactgttctgatcacttacatctgtggctctccagtttcccttctaaggacttatctctgcacaagcctggttatttgaggatgtgcttgtaacgtatgctttctcttctatttctcatagcctatgcttgtacctgaataggggaggtacgaagagggacagccatgcactaatttacttgattccatgccttcaattatgttgcttggaatgggtactccaaatcatatgactcactgtggaagttgaacgaagaattgtaagttgtccttgg

SEQ ID NO: 681489 - DNA, 116 bp, Homo sapiens
tgaagagagcattactcaaaggaatctagatagcacatcacacagttcggagtgcaggaagtctttagccccaaattaaagatagctggttttctctccatcttcttctctgtact

SEQ ID NO: 681490 - DNA, 238 bp, Homo sapiens
  misc_feature (6)..(6): n is a, c, g, or t
tctgtnttcgagtagggcaaaaggttaaaggaaaagtagattagggattgatggtgtgtgttgtggtggtgggtttgtgtgtgtgtatgttgtgtgtggaggtggtgggttggtggtgtgggagtgtgtgggtggtgtgggaggtgttgagggatattggagtatgtattgtgtggtatgggtggttgtgtggttgtgggggggtggtgtgtggggtggttgtggtggggtgttaggt

SEQ ID NO: 681491 - DNA, 498 bp, Homo sapiens
cgtcctcagctccaaagcgctgggattataggcatgagccaccatgctgacagggtttagtgttttcttggggtgatttctttctggttctctcctggcagtagttctactcattgagctccttaaaagctccttagggaagtggcagcatatcctgtttgtgaagacatccagtgaaatggttatttttattcctcgaggcctctttcttctcaccctgtagcatgtgcacacatgtgcttatgcacacatctcaaccccaaccttccaggacctgctttcgtcaatcctttgataatagggttgtgttttaacattgacaaggaatcatgcaccttttgttcctaagttcccctttcaacacagagcactatatgttctggatcattaacttccacttaagtagtttattgaagtgagagggagctataaagtaggtgaaagagcagaggctccctagaataataaatgtgaaactgtcttcgggagatttggaag

SEQ ID NO: 681492 - DNA, 413 bp, Homo sapiens
cagaggatcccttagaaggtgatattatttattgatttcaagtttcaatgtattttagattcaggcggtacatgtgcaggtgtgttacataggcacatgcgtagtggtggagatagggcttctaatgtacccattacccaaatagtgagcattacaccagacagataatttttcaactctagcctctcccctttaggagtccccagtgtctgttacttctatctttatgtccgtgtgtacccattgtttagctcccacttaaaaatgagaacatgtggtttttgatcttctgtttctgcgttagtttgctcaggataatggcctccagctccatccatgttgctgcaaagaacgtgatttcttttttatggctacaggggccacttttgtggttcctgttttccaacatgaca

SEQ ID NO: 681493 - DNA, 395 bp, Homo sapiens
  misc_feature (17)..(17): n is a, c, g, or t
  misc_feature (49)..(49): n is a, c, g, or t
  misc_feature (75)..(75): n is a, c, g, or t
  misc_feature (289)..(289): n is a, c, g, or t
  misc_feature (291)..(291): n is a, c, g, or t
  misc_feature (295)..(295): n is a, c, g, or t
  misc_feature (353)..(354): n is a, c, g, or t
aaaaaattaaaaatagncccagttgtgggtggctcacaccttgtaatcnccagcactttgggaggacgaggtggntgatcacctggggttaggaattcgagaccatcctggccaacgtggtgaaacgctgtctctactaaaaatacaaaaattagctgggtgttgtgacgggcgcctgtaatcccagctactagggaggctaaggcaggagaatcgcttgaacctgggaggtggaggttgcagtgagccaagatcgtgccattgcactccagcctgggtgccaagagcnanactnactcaaaaaaaattaaaattaaaaaagataaaaataaggttcaagaccagcctggccnnacagggtgaaaccctgtctctactaataaaaatacaaaatt

SEQ ID NO: 681494 - DNA, 146 bp, Homo sapiens
cgtcattatgccaggaccaagtagcgtgggccagacagaaatgcttggggaggaatgatggacctatttgacatgctgcccatcctggaagagggtgatttacgattttggccatgcgatgtcaacatgcacactgctcatgtcga

SEQ ID NO: 681495 - DNA, 434 bp, Homo sapiens
  misc_feature (209)..(209): n is a, c, g, or t
  misc_feature (397)..(397): n is a, c, g, or t
  misc_feature (402)..(402): n is a, c, g, or t
agaaatccagtctcaaaacaacatcaataacaaaaaagttcctcttagagctgagatattatttagaccaatagacatttgtgagactaataagtgtatcttgactcagatggcagcaaagtttacttatagtgctttatagcactaagtgatttcagatgttccgggaactttgctggggatttagctcaatggttgagcacttcccntggcatatgtggaggcctggcttccacccctagcactgaaaacaggaaacaaattgctgtgaattgtcatctccacagttccttctgtccattgttccagctgcttctctcttaacgccgtactcagaatcggagctcaagttgtgatttgcatcaagtcctggacaataacacctattagaaaaaanggganggctaacccctaatctctgctgagttcgtact

SEQ ID NO: 681496 - DNA, 427 bp, Homo sapiens
  misc_feature (345)..(345): n is a, c, g, or t
  misc_feature (356)..(356): n is a, c, g, or t
  misc_feature (397)..(397): n is a, c, g, or t
  misc_feature (399)..(399): n is a, c, g, or t
taattaaggaacatctgtagtctacaaagagatacttgccagtgttcatttagctctgctgtactttaaataaaagatatgtgtatctttagttcaaagctggtgccttggaacggtgtcaaacatgagaagaatgttccaacagcaagatggaatcattgtcttgcagtgttgaaattagaccggtggtgggccagggcgtgacacccttcaccagggccccgttgcaatcttactccacttcgttttcacagcagtcccgggacatgcccattattagggcctatttgataggatgatactgaggctggagtcgggggggtcacaaggccaaagccacaccgntaggaaggggntcagggaccccagcccaggttcccgttcctcttgggtgggncntcaagctttgttgttggatatggagggt

SEQ ID NO: 681497 - DNA, 760 bp, Homo sapiens
gccaggcggggtgcatgacggctgctgattctggggctggtcaggaaaccaaggagaccccccaccccaactaatggacctcacctgtctactcaagcctggacctcccaaacccagctccacagccacctctccgctgacttcctaccgctggcacacaggtgggcggtggggatgaaggctggcttggaggtgttcctgctggtgagcctgctttgctggcctggggctacgtggcccttgtagcacacccagtgatgccccatgcgtcatgccacctcatgcctagcccccttcgtctctgatacttccgctcggagtccctatcttgcgccttcccataggacgtcatcggcaccatgctcgccattcagacatctcacaatgtgcccctctgcgtggctgaggcattatagaatcccatcctgccgggatgccatgacccgggatgccatgatgcagtgatggctcccatgacgcttggatgcctggacgccaacgagctggatgcctcctcttacccacaggcacgatccgctgatggccccacgacatcaccacatcggctgcctcgtctcgggacaatatggcgcggcttcacgccgtgccgccagcactgcgagaaacgctgcgcttgctcgctttgcagacgtgacgccgagatcgcagcgggtcccatctgatcatggcaccccgcggcatggcgcaacgtcgcctcaccctcccggaggcagcacgccactccaccatggcccattgg

SEQ ID NO: 681498 - DNA, 376 bp, Homo sapiens
  misc_feature (26)..(26): n is a, c, g, or t
  misc_feature (34)..(34): n is a, c, g, or t
  misc_feature (76)..(76): n is a, c, g, or t
tggatcaggtacgcattcttgaggcnaaaccatntttcacgttatccgcataaattctctgcgggatccccaaccnatgattgattccgatggcgctgtcatgcccccgcggtgctgattgccgatgagccaaccaccgcgctgatgtcactattcaggcgcagatcctgcaattaatcaaagtattgcaaaaagagatgtcgatgggcgttatctttatcactcacgatatgggcgtggtggcagagattgccgatcgggtactggtgatgtatcagggcgaggcggtggaaacgggtaccgtcgaacagatttttcatgcaccgcaacatccttacacccgtgcgctgttagctgctgttccgcaacttggtgc

SEQ ID NO: 681499 - DNA, 122 bp, Homo sapiens
  misc_feature (6)..(6): n is a, c, g, or t
  misc_feature (97)..(97): n is a, c, g, or t
tgtagntgtacaataaagtgctattaaatccagtcaaaattagtggcaatatataaaaacagttatggtagtatgaatttgaggccaggtttaccanaacgcattttcggctgctgcagatc

SEQ ID NO: 681500 - DNA, 1002 bp, Homo sapiens
ggtcaacatgggccggttcgcaccagaagcgtgaagaaggcggaccggagtctaactcagtagcaagagtggctagccacgcgcctgggcaacgacttccacacgagacaaggcgcggtgtgcgaggagatcgccatgtgatcctccagcaaaagagctccgtaacaagatagacaggttatgtcacgctagtcatgcatgatagcgaatttcacgtagagggcacagctaaccaggtatctccatcgatgcctgcgcggcaggagcgtcgatgagatcatggagacgcacgaattactgtttcccttgcacgggtcctcgcagccgttgtgcgcactcatcggaggaattattttgacacgtggcgatccatagaacatcttagatggacaagttgcctgacaggcgtttgctggagcgtacagagcatggcgtgatccgagagcgcttctaagggttcagcatcaggcgctagacaggttgggggagtcgatccttgtcgacatagagcagcgcttggtgggaggaccctgttagggcagatgttattctggtggtagtgtggctgttatgtgatttttttcagaatttagaaatttcttgggggaaccaagcgagcttgcgaaagaagagaaaatagagcgatacattgagagagaaagggagacttaaaacagaataaacatacaaatacaagtggcgggggagagtcactgtgttttagtggaacggtggcgcgaggaaacacagcaaagtcgaggtggaacaagcaaacaggttggtacagcatagttgggggtggacacataacacgggggcgagagcaggtgagtcccaaggaggtttttgttggtggttgacaaacggagcgggtgaggaaaaatagattcggcgacgggccgttcacgattatataagaagaaggaaggcggttaagtaaaaatattatgaggaatagaaggaacgcgtggggttgacccgttgggaatatataagaaaggc

SEQ ID NO: 681501 - DNA, 145 bp, Homo sapiens
tcccggcctcgccgtgagtaccgctggagtgaggagtagccgctggagtgaggagtagccgctggagtgagtagccgctggagtgaggagtagccgctggagtgagtagccgctggagtgaggagtagccgctggagtgagtagc

SEQ ID NO: 681502 - DNA, 286 bp, Homo sapiens
  misc_feature (33)..(33): n is a, c, g, or t
  misc_feature (41)..(41): n is a, c, g, or t
  misc_feature (45)..(45): n is a, c, g, or t
  misc_feature (103)..(103): n is a, c, g, or t
  misc_feature (161)..(161): n is a, c, g, or t
  misc_feature (257)..(257): n is a, c, g, or t
  misc_feature (272)..(272): n is a, c, g, or t
ttccacaggcgtgagtacgtgcatcgagcgagntgccctcngagnacaattcctcccgagggcatcgcactttctcacctggacagactgacgcggcgcaacngcaaccggacccggcaaaaccgcgcagaccttgatccattcacaggactcaaaagtcnggaccggtccaacaacaatcagctgtcacggtctcccaacctcgggcacatgcctgaactacagacgctgaacctgagcggaacccatatctcccngtttcccgagaactngctcaatcgccccc

SEQ ID NO: 681503 - DNA, 341 bp, Homo sapiens
ccctcacgtactcaaaaaatactagcaaataaaatccatcagcacattaaaaagttaacacaccacaaatcaagttaagctttattcctgtagatgtaatggctggttcaatcagcaactcaataaatgtgattcaccacataaacagaatcaaaagcaaattccatataaccatctaaatagatgcagtggaagcatttgataaaatccaacaccccttcatgatgaaaactttcaacagattaggcatcaaagaaacattactaaaaataaggccaggcatgagggctcacgtgagcctgtaatcccagcactttggaaggctgaggcaggtggatcac

SEQ ID NO: 681504 - DNA, 143 bp, Homo sapiens
agcaaggcgtgggaggagggaggaggcctacagagggctccaagcaaaggtgaacaggaaagctgccgacagggcgctccccctgccccagataagccctctccctgttaagactgcacgaggcccgccctggtccgagcgga

SEQ ID NO: 681505 - DNA, 371 bp, Homo sapiens
cgccagccggccatggcccagtgtgaatgctgcagcagtaaggaactgaagtggtaaagcctggggctacagtgaatgttgtcctgcagtgtttcttggttacatcttcacaagttatgatatagactgggtgaggcagatgcctgaacagtgacttgagtggattggatggatttttcctggagaggggagtacggaatacaatgagaagttcaagggcaggggccacactgagtgtaagacaagtcctccagcacagccaatatggagctcactaggctgacatctgaggactctgcttgtctatttctgtgctaaagggaactactataggcgctaactttgacttgtggggccacaggaccaaggac

SEQ ID NO: 681506 - DNA, 1226 bp, Homo sapiens
  misc_feature (431)..(431): n is a, c, g, or t
gtgagtcaggcgttagggtgcgccaggaggtgggcgtgcagtgacggctgggtcgtgcaggacgccagtagctggagtcaagagctcgagccaggtggtgcccgggatgagattcgggagtagtgcaggcggtcgtcgtgatggtcgcgcgacgcattgcgtgcgcggcagcctgcgttgagggctcgcgagtgcgctgggaagcgtcgcccgtgatcactgagggctccttgggggcaggccctgggccctggaaccgtgctccgtgaggtcgctatgccagggggctagcacgctcaggcttgggcttctcgtggaaccaacgtcaaggattcccaatcccatcttgtagcggcttcctgtacccacgggaatagagagaccgagcccagagagcggggaattcttaaggtcccattattgctttgctngaggcgaacttggttcaagaaggggctcgagcctccagcgcaagcggggaattcaacgggtggttcctgcattaacgcccgattccgggtggccttcgaagcagcacaccaagacagggaacaacagggtatgtcgtataagcatgagagccttggggtagggaaggtgcttggttgagtcccccgtttttactctacggacgcggagagggtgaaaatcggaagttcgcgcgcactaacgggaaaagttgaaggctggctttcgttgcgcaagtactttgaggtgcgcatgcggagggaagcccgaaccatttggaagcgtagaggggggactcctttccaaaaggtggagagacccttgccgtgggggagtccccattctagtgggcgcttccgtagcaccaacaagaagattgtcgcgccacatagaggctgcaaagttcattggaagcagaatgagggggatgagcttagagcaggcacactttatgcgccacaagcaaaagggccccaagttgtaagtgtgtccgcctggattgagtggggcctgtggggaaccaatgtcgcctgtgggggaccacacttgtggaatttgagagaccattatggcgcttcgcatgtgggcaccatgtattttacccctccattggttggaaggccgcaccgatgttcgtatgcaagtgtcactttctgtgagtccttatcccatagaagggtgcccagttaccgcttgtgtcgtaacataattggggatgtgaccagacaaatatggacctccaaagtgatgaaaggaaa

SEQ ID NO: 681507 - DNA, 245 bp, Homo sapiens
gagccaccgaacccagccttattctgcttaaatataacgtgttttttgacttcttaattaacttggtcatatactaaatgtgatctcctgtggattaccacatgcattaaaaaatttttcaagctgggcgtagtggcgcacacctgcaatcccaacactttgggaggccaagaagaggaagattgcttgagcccaggagtttgagaccaatctaggcaatgtagtgagaccctgtctctaattta

SEQ ID NO: 681508 - DNA, 1108 bp, Homo sapiens
gaaaattccgcaaacgaaaagaagaccacagggaaaaataaggggcctcccggacaccccaggtccgtgaaagaaacccacggaaggcttaaaaaaaagtgggggaaaaccccctcgttttgaagcaaaagcctctaagaatttttggcgcaatttggaaccaaggacattcctagcccccacaaggaggcgcttcaccccccccttgttgtgaaaaatgggccccccgctaatattccagaggtttcaaatcggccatagagagtccactctctttttaataatcccggctttgaaaaagtggcgcctccctgcccgagttaaccaccagggtttctaaccccccagggcactatggggcccgccccctatactagagtaatatctaagctgtggctttaaaagcttgggcccccaccaaaggtacccaagaccccagtaggaccccaagcccacgatgaagatacccagaagaaccgtttgggcccgcggccgaagaaaaaaggctttcttggcacaaaggggaacgtgtccccaccgaaagaggaccacacctgtgcctttcgaaccacaggaagttaaacaccccgtccacaccacaccttgggtggagaaacacacagaaaaacttctcaacttgggtgggtggaatgccaccacgaacaggtgggatatcccatcgagactctgggttgtctttcttttgccctgccccctggtgtgtctgtaaaatgggggttcccctttacgtgccatttatcaagagggaaagagccaagaacatgggacacgtctttagatcccacacagagaagaacctgccacccacatttctcgcccttctcaacacacagagtgtaacatctgggaaacaccaaagagcgctttggctaagactggtggaagacttatccaggacccaattaccaatgaccagataacgatagagatcccccgtccactggggtggccaatagtcctgggtcctaaatctttggctcgtatccccaaagctcgaaaaggccaagggctaaagaacttgcccctaaactgggttaaaagtaccctgttgaattttctgtacataaaaataattgaaataaaacca

SEQ ID NO: 681509 - DNA, 277 bp, Homo sapiens
tgcctcctcccctgctgtctcaccaccaatgagccttcttgtgaggacaacattagaaatggaactggtttacgagccaagaaacataaaaatttaggtgttcttagccaagcgtggtggctcatgcctgtaatcccagcactctgggaggccgaggtgggtggatcacaaggtcaggagttcaagaccagcctggccaacatggtgaaactctgtctctactaaaactacaaaaacttcactgggcgtggtggtgcgtgccatataatcccagctc

SEQ ID NO: 681510 - DNA, 133 bp, Homo sapiens
aagctcccaacaggaagagagagaacccagcacagaggtcaggactgtagtcaaatagattagcatccaggacagagtccagactaaaggagcgggaaaatcgccataatcacactagggatgatagtaatta

SEQ ID NO: 681511 - DNA, 345 bp, Homo sapiens
gagggaagggcggtggcacctgccatcctaaaaccaatttaaaaatgtgaccagagctgggcaaggtggtctataatcccagcactttgggaggtcaaggtgggtggatccttgaggctaggagttcgagaccagcctggccaacatggcgaaaccctgtctctactgaaaatacaaaaaattacaagctgggcttggggcgcacacctgtaatcccagctacttgggaggctgaggcaggagaatcgcttgaacctgggaggcggttgcagtgagctgggatcacgccactgcactacagcctgggcaacagtacacaactctgtctcaaacaacaacaacaac

SEQ ID NO: 681512 - DNA, 268 bp, Homo sapiens
  misc_feature (7)..(7): n is a, c, g, or t
  misc_feature (35)..(35): n is a, c, g, or t
  misc_feature (52)..(52): n is a, c, g, or t
  misc_feature (80)..(80): n is a, c, g, or t
  misc_feature (174)..(174): n is a, c, g, or t
  misc_feature (237)..(237): n is a, c, g, or t
  misc_feature (246)..(246): n is a, c, g, or t
ggccaancctctgataaccctcctgtagctccaanaaggagggcagttattnaccctccaagccgttccttcctgggttngggggcagctcccggagggctcaggtacccacctttcctgcaggtgtccaggctcctctgcctaccagtggggtggcgaccaatcaccaaggtntgaggggcgggggacctcctgggggctggtcaggcaggtcccccaagcccctcttaatactcnccaataaantctacttcctgtccaaaaaaaa

SEQ ID NO: 681513 - DNA, 265 bp, Homo sapiens
caggactcgtgacattactcctatctgctacccacgcttccttaggctccccacctctggctagcttgagaggaaggacgatggtcaaggtacatgtctcttctcctctgactctgggaatgagatttttctcactcccacaggcttgcactctccttatcggagtgtctccacatgccaaaatcagaggcaagtcagaataaaactcccaaggctgaaacatagagctggcacgtagtacatggtccagtacctgtattacagg

SEQ ID NO: 681514 - DNA, 231 bp, Homo sapiens
  misc_feature (90)..(90): n is a, c, g, or t
  misc_feature (131)..(132): n is a, c, g, or t
  misc_feature (151)..(151): n is a, c, g, or t
  misc_feature (204)..(204): n is a, c, g, or t
gacataataccgctgacaaatgcgcttaatagtttcattccagaaccagcaacactcccaagtgcatacccaacgccataaacgaatttnataacagtctgcattgctatgtcgataagacgcggcatagnntttccaatcccaatcaagnatttagcaattaggtttatgccggcattaataatgtttcctaagttattagcnataccgttgttgatgatcattacgtgt

SEQ ID NO: 681515 - DNA, 500 bp, Homo sapiens
gggcattccagttacagcctccccttgaacccgagttgggagatgctgagagtccaggaccctccctgttactcattcactttctcggttccccactctttcagccgccacgtgagagctcttctaacctctgttcctttctgtgacccccacgtgttaatattgaaaaaaacaaaccaaacctccagctaaggcattgctctaactctaggcagaccattcattagtggagcatgagatgagattgtgtgactgttgatgggatcgacccacgctggtcttggcgatggaagttttcctaagtccaaggcccggttactctggtgattcgtaattcaatacctgggcatttggagtaacctcttggggcacccaaattaggaaggtttagagaatttccctaattaagggggggatttgatctaagcccgttttgggccttaagtgagatttaaatatatggggcccattaacctttttaaaaaaaatggagttccctg

SEQ ID NO: 681516 - DNA, 349 bp, Homo sapiens
tagacagggtctcactatgttgcccaggctggaatgcagtggtgcaatctcggttcactgcagccttgacctctcgggctcaggtgattcacctcagcctcctgagtagctgggaccacaggtgtgtgccaccacacccagctaattttttgtattttttacagagatggggtttcactatgttgcccaggctggtcttgaactcccgagctcaatggatttgcctcccttgcccttccaaagtgctgagattataggcatgagccaccatgcctggcctggaatcttcatttttaacaagtgccccagtagagtgtttgtcgacgcggccgcgaatttagtagtagta

SEQ ID NO: 681517 - DNA, 721 bp, Homo sapiens
agtgcgcacttgggtttatccagcgccccctccccccacgcggggtgttaatgtggtctctttaaaacccccctctatacgagacgtggttttattgggaacccccccctgcttattctcttagacaaagacatgtgttcgttcgggggaagaccacttagaacacatctttcctcgcccacgggcgcccactcgcgtgtgacatgcccgccccagatatttgcgtctatcaccaagagagagtttctttcttttataagtgagagtccctccccacgctttatgagccactctgttatataggagaagattctgccacgccgagtgtgccccatgaagagaccaccgggggtcacacctcaaccctggtggtgaatgcccccgatgttttcacaccaccgaagtgggttcacacgaagataaatgatgagtccccgaggttgtcacacttattgtggacaattttctcttgcgactataatagagggagtgtaggcataattgtctcccacactttttgggacacccacgcagatctacaaaaaactttttcatacgtctatcattttacccacgaatctcccaaggcaagttctattaaaaagcaaggtccccctccacactcgttacatacactatacttcaatgaggacaaacaaaccacctcgtctgatccaccgcccacatcagcccacccttcctattcccatacaataaacga

SEQ ID NO: 681518 - DNA, 329 bp, Homo sapiens
agtgagactgagtcccactctgtctctgtactttaattgatataaatactaacatttttactaagtgctccaggtgatgatcatgcatattaaagttggagagcactttaatttatgtttttaccatctattccaggaagtctgcccagatttctcccttgctccttacctaagtctaaggttctgagggtcagggtcagattcccattgggttctgctgggtgtgctctcccaccggactggggaggccccagggacagatatcttgccctttctttactctcctcaccctaagcccagatgttcctggtactactgagtgtagattc

SEQ ID NO: 681519 - DNA, 645 bp, Homo sapiens
gaaacacccgcgctgtttgtgctccatgcgaaaaagaatataagttcaagtgactcgattctaggagacaacggagagggtgggcactctccatgtctaaacatgaccccttatcacctaataactggccggagccagctgggttatatgcaaggacatcacctgttcaataaaagttaacaaaattgatattccaacatcaccacctatgatacaaatactggggccctactcagtttactcataattgctcgacctcaggggattatagactccttcttcactccgccagttgctgaaatacacactaagggctttttagagctacacgaatctcttaatatatctaatcctccagttttccattgtgaaacctgaatgtgcacccccattcaagcgcctaatagtaaatgtaaaaaaaggcacacatacacgcaattgtgcgtttgtgagatcaaatgttaactaaagattgtgacattgccctcttatgttgggtgaacagtgttgaaacccaggacacaggaagggcctaacaacagcgtttcccgttgagcaacttacccctgtggaacgctgctcccaaagagacacttctccgcaagaaatcacctgaagttaatgtttttaaaaaccacccaaacg

SEQ ID NO: 681520 - DNA, 532 bp, Homo sapiens
cacacacaacctctgcctcccgggatcaagcgatcctcttgcttcagcctctcgagtagctgggattacaggtgcgcactactgcgcccagctagtttttgtattttgccatgttggccaggctggtcttgaactcctgacctcaggtgatccgcccacctcggcctctcaaagtgttgggattataggcatgagccaccgcgcccggcccataatgttttaagaaagtttacgaatgtgtgttgggcctcatgcaaagccatcctgggctgcatgcagcccgcgggctgtgggttggacaagcttgctttgtgccattaaattgttatttgtaattagtgctggaaagtcagggtttgagaggcagacactgctgtctctgaatggaaaggtccacgtgtgggaatgaggaagccttgttcatgagcaccctgacagagcacccatgcctccagcagtgggagggcaggtgtgacgctgccgattccacattgtatctggaatgtttgttttggagatggagtttcgctct

SEQ ID NO: 681521 - DNA, 127 bp, Homo sapiens
cttgcgctgctcgcactgaggatggatgcgtcgcgcccgcgcctgatttcgatctggctgcggtaacggccctgctgtggcggccatcgcatgcccacgatctgcgctggcgcggtgcatcgacttg

SEQ ID NO: 681522 - DNA, 115 bp, Homo sapiens
ggaaggaggggaaatggatagtgaaaagcaatgtggactagccctcgtgtcattcatagatccagttctagagcacagctcgtgtaatactaccagttcctacagggtagaaacc

SEQ ID NO: 681523 - DNA, 777 bp, Homo sapiens
gagcggagtgtgaagagtaaaccttcacatgaagcatagggacgtctccgtggggccgatgcgacggcaggcgaaggcgatggagctctggctcgagggcttggccggacgacggtgacactggtcgcccgcctgctggaactgcagatgaccgaggtccatggacaattatactggcacatacagacggacttgaggcgtggtggttcccctcaccgaccggacgagggcggtgatcaggaggcgggcaatagacgatgagcgggtgggaataggagccaataagcaactgcagccttgcacagaggcaggcgcgtgaggctacgggtgagtgcgaggcctgcagaccggcgacgcgggcccctatcaggccagcggacctgctcgtggggcgcggacggcgacggacccgagtgatcaccacggagagacatacactgagggcccaacagcgtcagtaccagcacgttgcagagtaccaagaagagggaatagtcgcaagaggacatcagggtctgttacgcccactctacaacacaaggaatcaccatgcagtcaacgcaattcatatctactaccgaaagggaagcattttcaccagctataaacacagtgcaagggggacaacaatactgggacactccaatttatggaatttcctgaacaccgcatccacgcaactacaacaatactttgcaacatgcaacgtctgctaacactggaaaccagacgatagaaatatcatacactcagatacatgctaacccaagtaggtga

SEQ ID NO: 681524 - DNA, 174 bp, Homo sapiens
ccctcctatcatgcaactgtggtggtcccccgtcgtcccgggtaggtcaccactaatgatgtccgaacttagttgcgcgacacctcgatcgtggatatgctgcactacaagcccaggaactcctgggtctcaaagcgatccgtcccacgctcagacctcccaaggttgcttggg

SEQ ID NO: 681525 - DNA, 442 bp, Homo sapiens
attggacatttctatcattccacggtttgggctattatgaagaaactatcatgagcatgcatacgtagcaggcctggtcttactaacacaggcctgcctaaaaactgtttcagtagcgactgagtggttcaattaaatattgagaggaaaaaaaaaaaaaaaagaagccagtgcccttatacaaaggctggaatgtaacaaaagcccaccaagagttttgcctaggtttttcctgggccttaaagcatgacgaaataacgaaggcattcttaacaggagccatttagtattaaacgagttttactgggggtctgaagaaactccccaggcctccacagacaagtttattggagatctgaagggactctccaaacctctgtgatttagcaggagacaagatgagggcccccagcacctagacccatttagattaagtgaattt

SEQ ID NO: 681526 - DNA, 787 bp, Homo sapiens
agcggagtgctgaaagctggtttgcgtctacttggtggttaccctgagtctcttgctggcgtcgggtcgcgtttgcgccgccgtctctcgctgtgggttcgcgacccgtctgtggtggcgggccctggccctagttgtgccggtagccgagcaccccgagttccgatctgttgcagtccggaggcaacgggtatgctgctaggaggttggagatgagtatccggtctctctccccgcggcccttcatgcttgtacgctagggccctcgtgtccccggacgctccagagccgtgcccccttgcgcgccgggatgtcctgccgctaggcttgacgcatgcggacccttgtgttcttctgtacccagtagcttacgtgggcgcgagcgtcaggtgttgcagctccccgggaccactggatcccttcagtatagtgaccttatttctagtcatactagttgtagaggacgcttcggaatagcctctacaggcacgcttcattgttgctaaggtgtcagcgtttacattgcgtgtactggagcatctctaaacctggcatacaatggcccctggtatgcccttggcgatcaatacatgaagagaggcctgggcgctgccctggatttatgcctggaggacttcttctaaaccatcgcattctagcttctcaaccgcatgcgcttctgccattaggtatactcttcccccagcaccctggaaacgaccagaatacaagcgaatcccgattccagaacaattcgtgagtgcaagttggaggcgcctggtgcacc

SEQ ID NO: 681527 - DNA, 612 bp, Homo sapiens
  misc_feature (21)..(21): n is a, c, g, or t
  misc_feature (76)..(76): n is a, c, g, or t
  misc_feature (80)..(80): n is a, c, g, or t
  misc_feature (130)..(130): n is a, c, g, or t
  misc_feature (148)..(149): n is a, c, g, or t
  misc_feature (179)..(179): n is a, c, g, or t
  misc_feature (188)..(188): n is a, c, g, or t
  misc_feature (190)..(190): n is a, c, g, or t
  misc_feature (217)..(217): n is a, c, g, or t
  misc_feature (219)..(219): n is a, c, g, or t
  misc_feature (221)..(221): n is a, c, g, or t
  misc_feature (236)..(236): n is a, c, g, or t
  misc_feature (255)..(255): n is a, c, g, or t
  misc_feature (261)..(261): n is a, c, g, or t
  misc_feature (269)..(269): n is a, c, g, or t
  misc_feature (271)..(271): n is a, c, g, or t
  misc_feature (285)..(285): n is a, c, g, or t
  misc_feature (287)..(287): n is a, c, g, or t
  misc_feature (297)..(297): n is a, c, g, or t
  misc_feature (299)..(299): n is a, c, g, or t
  misc_feature (344)..(344): n is a, c, g, or t
  misc_feature (386)..(386): n is a, c, g, or t
  misc_feature (407)..(407): n is a, c, g, or t
  misc_feature (465)..(465): n is a, c, g, or t
  misc_feature (540)..(540): n is a, c, g, or t
  misc_feature (583)..(583): n is a, c, g, or t
cagaatgcctcattgtctganggggagcgtgttgtttctcatactccatccccagagccctctctttcaggcaggnaganacaaagcccttgcgccccactgcactgcgcaacacagcagagacgctggnggggggggccctgggggnngggggctgctaccaaaggggaagaaaaggnttccaaaangncaggcgcccactctaaccctgcggaanancnggccacatgtctgcnttatatccagatgatttantttcancccgggtnancctttcccaaaatntnggtccctggncngttactgttccctctggctgtggccagccacttctctctcatgcntgaccatgagctgttgtgcaggtctcaggcgtccactcggcnaggctaaggtctcgggagcanagatccccagcagcaggagtcacagcaccagttccattcagtggtatcagtgaaaganaaagcaaggaggtgggaaagtaaatattcatccccctgtccatgcaaggtggtaggcaagaggccagcctcccanaaacaaagtgctctagggctacagcaaaaactgaagccagccnagatggggatataacataaccactcccag

SEQ ID NO: 681528 - DNA, 1211 bp, Homo sapiens
ccgcggcgtcgctgagcgtgtgcattactttgtgtttgtccgtgctgttgttcctgcttgtgctggtgcttctctctcggtttcacactttgccttgcgagccgggctgtaaactggtttgcccgctttgtccggcctcttttcccgtttatgtccctggggcacggcccgtttctattcgggggctctttagggtgtgccgctgttcctgggtgcaatttgtcccgtacgtgaattttgacttgtgaactaatatcccgggtttctcacggttacccgggagggaccaagttgccctcctgtgaagaccgctcgcattccagggtaagttttcggagaaacatctcgggagggtacaaaaccctggggatgtgatggttttatccggtcctcaaaggatttcaagttgttaccgcggggagagcttttccccaaaagaaaggcggcccaagatgggatttcaatccgaacccccacattttccgaagggtcttcccgggccacggtatgaggtctgcaaaactcacatgaattccgcgagttttccccctttggttcatatggctaatcacgcatttttgcttacgcaggattgtaagaggaaccttgtgtctggaggcacaggtgttcataaaaatttttgggttcaaacattttgggggtattgggaaactggagccccggggccacggacctgcgtcctcaaaactttttttggggaacctcatatgaggcggcccacaacggtgccggggcccgctcccacggtaaaaggaggctgcacgaccaaaagcaaatttgtgaaatcccctgcaaggtcctatacttttccactcccccacgtccccactgagccgaccgtgaatggttctccaccggagatgctatatttgaaccttggtgaagcctctcggagaccccgtgaggcacagggttccaccttcacgaggcacacagtgtgtttgtcaccggcgggtttctcagggagcacaaaaggtccacccgcctgctttttgagagaattctgggagatgtgcaccgagatgacggttctgtccccacatattttttgtttttttggccggagtggctgagggcctggtggctgcctcctatagaaagtggcacacagactgagaagggccaacattttctgggagcttggcaaggagatccttcccgggcatttaaagagactccaagggttaata

SEQ ID NO: 681529 - DNA, 144 bp, Homo sapiens
ctccagaagggcgactggtgatataggcggagagggtcacttcgatcttctactcctccctttatggcacttgttgagcagtgacccaggagctcctgtaaacagccattgtccttctgcctctggagtaagtgcgcctgggtg

SEQ ID NO: 681530 - DNA, 123 bp, Homo sapiens
actgccgtgcacggtctgactctaggaggactccccacgcaatattctcctattctactcgcgcatcttatatagcttcagaggccagatgtcgttcttcaaaaactatgaaattaagaatga

SEQ ID NO: 681531 - DNA, 1172 bp, Homo sapiens
cccacgcgtccgcagagttctagcagctgggggttcttgggccatgctccgtgtgtggatcaggaatagaatatactgtattctgggagctcctcccagcaggtcacaaagctgtgtgttcatctgatggcccctacatcgtctgtaaacttatagctattactcactagtggctgcctttccggcattactggcttgatctaatcttccttgcatccatctcagctgacaggatcctagttactacatccctactggaacatatgttcatattgacagtcttacttgggagagccagattttctctgtgctcttgagttgttttattcattcaagaaaccttgggccaccgctttgtacatagcaccgtgctaggctctgggatcccaaatggacccttttaactttctgaagatgggaccgtcccctggaggaaagtcattcctgcctaatccatcgagagaaagaggcttacaaaaaactttgcctctgatgctcagccccacccccaaatagcacacaagcttgttaaccccacctcttacaaaatgtttagattctgtaggtgttaaaagcctttctggaagtattgcattctgccgtgtttataggtgttcactttcctccagagctgattaactactgacatgacttggctttctcatccagaaattatggaaacagggtctgtcagtggcaggaggccgtgctgtgtttacttgggatgacacaatgcagttaattgactcttcatactcatgcttgctgctcaccctagaacatgacatataaggccggatattatcatgtgcccatttttttacacacaccttatatatatcacagggggacacggacaacaaaacagggcggaactgtcctctggcagcacagaacattataccacttttttatcccacgacaagaaggagcgttacataaccatgtgttttgtttgacacatagtcccagtgtgcatcacagggagacgaataaccatcctcattagagaacaacatctagttacaccatacgaggcacagaacatgagtggctgtcccacaaataagtgtctacctcggcgaggggcgacacacaaggcggattagcttaagttcggtagccaacaatcactgtaggcaacatacaatcacatgtagtaatcagctgca

SEQ ID NO: 681532 - DNA, 622 bp, Homo sapiens
  misc_feature (484)..(484): n is a, c, g, or t
  misc_feature (555)..(555): n is a, c, g, or t
cacgaatctgtaaattgcgtgggcagtatggccattaaaacaatattggtttttcctatcaatgagtgtggaatggtttaatatttttttgtgttatctctgatttctttcagtagtgttttgtaattcttgttgtagcggtcttttaatttcttggttagctgtactcctagctgtgttattttttgttgctattgtgaatgggattgcattcttgatttgcctctcgtcttggatgttataggtgtgtagaaatgctactgatttttgtacattgattttgtatcctgaaactttgctgtagttgtttatcagctgaaggagcttttggaccaagattatggggttttctagatataaaatcatgtcatctgcaaacaggaatagtttgactgcctctcttcctatttggatgccctttatttctttctcttgcctgatggctctggccagggcttccaatactacgttgaatctgagtgtngagagagggcatccttgtcttgtgctggtttcaaggggaatgcttccaggtttgctcattccatgtgatgnttgtgggttctcgtagatagctctatatttgaggtatgtccttcgtgatagttgttgaggtttacat

SEQ ID NO: 681533 - DNA, 1648 bp, Homo sapiens
tggcaaaaaattcccctttaaaaacccgggggggacccccaaaggggggggggggggtgcgcggggcgcccaagaatacccagggcccggggcgcccaccacactccacaaggccacaaagggggggtgcatgaaaaaagagccccacagacaggggggcgtataaaaaagcgcacaataacatattcaccacaatcgcgcgagagaggggcgccggggagagagagcgacaaggcgcccaaactctataaacacacactgtgggcgtgtgtgcaacaaaacacatacaacaacaaacacaccgagggggcgcctgtgtgggacagagaaaaaggggagagagcaacaaggggccacacagaggagaggcgagagatatccccacaaaagagagcagagagagacaccacaaaagaacccacagcaaacaacagaggagcgacccacaaagcgagaacaaacaaaagagcagaagacgaaacaccaccaagtcaaaatagagagagcaaggagagaaaagcaggaggaaaaggaaataaagcagcacaaaacacacacaaaaaatgaaggagagaaacgaaccgagcaaaaaacaaggagaaggagtgagaacgagcgcagagaaaagaggaaacaagacgcacccacgcagaaaggtgagagcagccagagaggagacgagacgaagcgcaacgcaaccgaaaagacaacggagacaccagcaggaatgaggaacccgtgtagaagacaaaacacgaccacagcgcgcaccacccaagccggatgaacacagaagaggagaaaccaatagagaggaaaacagacgatacacacacagaagaagagagaaccacatcgaagagaacgacccaacaaagaaaaaatagagagaacgaaacataaattcaaacaagagagaaaggagagatccaccaccaacacgaccctgaagaagacaacaaagaaatcaaaagcacaacacaaaaccgaaggaagcaacccagcacgcggaaggcactaaaaaagcgtagagagagagcatagtaaaaaacaccagacgaacggacatgaagtacagacagatagaccaacagaaaaggacgagggaagaacaaaagaagcgagcagaacacaccagggtgccacaaccaccaacaacaacacaacaagacacagccacatacacaagatcccacacgagaaagaagaagaaagaacgagacgcaccagacaagatgagaggataacaaccaaacaaggcaaaaataacacaaacacgaccagacgaaaacgaggtgaacgaaacacaaacacgatgaaacacacaccaagagcacacagcaggacagaacacgagacggcgaggaaaaacgaacacagtacgacgcacgcacaacaatcagagcgcagaggcgagcaacacagcggacgacgcgtaaaacaaacgagcgacaaacaagacgcccacgacaaaaagcagcacagaagagatagccgacaaagaacagcacaaacgagaggacgacaatcacagtagaaagaaacgacgcatcaatacaagcgcacacaagaagagaagacctttagtcgcacacatcacaaggtggtagaaataacagagagataagaacggatgaagggtgcggag

SEQ ID NO: 681534 - DNA, 205 bp, Homo sapiens
caatgctgactattccctcggaataacattactcaacataccgtgtctattgtcctccctccttcgtgttatatctttctcctcctactaatgaagtttagcattcgcttaccatacaacccaacaagttcacttctgagtattatttaaccaagaaaaacgaaaacatgcccacacaaagacttgtacatgaatgttcatatca

SEQ ID NO: 681535 - DNA, 152 bp, Homo sapiens
tgacatgtcgtaaccattctctttccataagcccatcaatacaatttctggtgttgcagatagttagaaggtaaagctagagaagatgagagtgtgtttacggtagaccagaaccaatcaagaagaatacttactatgctagcatagaagag

SEQ ID NO: 681536 - DNA, 676 bp, Homo sapiens
ttcggcacgaggttctattgtatccttggccagaaactgggtgaaaagaataagcagacaatttttggagatactgaggaatttcaagctgtgtacatggagctgcaaaacttggtccctaagtcagcaagaggaacattatctgtcaattctagcgatgggattcaagtgatcattgatgcatacaagttcctttcctcagaagtcatttgtggaaacgggcattgtgagaaggcgttaccattagttacaaatgttactgctagaacggagtgaacggcacaggtgaaaatgggagaaaaagttgcaatatttacattggggatgagggtaaattttgaagtatcatcactgtagataagtgtcccatacaggaatgtgacagctataaaaattatgcctctgtgctttacggaggaaggtgaggttattcttcagtacatcctgagaatgtggatgccaaagccgaggcattccttgaaagcctcaagtgcatgaacggaaagggacatttgagtgcgtgcccgtccagttcaaagaagcgctgtattgtacgacatttgtgatgctgcacagatgaaggttacagttgaagccaaactgctgatttttgtaacaactgctgcttctagagctggggtggttttggagctcttaacggattattgccagagct

SEQ ID NO: 681537 - DNA, 418 bp, Homo sapiens
tagaggacctgcaggttaagggctacccctataatcccagcagtttgggaagctgaggcgggtggatcatgagatcaggagctcaagaccagcctggcaagatggtgaaacccatctctactaaaaatacaaaaataagccaggcgtggtggcgggtgcctggaatcccagctactcaggaggctgaggcagagaattgcttgaacccaggaggtggaggttgcagggagctgagatcgcgccactgcactgaagcctgggcaacagagagatactctgtctcaaaaaaaaaaaaaaaaaggacggtttttccgaaaccaaattccctcttaaatttcccaattttgcagacaccaatgggattttcctctcattccaaaaggaccagaattttcaccacatttagaactatgggggt

SEQ ID NO: 681538 - DNA, 164 bp, Homo sapiens
acgctggtgattatctcttccgctcgctttcctcttcctctttctcttcctcctcctcctcactgctgtgctggtcctctataggtctcctatggggttgacggtgatggtcagggcagagtcgtcccagtcctatctcgttctcccccctggacaaggcaggg

SEQ ID NO: 681539 - DNA, 137 bp, Homo sapiens
  misc_feature (1)..(1): n is a, c, g, or t
nctaaccgtttctgttggctacaaagtcacagttacccgctgaaaagggtttcttagaactgaggccctttgcacatgtctactaccaaagggttgatgtggggctactggaattgacagggggatcatctagagtc

SEQ ID NO: 681540 - DNA, 1001 bp, Homo sapiens
gcgcgttgggtcacacctggaataacatgaatgaaggcaggcccgaggcgcgctgattcatctgaggtctagagtcagtatgactagggccgtgtcaggatggtgacatagtcttatctctataatcagagacggatgagtgagccagacgcgctggcaggtgcgcgtgggtatcaccaggtacctagctaggggcgcctgatgtcatgggacgattgcacttgcaaccctgggacggcagagaggtgaaagttgcacgtctacggtcacagccacccgcaactcaagcgctgggtaagcaataagcagagcactacgcggcacttcaaaacccttgataaaaacaataaagttaggctagggggcctaaacattttaggggccattccccccagtataacacgatgtgaggagaggatacacaagccttttgggatggcctgtgacgtctgaaagggaattcctagagaatcacctgggactacaataataagtaggtgtggatcaccggaactttaaaagaacgtctgggcacaatgggaaagggatcctgctaagacctgcatggtgggggctcacaccgtgtaaagttccgaagcaatagggaggctgcagcacggaggaatgtttgaacccaggcgcgggcggaaccatgtgggccacatggtgaagaccccggttctctacccaacaaaaaaacacaaaattgaccggtgttggaggtgtgcgccccggtgccccagccaatcaacagctaagggggcagattggaacccaggcagcgagagtcgcgtgccctgatggccaccggactcacctggtgagagcagacggttccacacaaggacaactcgggttggtggaaaacgagaaggggcggcaaggaacaacggaaaggaatgcgcatgagatgactgagacggttgatgaagaaacacgcattttgaacaactcggagataggagaccacaggacaacacaacacaacaatgagagataca

SEQ ID NO: 681541 - DNA, 496 bp, Homo sapiens
  misc_feature (28)..(28): n is a, c, g, or t
  misc_feature (47)..(47): n is a, c, g, or t
  misc_feature (50)..(51): n is a, c, g, or t
  misc_feature (60)..(60): n is a, c, g, or t
  misc_feature (75)..(75): n is a, c, g, or t
  misc_feature (77)..(77): n is a, c, g, or t
  misc_feature (112)..(112): n is a, c, g, or t
  misc_feature (151)..(151): n is a, c, g, or t
  misc_feature (204)..(204): n is a, c, g, or t
  misc_feature (206)..(206): n is a, c, g, or t
  misc_feature (210)..(210): n is a, c, g, or t
  misc_feature (213)..(213): n is a, c, g, or t
  misc_feature (350)..(350): n is a, c, g, or t
gaataatttcgtaaggaagatcttgtangtagcacctagtcaggatnaanngctgcgganggccttccatatgcncngttaaaatcataaactcctccgcccccaaataaanatgatccagatttctatagtgtgtatttccttgtttctntaatagttttatagtgcattcctagacactatacattatagtttagtcctgtngntttnctnaccttttaaattaactttattaaggaataatttacatacaataaaatgttattctaagtgtacagtttgatgttgcattcagttcctttaaagttatggaagtattcaggctttctatttcttctcgagtcagtttnggaaaaaatctgtgtctttcaagaaatttgtttcatgtaagttgtcagatttttttgacatcaggttgttaataattttgcattattatggttctgatgtgtctgttatgatgacccctctttcagttctgatacggttttgaggg

SEQ ID NO: 681542 - DNA, 210 bp, Homo sapiens
catggcgagcgcgcgctggacattgacatctaccagtagtaggaataagactatatctctatggcacagaagtatacatttctgtatgtgtctcagacctagatctgcttctgatactctatttctataccgtccaccttgaagatgaagcaaaagaaactcaaacttaaagctacatccgtgatcctgcctgttgctcatggatcattg

SEQ ID NO: 681543 - DNA, 552 bp, Homo sapiens
  misc_feature (68)..(68): n is a, c, g, or t
tgccatggtgactcatatttggctcagaataaatctcttcaaatatttcacagagttcgactcttttntgacacaaaaacactcagcagtgaccctcccctggaaacattttaaggggatgaaacaagcaagaataaggcagggcttccttcaaattgaagaaaattcctcataaggtccccaacccactagaatcaggaagggtcatagagccctgtggcacatattctagtataactaatacccaggtgcccaaaggactcagccttctagagaaaacctacctgctttacctaacagagccctgaccccaccaacggctccagaatacccagcctccggtcctgtaaatcaagacatcatcacctctcgatcaccttctgtacagatgtgggaatacccattgtgccaaaatgccaaaacagagtccctgctctggtctccatgagctgtgacttccctgtgaacctaccctctgtatggctggcttctgaagacccaacaaaacctgtgagtgtttaattacggagggccagcaggaacatttctgcg

SEQ ID NO: 681544 - DNA, 395 bp, Homo sapiens
tgcaacttgcattctgctggtcgtctctagagttcccgggagtggagagagaatgcagcagaagagtgtctctaggtcgaacaggatgagtatctccacgtatgggttggtggtacctgttagtcacatcccggtagattttccgtgtgggcagtgggacgcgagtctgaagctcaggcgtataggctacatgttagatccttggatgtcatcagcctcactgtaggactgtggcatcccaggtatcaaaagctagggaaagggctctggagagagaggggcttccttagttgacctgtatgcttttgaagctctataaagacacaatcttatcccttcaggacgtgtattatcttcgggccagtaagatgtggttccctactttctctctccac

SEQ ID NO: 681545 - DNA, 118 bp, Homo sapiens
ttatttcccttttttgattcagcttatacccgggctgaaaacctccatttatgttcatgccagtgggggtttttttaaatgtctcccttctttttaataaactgttggaaggcttcca

SEQ ID NO: 681546 - DNA, 115 bp, Homo sapiens
  misc_feature (43)..(43): n is a, c, g, or t
agaaattcaggtatgtagccttaaaattattatttagattaangttaattaagaggatatggttattcatttgcaaaaggattagggttagacttgtacaggatatacacattag

SEQ ID NO: 681547 - DNA, 777 bp, Homo sapiens
gcgggtggtggatgaccttgagtccctcaggaacgagatgggggttctctggaggctgagttgccgtttgcgtgtgccctaggaggccgagctctggttggcttcgaactccagtggtcagacctgctcatagtctcagacaatttcttcaggacacgatcctatccgcagaatggtgtggagtgcagcatcatacacttggtcaccgagtccacctagttctggctccgaaggctgctatctctcgctactggagctgagtgagagggttgtcagtgttttgctcctggggtctggcttccggctgcgttatttgcatccttgcgtctgcgatggtgtattccctgggctgctgtcctcactcttcatgcgtcacttggggccattggacaaggttgttactgactatgttcagtggggatgccttgctagaaaggtgcacaaggccggggttttggcactttcatgctttgagcctttgctgggcttttgctattctcaactatcacgatgtgggcgatctgcaatagctgatggcatgctggggaaggctctgacacttttgtgacttcatactttgcaagacttgatgtatgcctcttgtgcctctgcgtttgtcatgccattgagcttagcatataaggcaagaagtagcagatgcgtccatgggtggacaggccttcttgctctttaattcacacagaattattttgcacgacttgtagctcttgtgcggaacaaggttcgagacggaatgatatctaagttgtgcagact

SEQ ID NO: 681548 - DNA, 137 bp, Homo sapiens
tacctcatacagtccataccataacacacacacccgcacacatccatacagtccacaccataacacacacacccgcacacatccatacagtccacaccataacacacacacacccgcacacatccatccagtccaca

SEQ ID NO: 681549 - DNA, 181 bp, Homo sapiens
tctctctgtaggggacgtactctctgtgggggaggcacccatctgccttacgctctctcttgggggacgttctctctttgggggaggcccagctattctgcctgacgctctctctgtgggggacgctctctctttgggggggtggtccgtgcaagctgggcctcccccacagagagagcgt

SEQ ID NO: 681550 - DNA, 279 bp, Homo sapiens
ggaatttgagaccagcctgggcaacattatgagaccccgtctccacagcaaacaaaaaacttagccgggcgtggtagtgagtgcctgtggtcccatctattggggaggcagtggtgagaagattgcttgagcgcaggaggtcaagcctgcagtgagctgcgatcgtgccactgcattccacccttggcaacagagaccctgtatccaaacaaaaaacacacaaaaaaaactttccttagtatctagttatacctattagctaattatcaacataaattt

SEQ ID NO: 681551 - DNA, 241 bp, Homo sapiens
tgggacccccgggggggataatttattgccccaggatttctaacccaccccgggcgacaagggaaagtcttgtttctccaagaaaaataaaatttagccggggggggtcgcatacacccgttttcctatttacttgggaggctagggcgggagatcatttgagctcgggaggttgaggctagctacactgggatcatgccactgcactccagcctgggtgatacagtgagaccttggctca

SEQ ID NO: 681552 - DNA, 243 bp, Homo sapiens
atgtgcttacagaagcctacatggtgtagcctactgcacacctagattatatggaatagccttttgctcctaggctacaaacctgtacagcacgttgctgcactgaatactgtaggcaactggagcccactgttaagtatttgtatatctaaacatagaaaaagtacagtaaaaaacagtgatataatctcatgggaccataccatagtcatatatgtggttccttgttgactgaaacatcgt

SEQ ID NO: 681553 - DNA, 850 bp, Homo sapiens
gttccagagtgggtggccgcccccgtggaccacggggtgtgtgcccccccccacaatggttcaaggggtctaagaagagttagcgccgtatattggggtctattgaaaacgccgctttttgacgctgagagtaattcccgccatatgtggtggtacacgtgtagtttgcaattagtcggatgacggggtagaccgcgcacacctgtatggcccgcgcccgatcattgccgggtctctaaataacgggtttccccggaccacgcacgttgtttcctaaattaatcattgctccttgagtccccaccgttttcccccaattttttggctttttttacaaccacggtcgcctcttcccccccacgacggcttattaccaaagacggcaattccccacatctataataggggggtgaacccaagaaaagtttcttttcttagccccaactacgcacacaaaccctgttcgctctcgcatagattaagaccttctcctccaagatattgtctgtgccacctctccaacacacgtgtcgtcattcacacacaaattcatctgcccggctcactcaaatttcctttctcccgtatcacaatgctcctcccctttacaactattggcggagggacaacttataagaaaaaatatattccgacccggagtcatggaggactttgatgtaaactgaggaattcacccgttgttaccaaaataaagagccatacaatggccatgtttatgacgacgatgttatgcctgcagagcaacgacgcctcgaggttccggcggtataccttatgacgattcacttgctcccgcccccaacaaaaaaaaaataaacaactacataac

SEQ ID NO: 681554 - DNA, 325 bp, Homo sapiens
  misc_feature (53)..(53): n is a, c, g, or t
  misc_feature (62)..(62): n is a, c, g, or t
tctaatccgagcccactgtcccgcttcccgcacgggaagcccccccgttcagnagaccccanctgggcaattcagccttgatctgagtgagctaactgacacaatgaaactgtcaggcatgtttctgcggctctgtctggctcttttctgctttttaacaggtgtcttcagtcagggaggacaggttgactgtggtgagttccaggacaccaaggtctactgcactcgggaatctaacccacactgtagctctgatggccagacatatggcaataaatgtgccttggtgggggccatagtgaaaagtggtggaaagattagccta

SEQ ID NO: 681555 - DNA, 714 bp, Homo sapiens
gctctagaaccgaggatccccaggcaccatttattaaatagggtatcctttccccattgcttgtttttctcaggtttgtcaaagatcagatagttgtagatatgcggcattatttctgagggctctgttctgttccattgatctatatctctgttttggtactagtaccatgctgttttgcttactgtagccttgtagtgtagtttgaagtcaggtagcgtgatgcctccagctttgtccttttggcttaggattgacttggtgatgtaggctcttttttggttccatatgaactttaaagtagttttttccaattctgtgaagaaagtcattggtagcttgatggggatggcattgtatctatttaccttgggcaatatggccattttcacgatattgattcttcctacccatgagcatggaatgttcttccatttcgttgtatccacttttatttcattgagcagtggtttgtagttctccttgaagaggtccttcacatcccttgtaaggtggattcctaggtattttattctctttgaatcaattgtgaatgggagttcactcatgatttggctctctggttggctggtatttgggtataagaatgcttgtgattttggtacaattgatttgaatcctgagactttgctgaagttgctaccagcttgagatttggcttagacaattgcgtttctagaatttaatctgcct

SEQ ID NO: 681556 - DNA, 605 bp, Homo sapiens
tcgaggtcccggtgtgtcctttgtctactatcacatggcgccgactctcagaccttcagatttatgttgacgatctgagacatgtctgtgagaatgttttccacgtccctatagaattgacgagtccagagctatgactgataggaactggtggacacggttaaagtgtgtaggacaccaaaatgaatagagcgaaggtgtgctttgagaaggctctgtaatagaagccaaagaacccagaattcacctctggactggcaatagcaagctaccgtctggacgacttgccgccatcttacaacgccattgaccctctaaggcaagccattcggctgaatcctgacaaccagtaccttaaagtcctcctggctctgaagcttcataagatgcgtgaagaaggtgaagaggaaggtgaaggagagaagttagttgaagaagccttggagaaagccccaggtgtaacagatgtacttcgcagtgcagcccagttttatcgaagaaaagatgagccagacaaagcgattgaactgcttaaaaaggctttagaatacataccaaacaatgcctacctgcattgccacattgggtgctgctatagggcaaaa

SEQ ID NO: 681557 - DNA, 179 bp, Homo sapiens
acttggtgacctcacaatcacgtcggtatgattgggcaccttgcctacctgtaagagaccctaaaacccttggtgccagttggtgggggcccgaaaaacaacccacgggagggaggagatacaatcatttttttagtatttaaggcccatcttaaagacaagctctaattttttttttt

SEQ ID NO: 681558 - DNA, 485 bp, Homo sapiens
agcgggaacctgcacggtggccgggaatagtacgggaccgggtccggcagcgggtcgagtatgccctataaattgaaccaggataacgagtgccccaatgttgtcaagatgcacaatcatacataatctcgtcggtcagcgatgatggacgcgaaaatactgaggaggcccagtccgtggtgctatgttgaatagcagtgttttatccaagtatgaagatcgagattactactttgtcactgcactacactagcaagaatatccagatacagatgagctggtactggatcttagggaaggcagcatcatccgttaaaacagattgggaaagaaagaccttttaacctgaaatctgctaacagtccagcacccagataaagccagagcttggaaagaggcagctctgagatttcgtgtctatgtctgaggagacatcctcttcagaggggcctcacttagcgtggaggaaggaacggaagaggctg

SEQ ID NO: 681559 - DNA, 354 bp, Homo sapiens
tgaggcttctacaagtgctagcgcttggcacatgtcacggtgagaggttacggcagtgggtgtgtgcagagcctggtgggaatggggagacccgtggacagagcttgttcagagtgtcctatgagccagggggaactccatgcagtgcaacttgggccctggatgttgagaagctgggtaacacgtactgagagaacaaaagcttgtgggtcagcaggccccacaaagatgtgaccgcagacaggatcaggacctgggagagaccgagtgtccaggtgactcctatatcacggcggtgagagggcgggtctggggctccagttcaggaatacatagtcagctgcagccactgca

SEQ ID NO: 681560 - DNA, 161 bp, Homo sapiens
ccgatctctagagtgatcccctcccaaggataggaattgcaggctttgggtggcagtataggcatgtgcccaggcagaagcaaatgctagagaaaaactacatgagaggccttgattgtgcacctggaaccaagaaaagacacttccatgtgattcagttt

SEQ ID NO: 681561 - DNA, 693 bp, Homo sapiens
gcaagaccggcaccgtcccggccttccatgctctgcagcacgctgctggtcatcaagatgtacgtgggggccatcatcacgggccaagatgaggctgcggaagaaggccgttgccaaccccgaggatgccctgagacacggaggcccccagtattgcaggagtgaccccgacgtggaacgctgcctcagggcccaccggaacgacatggagaggcatctacacccttccttttcctgggcttcgtctactcctttctgggtcctaacccttttgtcgccatggatgcacttccatggatcttcctcgatgaggccgatgatggcacacaccgtggcctacactggggaagctgagcggcacccagtccgcctccgatgaactacaaccatggacccagcatccccctgcgccatccatggctctgcagatcctctgggaagcggcacgccacctgatgaccagacagctgatgcctccttggacaccagaccatgggacaaagagccgacgagggcatataccctgggggacctctgatgttcccttccacaattagtgagaggcacccttgagatcctgggtaccctggcagactgctgccgcgtgtagcgtctctgggaccacaatggcgcctgtgtgtgtgcccatcatgatgtgtatctgtactgcgagtgcgtatgctacttaagccc

SEQ ID NO: 681562 - DNA, 216 bp, Homo sapiens
tccccctggtacgggagtggagtggctccgcagatacctggagaacgggaaggagacgctgcagcgcacggacgcccccaagacgcatatgactcaccacgctgtctctgaccatgaggccacccgtgaggtgctgggccctgacgcttctacccgtgcggagatcacacgtgaccgtggcagcggggcatgggggaggaccgagacccagggaca

SEQ ID NO: 681563 - DNA, 199 bp, Homo sapiens
aatttgttctataccacataatttgtctctagcttgggtaagtccctttctcttaagtgcctgtttcctcatctgtaaaataggggcagtcattatctatctcatgcaccaatacactatgtgcatctatacaactgtgagggcaccatccatgtcacctatgcgcaatgcaggacctactgtgtgatctatggcctga

SEQ ID NO: 681564 - DNA, 184 bp, Homo sapiens
gcagatcgagtcatccacgccactcctagtcctaggcatgagtacaggccactcagcattatctcacccttatgcttatgaagccctagaactgggatcacatgagatatccggatagtggaactgcccagtgattcacaccccttagtactcgggtttctggatcccctcgggcatatcgact

SEQ ID NO: 681565 - DNA, 301 bp, Homo sapiens
  misc_feature (44)..(44): n is a, c, g, or t
  misc_feature (196)..(196): n is a, c, g, or t
gagattttgatctatgttatacagtaaccacaacaaataggtanagcacagaattgattaaaaatatgaagtcagccagttgtggtggctcacacctgtaataccagcactttgggaggctgaggcaggcagatcacctgaggtcaggagttcaaaagcagcctggccaacatggtgaaaccccatctctactaanaatacaaaaattttcccatgcgcagtgatatgtgcatataatcccagctactcaggaggctgacacagaagaatcacttgaacccgggaggcggagttgtaatga

SEQ ID NO: 681566 - DNA, 83 bp, Homo sapiens
gtgggaacaaaacaatagatcgttttttgtttaaaatctcttcttcctcaggagtcagcttggctcccttctgtcgtcttctc

SEQ ID NO: 681567 - DNA, 175 bp, Homo sapiens
ccctgattgcagccggctgagctcacccagtgagcctacattcctaccttctcccattcccagcctgatgtaaccttcaacgtctctggtccctgtaggccaccgctcagcttcccagcatcttttgtaggtgggtactactagggtaagacagatctttccatcatgagggtgc

SEQ ID NO: 681568 - DNA, 133 bp, Homo sapiens
tcacccggacctgctattatcggcacctatctttcctagcctccctatcttgcaaagggtgccgatagaatagcgaagagtgcgatgactagcgcaggtgccgatgacatagcgaggtgccgatgaatagcga

SEQ ID NO: 681569 - DNA, 141 bp, Homo sapiens
gtataaacataaattggatttcctgttttaattccaggggaagtactgttgggaaagctattattagggtaatggtttaccaattactggttttccctttccagtcataccctaatgatcccagcaagataatgtcctgtc

SEQ ID NO: 681570 - DNA, 392 bp, Homo sapiens
  misc_feature (392)..(392): n is a, c, g, or t
tacctatggctgcaggattggatattcttctccgcttacactctctgaccagtccagccaaaaaaaaaaaaaaaaaaaaaaaaaaaaacttgtgtgggcgccgcgctttcggcgcccttcggaagaaactgttttttaagaaccatatccggttgggcgcgcgcgggggcgcccaagtagggtaatggtggaacttgggccatataagtgtggtttccctaaggaaaactcctggggccacgtggactaaggtggcgggggttctcccaaccaataaaaaaaacgccgccgggggggcaaccggacgcggttctggaccaaactcccaggaggggaggtcggaggggccataacggggactctactcaaccgggagcccagcggagcccggn

SEQ ID NO: 681571 - DNA, 882 bp, Homo sapiens
tatagagtgcacagccaccatgcccagctaatttatgtattgtttgcatagacaggacttcctcatgtggtccacggctggtctcgaactcctgggctcaagcagtctgcccgcctgagcctcccaaagttctgggattacaggtgtgaaccaccatgtccccgcgtggcccttctttacttagctatatattatccttactaagagttaggttccctagcccatcagaaagattcccaggctggctacttcgggatgacccttgcgattttgtatttgaaactcatttctgaatcttgggtccccagtagctgttaagacataggaactatatctgtgttgcagctttgcacttcgcaagttataagaagaatatgcctggcgtgtgttaggcactcagaaaatgttcgaacgtgaaccaatggtgtgtgtgtctctggacactctaagttagtgtaaatcagaacaggctggttgttgcgtgcttgtttggatgccaagaccaagagagtgattgataaatgtgctaagtattttctgtggtcttaaggtatgttgggtgtaacagtaagtgtggcatacacagcatagttaaatggcccttcattcttcagacaagaaatgcacaagggccaacgatgtcagggccgtttgaacttcactggggagaccatggacagttctgtcctcagggctagacggccccggggaacgggggtgccccttggtcaccgggtgataagctaggaacagaaggttcgtgcgataggaaatcagagcacggcgaacggtgccaggtggctcccgaacagaagggcttgcagcgacaggtcccggggaagctcccaaactgacgcggaaccaaatgtcacatccgctaga

SEQ ID NO: 681572 - DNA, 391 bp, Homo sapiens
tgctaatttttgtacttttagtagaggtgggttcagcatgttgggcaggttagtctcgaactcctggactcaaaatatctacccaccttggctaggattacaggcttgagccaccgtcctgggcaagattggcactcttttttttttggagatggagtctcgctcttgtccctcaggctggatggagtgcaggggtgggatctcagctcattgtgcaagctcctgcctctgtgggttcatgccattctcctacctcaggctcccgattagttgggactacgggcaccctgccaccatgcccggctgatttttgtgtattttgtggtagagacggggtttcaccatgttggccaggcgggtctcgaagtcccgacctcaggtgatcctgccg

SEQ ID NO: 681573 - DNA, 312 bp, Homo sapiens
  misc_feature (262)..(262): n is a, c, g, or t
  misc_feature (279)..(279): n is a, c, g, or t
agacctaatcatagtcaactctgtctccagtgtgctagctaaacctctcgcggttcctaaatgactactccaccgaatattttatatctacattctgaggtctcaactgagtgagacaactcactatttccgcgtaagtcacagtgccccacttcctgcctggactactgaccgccgtctacataattgattccggctacacccggggagacgatgaaatatccaagtgtgatcttccgctcccactgctctgaacgtcctncgatcggtcattcgcanctgaccagcggtgacaattcactggactgctgg

SEQ ID NO: 681574 - DNA, 247 bp, Homo sapiens
ctttgggtcactcgcttaaatgcccattatctcgtctcctttttttgtcaaccttgtatccagtaagtaccaagtcctcattttgtccgggaagacttttgaattactttcaatgatgcagtcatttttctctatcaccctgcctcttttccctctaatgtttctagatttgcttccagacatgcaatccttgagttttcactacttgtctacatgcgggatacccgacgctcgatcattcgctaat

SEQ ID NO: 681575 - DNA, 143 bp, Homo sapiens
  misc_feature (52)..(52): n is a, c, g, or t
atcacccagccggacagcggagggttcggagagaaattgctaaagcccttancaaaagctttacgatgcactcactcaccattcatatggaatctccagttgaccattaccccgactgccttttctgtgaagacccggcgttc

SEQ ID NO: 681576 - DNA, 611 bp, Homo sapiens
  misc_feature (445)..(445): n is a, c, g, or t
  misc_feature (594)..(594): n is a, c, g, or t
aaagcttgatgcgtgtaggtgtatcgactctgatctcgccgtaaaattaccggcggatagtgttgtcgatataatgcaagcctcgcgcggcgcttgctactcattgggtttaccacggtgtggcatgggtttgctgatatgcttatttgcatgctttgcatgcgaaggatgccagagataaacggcacacaggaatattactgtggctgtacagactccaccttctgcgggcgttcaggaattcctggcatggagtgaacatgagcaacgccatgatggcatcccagaaacactcgacggcagagtgacacctttctggctcacaagtggcacacagtcctgtgctttcctacaacctgcccttgcttgggtctggctccaggccttactacagggccgggatgctcaggaccccatgaagcatggcattgtttgggcagcacanacacaacgttcacctgggtcctggcaccttttctcggcagcgctgctttggtaaatatttggctggctcacccaggagaggaccacaggacctctttacccatatcccaacaatcccagttccacaaagatgggctagagtgtgctggngacaggcacagaagaat

SEQ ID NO: 681577 - DNA, 213 bp, Homo sapiens
ctacaggaccccggaaatgtgtggtgttatgaacatctagaagttgagttcaaaattcagaaggtgtcacccatccagtgtctgttactgcagaagctataccttcttcggctctagaaatattttatggacctgacggtctacctcttccacctagactgattactatagaggagatagtagaggatattccatccataacaccacacaatt

SEQ ID NO: 681578 - DNA, 456 bp, Homo sapiens
  misc_feature (8)..(8): n is a, c, g, or t
  misc_feature (33)..(33): n is a, c, g, or t
  misc_feature (159)..(159): n is a, c, g, or t
  misc_feature (210)..(210): n is a, c, g, or t
  misc_feature (263)..(264): n is a, c, g, or t
atttaatntactcattatagtattttggctttnagcccaataatttggtataagtgctttccacttgggccttaaacacagcaagaataggccccagcaccggttcatggcccacttgcccgcacttgcagaaggataaggccatcaccctccgtggantggttttcggccaccacatccaccttctgaaggtggcccagacacctccangctgctgactgcacttcccatcaaaagggactccttggggcagagtgggccgnncccctacccccgaggaaggcaccctcctgggcggggacagaccttggctccatgctgccaagtcaaggtgctggcgtggaaacaggcacatgtggaacaccacatcccactgtccaaggtggagtccacccctcctcggagcactcagcccaccagggtccaagcagccctcgggagataccacgcggccgc

SEQ ID NO: 681579 - DNA, 380 bp, Homo sapiens
  misc_feature (134)..(134): n is a, c, g, or t
  misc_feature (187)..(188): n is a, c, g, or t
tatagtaaggagaggttttagtattggttttaggtttattggtttgtattgtaagaagggaaaggttattatcttttgtggatggggtcttggttatcatatttactttttgaaggtggcccagacacctccangctgctgactgcacttcccatcaaaagggactccttggggcagagtgggccgnncccctacccccgaggaaggcaccctcctgggcggggacagaccttggctccatgctgccaagtcaaggtgctggcgtggaaacaggcacatgtggaacaccacatcccactgtccaaggtggagtccacccctcctcggagcactcagcccaccagggtccaagcagccctcgggagataccacgcggccgc

SEQ ID NO: 681580 - DNA, 1026 bp, Homo sapiens
agcgggtgtgacaggaaggttaagcacgccagcaactcttggttagtgattgtctttctcatcctcatggtggccaggcaggggttagagttggtttggtcgaaaaaggacttgagcggtagatgtgtcgtaggtctgtgctcttcgtcgttggctctggtagaacattatgggcatcgcaagaatggtctcaataaccggaaaaagctgtgtcgcgctggacaataggttcgttcatgtctggccagtttcgaatagctgatcttatggctctatcaatgggtttgtgacatatctctgttggactctctgtcatggcggaacttcgtagatcctgacgtatgtgagtgtagatgcgcatgtaacatgaagacacatgactcccgaggcgagtgtcaagagaagagccatggcggagaaaacctgcactcctcatgggctgtgtagaacgttggagttccactcgggctcgtggaatcttagggctagtcaatctctgggcagtttaccgtatatggtaggaaccttgatgtctgtgtactaagtcgtcatggtggccaaggttgaccgtgcccaaatttcacgtccgaggcgagattaggctcctctgatttatcttccgcatgtagagttgctggcactctcgtatatgcccgtcatgacattttaattgtgcatggttgcctgtgaataaattgtctatgctaattgggagtaacaaggtctttgtggaggtagaagaccacatggtccagtcacttgccttgaagaaacaggatatcatttaaaaagtagtcatggaggaaggacattgcaaagctggacgtaagtactgtcattactggatggtgttagttgaaactgggagatgctgggggatggagagagagaaagtggggaaagtgagatcgtagagaaaagaacctggaaattaaattgtgaagatcgcagtttggacatctggcgtgtgatagggatgctgaacaaagagggatgcacatgggcattgttgtaagcttaagattt

SEQ ID NO: 681581 - DNA, 256 bp, Homo sapiens
  misc_feature (58)..(58): n is a, c, g, or t
  misc_feature (92)..(93): n is a, c, g, or t
  misc_feature (114)..(114): n is a, c, g, or t
  misc_feature (121)..(122): n is a, c, g, or t
ctcgtagagcgacagaccagaaggtgcagagtacataaatcctggtgaaagactcatnagaagaaggagtggtattcatataatttgggctnngggatggcaaagcgttaaatnaatccannagtgtgggcgtggatccccacaatggcgcactcttatgctttgcggtagttgattatcgctcagcgctcccattgaagtaggataatgtatgttaaataagtttgtggtagagagaccattaatggtgaagatc

SEQ ID NO: 681582 - DNA, 1469 bp, Homo sapiens
ggacaaagtcatgtgaccgaaaccccatcgccgacggcgccgggttcgcgatcaaggaggaggagcgatgtggtggccggttggagactggatatgggatgcacggttctagcagcaaagcaactggcgtctgtcggtcgatccgtacagcggactcagtccactattgtatacgtcctgtaaaatgatcacacatctatgctcacgcatgactgtgggagcatgtctgatgcggagcttgcatgaacgtaaaatggaggagactgacatatttcgcacgagttgagtagggtactactagttcaaactgtgcattgaatgagcagtcggagtattcctcttccctaccaaatcaaattgagcgtggctaccgtgtagtgactacttgcattggcgatgctacgtgggccacagctgccacaggtcgtttccatcgaaccaatgggaggcaacagtccttgggggtggtgcacatttgtcacggggtagattagttggcccctgagtgttctccagtgcagtcactcatgttggctgctctcattcatggatggcgccctcaatgatatccgttgggtgcgcggtgtgtgtaaaatcaagctgaactagactgctaggtgatcgaaatcacgaaggaatcccccaaggactcaactctcatgcaatgttgacccatcacatgccaagcgatcccgtaatgctggactaacatatagccccctccctttggcgacgcaacggggatcaaacttgcacctgaactggtcctagggggttagatcgcgtggaaacccgaaggttacacaggtccccaagcaatattcccaattggcattatgccactttgtgcaattcccaatgtaagtggatccaagatgttgcctaggcgcacccacttcgctgggacataaggcttgtgcggttgcaacggaggttgggcccgaacgggtcgcatcgtccccacgaacaacattcatgcacccttgggcattgttagctagggctagctggctcaagagcctgggttgtcagcaatgggttcaaacgccttggacactggaactggggaaacgactcaccatgggcgatggcgcgcttctacagtaggctcccccaagtgcgcaaccgggcataaggtcagcctgggaccttgacgatgggcgggcgtagaacagaccatggcccaacgaacagaacgcgagcgacggagacaaaggcgggacgaaaacaaccggcagttcagaagggcccgccccacaagacgaccacccaggaaccaaacatgaagccccaagggatgggacgccgccggaacgacggaacaacagaaaaaccaggactactaacactaagacgccgggcgcgtgacaggccacacaaacacacctgatgcaccacaactcgagagaacaaacacatggcaccaaccaacaagcagaggcaccagtgccaaaggcccaccggagaac

SEQ ID NO: 681583 - DNA, 554 bp, Homo sapiens
  misc_feature (192)..(192): n is a, c, g, or t
agcgggagcgcgggagaccggacccgagagcagagctgctgtttcggcgcgggtcggctggcggccgactgccccagagctcatcgcatcagagtagtgtccggccaagcagcgagcctagatcgagacgactctcctcactcggtgtgaccagatgctcgatcaggggtctggatcctactctggggcatnttccagacgattggtcttctgtctaccaatcacgtgttcctcacaaaagcgagagtcggacgagacagtctctgccaagcccagtcactggtgagctccccggtctccagatgcagacatggactctgggcccgcgccggctctgggtgcatgtgcgtgtgcgtgtgtttgctgcgtggtgtcagggataggtggatccgttgaggaacaatattagttcctattaatctcatctccccaagaaggcctcacttccactcgttatccgccgggggctcagttttcccaactaatgaagccgaacctctaaatgcaccgcccccagggtcacaagctcctgaaatacctgttgcatgagagcg

SEQ ID NO: 681584 - DNA, 110 bp, Homo sapiens
cgaggcgagtatagctgtttctgagtgtaaaagacggcgagtatagcatgtttctgattgtaaacaggacggcgagtagatagctgattgctgattgtaaaaggacggtg

SEQ ID NO: 681585 - DNA, 567 bp, Homo sapiens
ggcgtactagtggcagagctgtcctagagtaacctgcgtaatcctgtaatgctcacaactgaagtatatatattgagataactatgattaataagtcagcactattaaagaaatcccaattgacaatttactcagtacatggagattgaaaaattcaaattctagggactttggagtgcctagctagtaccagggagggcagtggtaaccttgccttccaaaactttggagctgtgcatttggattggtctggtggtgcccaagcgatgggtgaagacacttaccttagttttagccatctcagcagaagtggcttcccctggtagtatacatcagaagatttaaaaaggcaagaaagacactccctgttcccctttttggagccagacattaaaaaaaaatcttttccaggtcactggctgatcacagaaaaaatggaataggccaggcacagtggctcacacatgtaatcccaacactttgggaggtcaagatgggcagatcgcttgaggtcgggagttcaagaccagcctgggcaacacagtgaaaccctgtctctactaaaaa

SEQ ID NO: 681586 - DNA, 221 bp, Homo sapiens
gggagtacggaatatttcactcagaggaagagctatgaatcatgctagactgctagcctgttgagggcaggcatactcctccatctgtgtagtattcagcatgggtcagaaggtaactcaagcgcagattgaaatttctgtggtggagaaggaggatgtgacctgggcactgtgtgtctgaaacccgtgtatacgtactatattacttatttctggtacaa

SEQ ID NO: 681587 - DNA, 296 bp, Homo sapiens
aatggttgggcgggaatagagggaagagatgatgtaggtatcaggagtagttcaagaggatgcagatgccatttgattttgcaaatatttaaatgaaaagtgtgttagcaaacggtgagaatttgttcagtctgagcattaatcttaatccactcattcttggtatttgacaggctgtgtaattgctctaaagcctattatcttccctagtagttggtgcagtgtcattaggatacctcaaatgaaaggctaaattctcctatatacacagttttacataattacagacttttttt

SEQ ID NO: 681588 - DNA, 1324 bp, Homo sapiens
  misc_feature (1)..(1): n is a, c, g, or t
nagtggtgctttggtggaactgcctggtgaagaacgggtgttgtttgttaagacaccagagtgacaaatacctgtgtgctgtaagaggaggcgccacaatgtttcgccagctgtctgagaagaggcggtgcgtgtgctcatgtccggcttgtttgtgtactcgcccgacaagggtgttgttgccccccaggaaacggtgagtatgtaatggtgctctgccccctaatagagagggcgtgtactattgtagtaaacgccacttcgtctgttcatcgtgggattattgctgtgtcaagaaccttgggggtttcccgctggggaaccacacaaagaaccacgtgtttttgtagggggggtgtttccccacatgatgtggaacgactttgtctacttccacgtgagtatggtatgcccgcataaggcagcaaagatttttcgctgcagaagagttcacgacagtaatgtgtcttgttcccacgccgacagcgcgagagcgttttcgtagcgggatataatatatagtggggtcatattataggggcaatgtgtagtattttcattagcgtgagcataatatatcgctgctagatattgtgtgtttttaaatatagggcgatagcgcaccgcgcccccactatctctagtgtggaaatttctctcgggtgatgtttaacgacccgcgtgatagatatatttggcgctctttatatgatatagcgaaaataagagagagagatatgccccacccaaaatatctcccccctgtgtgtgaaataaagggagagatttataagccgttctcgacactctttcttctcggggtgttcttcgagctctgtagcgaaaaaagagaggggagaaaaatatatgcgctccagaaacttcgatattggttcacgataaatgcacacataagtctgttacatgccacagaatatacacgagaaaaataccgcacacctcacgaggagaactcccatggagtcttcccggagggcactggcacctatacccccacggggacacacgagagtcacggcagtccccacaaacctctctcaagagggccacgcaccacaccctaacctgtcgaagccaattctcaagagtctcctcagtagtgtccaccccacaaaccccactccacgcacgttctcttcaccccaaggtacacaataatcctgggggcccactgagacttttaattttccccgaaatagtagaatgtacccaaggagtcacattagattgtttgtaaagaattttttttttaatccctaactggggacacaatttttagataaaatttaatcacccaaggtta

SEQ ID NO: 681589 - DNA, 314 bp, Homo sapiens
  misc_feature (145)..(145): n is a, c, g, or t
  misc_feature (252)..(252): n is a, c, g, or t
  misc_feature (267)..(267): n is a, c, g, or t
  misc_feature (284)..(284): n is a, c, g, or t
  misc_feature (298)..(298): n is a, c, g, or t
gttaatatacggacgccctttcctcttacaaaacaggcccccttctaactctcagctaggagaatacctcccaacagtctccctcatgagctatctcctctgccaacaagccgaccagggcctcccaaaaccccacgaaggggtnctccaatcccaaataggacttgctctccaattccaaaaggactcttttaaggcaggcagtggacactttcaaaaccattcgagggtttaggatcttccttcacttgncgaggaaggggcggnctgttgtatctttttangaagaagggagtgntggttttctattaact

SEQ ID NO: 681590 - DNA, 205 bp, Homo sapiens
cctggctctgaacttaggcaggagtttgagactagcctggcagcatggtgaaaccctgtctgtactaaaaatacagaaaattagccaggtgtggtgggggtacgcctgtagtcttagctaactcgggaggctgaggcatgagaatcgcttgaacccgggaggcttcttcacctaagttcagagcaggcctaagttcagagccagg

SEQ ID NO: 681591 - DNA, 105 bp, Homo sapiens
cggcacgaggggaagtgaggccccagccccacaacccctccccgcccacccctggtcccctgtccctggggctgtttgttaaaaaagagtaataaaagggtttta

SEQ ID NO: 681592 - DNA, 240 bp, Homo sapiens
  misc_feature (169)..(169): n is a, c, g, or t
gtacagcgatatgtacatgggtattcatgccatatatttgtagtggcaggaagttggtgacagcctgtgtgttccacatatcagtctgaatgtagataagtaaacatttgtagagtgctcactactacgcttttctacgtgctacacatatcaacactgccacacactngggagcttgaacacaacacgaaatttattctctatacacttctagtttaaacatcaaacgctagcagcagc

SEQ ID NO: 681593 - DNA, 80 bp, Homo sapiens
aagacagcagcatatatctctgcagcgttgaagatcggggggagacccagtacttcgggccaggcacgcggctcctggtg

SEQ ID NO: 681594 - DNA, 1067 bp, Homo sapiens
gtctctactaaaaatacaaaaattaaccaggcatggtggcgggtgcctgtagtctcaactactcaggaggctgaggcaggagaatcaaggaggtggaggttgcagtgagctgagatcgcaccactgcactccagcctgggtgacacagcaagactccatctatagaaaaaaaaaaaaaaaattccttgaagatctggtccattctgggaatctagaactatctgacgggactgagaaaaagccatccatccattccctgagctctgcagtgtccgctcctcacatgtccttgaggcatttcctggaggttgcttctctggagttgggggctgatgtaatgggtttttccgggctctacgggcttggctatttctaagaaaacacctttagcaagtaacagcctttgggccatgcatggtggctcacgcgtgtaatcccagcacttagggaggccaaggcgggcagatcacgaggtcacagagattgagaccatcctgggccaacattggtgaaaccccgtctctactaaagaataccacaaattagccgggtatgggggtaatgtgcttgccaatcctagctactcagaaaggctgaggcaggcagcaatggcgttgaacctggcaggccagaggttgcagtgagccaacgatcacgccaattggcactccagccttggatgacagagggagaactctgtgtctccacagatacacacaaaaataactaagataaaggtgccccagctttacggggattaacactcctcagggaatactgtgcacacacagcgagtagaagacgctctataaataccacagtctacgcgattactaatatggggagcccacccgcgcccgtgatcaaaagcggggcccgcggtgaagtgaacaaaaaccggttggtcccgagggctgacaccacattttaagagaaaaattaggccagcgcaaacttggctcatatttcacacttgggcatatagacagtcttttttacaatgcgcagtataccacttggatataccaccacatgtcgcagcgtggtgttaaagcgaagaagggtta

SEQ ID NO: 681595 - DNA, 815 bp, Homo sapiens
gtgtgagctgcttctcctgctccagcatgcaacagcaagctcaccctgaagaacaagtttgtggagttcgacatgaagcccgtgtgtaaggaggtgctacgacgaatgttccctgctgtgagctgaagacagcggcgtgaagaagctgtctggagctgacctcctcgcaatggcccatgccacaggggccatcaggactctgcaactcatggcgctggaagggcccctgcttatgtcgtcacgcttgaccatcatcgagacacccatacgcgaaccatatccgtgcgcctctactcacggcgtggtacgcacttgactatgggacacgcaccgtacagaatacctcacagtacacacaccctgctcgcacaccatactctgacaaatccctttaaacgcgacatacacaacattgtcaacttacagtctatacccctgccaatattggccacattatacatcaacacctactcacgttgcatcaacccacgtgcaaactcaatacatgtgacaccctaacccccaaccagttgataaatacatacacaataccatcaccattatgagacccccgcctggcggaccgcatatcctatggcttaccttaggatcgagacgcgcaacgtacggccaaacgcggcaacgcgaccctcgggccgccgcacaagcgctagcgtacatagatcccacttcaacttggaaccacccccccaccagcactaacgtgaacgcacaccccccacatttgctgatcaaacagccatggcatcgccactccccctatgaccactctaccctgcgcctccacccaacgc

SEQ ID NO: 681596 - DNA, 266 bp, Homo sapiens
tcagtctggagaatggtggaggcgagcaggggccggatgccatggttcgacgtgtggagggcgatgacgatagagagagtagatgagcatggctgtccacaggatgtccctgaccagtgcggcatccagggttcctcctcggactcacttagacgggtggaaaatcggcaccagcagtgttactcatgacggccaggattaaacgaactgctgctccagtaaatgacattttgctgtcacattcagtgtaatcacgggtctgagct

SEQ ID NO: 681597 - DNA, 265 bp, Homo sapiens
gttgagtgaaaggaagaaatactgtataccttcgtcttcattccattagtgtcagagactaataaccctttgccttgaaaattggactaacacttcattcattcctacactgttttccccagtccttgctctgctctctggcattgatagcttataactgcaaatcttgattctgccacccacctatctaccatccttcaatgtttccttggaattttcaagataaattttacactcctccataattaggtccctgcaaacatct

SEQ ID NO: 681598 - DNA, 846 bp, Homo sapiens
gctctcctcccatccagcctgctcggggcggaggggggtggggcagggttgtccctgcctctccgccacctccaccgggttatcccctggtggcgggtggcggggcgggggacagtagttgtagacgcccgccctgctcagagaagatcccacattgattgaacaaagactgaacttgtgtttacggataccttttataaaagatgtctgtggagtagtgttacagttcaaataacaacggatttgtgcattatgagatgagtgagagtgcagaatgggacaaaaatggattttgatctctgaatggtggtttaagctcaccagttatggtggtagtctcactattgtgaaaattcatgctgaaaaactgagtgaatatgatcagatttctccaccaaattctcagcctgataaggaaaatcccgtttgtgtcaacctaatgaagcattcaaagaagacatatgactctttcaagatgaccttgaaagattatattaaggtacagaaagcagaggttgagagcaagacttggttcagacacgatgacggggactattgggaaccctgtgggttaccacggagcggtaattccagacccacgtttagatgtttgcccagagaattcccatttgaaaccatcaagaactaccaagaatatggaatattcccaaacagtgaaaaatcggtgcctcagggtacagccttgaagagattggaaagacctctgggcacaggcagtcgccggatgtgtcccaaacacacgccttgacttatcaaacgcactttttggccccgggtcgcaaaagatacattcgaaaggaaacatacggcaagaatatgagacag

SEQ ID NO: 681599 - DNA, 194 bp, Homo sapiens
  misc_feature (153)..(153): n is a, c, g, or t
gtgtctatgctgaacgagcggttcacttgtttccccacagaaaaaggccaaaatttttggaggataatttaaaaactaagccaataaggccaggcatggtggctcatcgctttatcccagcactttgggaggccaaggcgggcagatcacctnaggtcaggagttcgagaccagcctggttcacatggcgaaat

SEQ ID NO: 681600 - DNA, 536 bp, Homo sapiens
  misc_feature (28)..(28): n is a, c, g, or t
  misc_feature (115)..(116): n is a, c, g, or t
  misc_feature (166)..(167): n is a, c, g, or t
  misc_feature (208)..(208): n is a, c, g, or t
  misc_feature (212)..(212): n is a, c, g, or t
  misc_feature (226)..(227): n is a, c, g, or t
  misc_feature (248)..(248): n is a, c, g, or t
  misc_feature (273)..(273): n is a, c, g, or t
  misc_feature (325)..(325): n is a, c, g, or t
  misc_feature (415)..(415): n is a, c, g, or t
ctcgggcctagcaacaaagtgcaagatnctgccccgtggagactcccagaggaagcccccactcaacacccgctcccaggctccgcttctccgatgggtccttacactcagcttnntggtggcgacagttgcatgtagggctttatgcaatgtgaatgcaggcatnntggcatcccagggccatgaactttgtccggtggaaggcctncttnctagagagggaatnnccttggctggcttccttaccngtgggcactgaaggctttcagggcntccagcctcatcactgtgtccctctctctggaaaggaggaaggagcctatgnatcttccccaacgaaaagcacatccaggcaatggctaaacttcagagggggcgaagggatcagcctgccttcagcatctcagttctgcanagagctggaagacacctaatgtggcagctgtctaacctcaaagccctgagtttcagtatcctgttgaacggcatacactttcccgtggccatgaattttacacaacctgaaagatgtgtgt

SEQ ID NO: 681601 - DNA, 225 bp, Homo sapiens
agtcacccgcgtacatcgcgatagcgtaaccggttccgaacggtagctgttgcggttgttgctcagcatgttgccgatcagcaagccggtcagcaggctgctggtggagaagcctgagccgccgccgctggcctgagcgttggccgcttgcgcattggcagcgtcgacctgggattgggtcacctggccttcggcggtcagttcgaaaccgcccaagcgcgggtg

SEQ ID NO: 681602 - DNA, 462 bp, Homo sapiens
ggcattaagacgggtgctcacgctgggcgcaggcgatgacgcgattcagatcgcgatttcgttggcggcgattaccttgctgacaaggaaggaatggttgaagcgcatggcatacaccgcaggcggtgtgagcgtggtgctcggcgggatggcatggttgcatatttgagagctggattttcatcgcccttcggaagcagaaatacggcgtcacgtatcgtcgtatttcgctgatagctatcaccaaaccaaaccgactataaaactcgccatcgctcgcaacctggaaagttgactattgatgggagaaaacgaattcagtcagtgcgtcccggatgccagaagccctgtaacgttgaacacctcactggatgattacttcgcggcagaatgccttcagatcttcgctcaagtggaggacctgtttctctaccagaccagtagcaccaaatacctgactga

SEQ ID NO: 681603 - DNA, 719 bp, Homo sapiens
  misc_feature (717)..(717): n is a, c, g, or t
cgcaaggtgaccatgcagaattatgccctagcataggttaacaaggtctaacacggtggaccttccgcataatgaatggacagcaaatagctatccagggggagccgctgctcacacccctgaagccgaactagctgcctaagaacagctaacggagcccgctgagatatgaggctcagttgaggcaagatagataggaagcggcgacgaacctacccagcctgccggtaggatgatggccacgatggtaccttagttgacatttcaaaggaaccacagaaccatctatatcctctagtgaagttaactggtagctctaagagcatcagctctatggacactatgcaaccacctcgcatagagagagagaaaatgaacacccataggaggcctaaaagcaggcatcaattaagaatgtgtgcacactcacacacactagctagataatgacatacataaagctgtactcttcacacccagttggaccaatctatcaccctatggaagatctaatgtatgtacaagtaaaaagaaaacattctactgcgcataagcctgcgtactagcactgctctgacattttaacagacaataattacaatgaacgcacatggtagtagtaccctcactggaggtgttgcccgggaccccaattcctcatatactgggtgctgtacaattcactggcacgagatttacacgcggggcggggccgtncg

SEQ ID NO: 681604 - DNA, 198 bp, Homo sapiens
tttccagaaaaggtcaagccattgtcctccagcctggaaaacaagagcgaaactctttttaaaaaaaaaaaaaaaaaccacacacacacacaacacattttttccacgcctgtaaccctagaacatggggaggccaaggtggggggtttgttggaggccaggagtccaaggttgaagtgatttttgtttgaacactgt

SEQ ID NO: 681605 - DNA, 674 bp, Homo sapiens
ttgctatttaatagcagacattctgatcaacgcatcatgttatcctaaatctcactgggttttgatacatgacattctggttccctacccccggaaaaacggttgatgcaggtccttatcctacctcatagaggtacatatacgaaaggaccggaagcgttataaaggtgactggagacttcacaccaactgtgcatgctgtggcaaaacttattgctctacttttgtcagtgagggtgcctatatggctgtcccactgcatttatgttcaggagacccacgactagactttcatgattttaaaaactcgcctgaagccaagctctgatctattgaccttaccttgagaccggaagaaaacactgattgctgtagctctcaaagcgcaagtcttattcttgtagtcttcctgatgttcagaacttacacgaaatttgggaatgccatcaacgggcctacaactaattctggccagcctgtggccatggggatctttcttggggctcccagggaaactcccaatctgaggcttttacggaagtaaccctagatatgcgcttgggggcaaacaaacacttggttttatgtcctaggccttttggtgctgcctggaaggtaaaagattctgaaaccccatcttccccggtgccttatttcctaaccacattggaatg

SEQ ID NO: 681606 - DNA, 131 bp, Homo sapiens
gaatggataatttaatgtgcttttagtaggcacaggggtcccaggccaggcctcattttcctttggcctttaaaagtcaaagattgtgtagccatgcccatcagtaaaaaaatttttgagccaacccttta

SEQ ID NO: 681607 - DNA, 404 bp, Homo sapiens
  misc_feature (22)..(22): n is a, c, g, or t
  misc_feature (28)..(28): n is a, c, g, or t
  misc_feature (30)..(30): n is a, c, g, or t
  misc_feature (41)..(41): n is a, c, g, or t
  misc_feature (142)..(142): n is a, c, g, or t
  misc_feature (182)..(182): n is a, c, g, or t
tgccaaggactctttcaagagncccagntnggagagcaggnggatcggggggtgggggggtgttctgagttggccctgtcatggccataatctgtccttcccccatccttcactccccctcttatccctggtggccccggantgagaacgtgactcatccagctccaggcacccagtttcanccttgccccacccctgccccgggcctctcatttgctgtttaccccccaggagcaggtgcacctgggtcacctcaccgcgggaaggagagatataaggctctagggcacagcctgactccacacccacagattgcccaaggccagcacaggggttggagctctctagaaaggtgaggcacttggggagcataaaacagctccaagtgggcccaccaccctgta

SEQ ID NO: 681608 - DNA, 133 bp, Homo sapiens
tcagtgacaatggtactgctactgccacctactgttagaggagcagaagtagacatgaagttgcaaggtcaccttttcaagctaaagcacactcgatagctatgtgcatttatttgtttgttttaggaaagga

SEQ ID NO: 681609 - DNA, 975 bp, Homo sapiens
  misc_feature (251)..(251): n is a, c, g, or t
  misc_feature (419)..(419): n is a, c, g, or t
attgcaagatcctggtcaccgcaggctgggaccactgccattcgcgtgttccactgctcggacgaatgcacgcccatctggaccgtgctggccttccacagcgccgctgttccaagctgctgttggcccgttcgaccagccgtatgtgcttttcgtggactgcgcgtggccccctcagaggtcatccagaccgggaatccagtcccctcgtgggtcgacctcgtacctccactgcgtcgatgcatgtccancccagactctctcgttcctcggggaggacctaggcatgcgcggacgaaggatggtgcggctatcgaggtcgctttaggtcattgaggcctgtggagaagcctcgaacggggctctctgtggagggaccagggctaaggtctgatggcacccaaaggcacctcatgtgnaaggtcaccgcagacgtgactcttgtcgatggcagcgcttggagctgagtgttcccctctgtttgctgtgcagctgcgctctatcacgagaacgcaaacgagttagaacggtgctccgagaggcgtctcaaagcgcaagaaggcccccatagagcactgtaccctgaaagagctctttgactacgcgagcaaccagttccggggatatggagtgcccctttgcttcggaacgtcctagcgcactggcattgcagggcgcttatttcataatcacacttaatcattcctgccccattttggccctcacgagaagttcacacacctaagacagcgttgactaaagtgggcccaagtgacgccacctattgcctcccacccaagctgatctggcgaaatcacctatactaggtacgcacgccataagattatccgagccacacgcagaggcaccggacacatggcagccgccactcggaggttcaagctattgcctgcgagttagcgttcgggacacccctcctccttatgtggcacgttcacccagaacgcaacctac

SEQ ID NO: 681610 - DNA, 853 bp, Homo sapiens
gtggcactgacgaggaaactactaatagtttctgtcggatagttcaagatgataagtaccgtaagaacgtactggatggaaaggataaaaccgtatggatggacgtagtgagtcgaccctgatgctcactggtagtggtcacaatgattgtcatctgatgggccatgcaattgattgattagtaatacgaacatagccattaacatctggacttagctataaagaccatgtggggtggaccacgtcttgcttagctgagaacgaaaacgagtgaggatcgactattataaggcagcagaaatactcttacaactatgatgtcgtaatacgataagtcagttagccatgtatctatctacggtaggccgaatgttcagttactctactcggttccatcgaagattcgtgacttcccatattgtgctcactgtaagattggcctaccttggtagatgtgtcttgattgggcctgtggaaatgctttcgtatgattgatttgtctaaaactaatatataaatatctagttagactatatatataattatggcaatgaatcatatataaacaaaaatgtattataagcaaatattaaaaaaaggcaggaatggttaattgacaattatacacatgaaggtctgtaaccatttttaaccatttatagtgcttatttgcaaaatttgtataacttaggaattatttcagagacaagtgtttttctatgtgtgacaggtgagtagttgccgcgtaatatcattggagtacattctttatagctgtatgtgaaattaagtactagcattatttaagtgtaccaaatagatttgagaaaaacaataaagaaattgcatgcct

SEQ ID NO: 681611 - DNA, 3746 bp, Homo sapiens
cccgcgctgggatggccgccacagctgtaggtgctgctagtgtttagcgctggtctttgccgggcgttgagggcagctcagcctccttgtttgtccggttcgcctgtgcgtggtactcaagggcaccagtattcccgcggtcggcagcatgggtcgggagtcacgccactatcgaaaacgatcggcatcccggggtcgctctggaagtcggtctagaagtcgctcaccctcagacaaaagaagtaaacgtggagatgacagacggtctagaagtagagatagagataggaggagagagaggtctcgtagcagggataaaagaagatctcggtcaagggacaggaagcgtctgagacgttccagaagtagagagagagacagaagccgagagcgaagaagatctcgaagtagagacaggagacgctcaaggagtagaagccggggccggcgatcccgatcctccagtcctggcagcaaaagcaagaaggctgagaacaggtctaggtccaaagagaaagcagaaggtggggacagctccaaggagaagaagaaagacaaggacgacaaggaggacgagaaagagaaggatgctgggaattttgaccagaataagctggaagaagaaatgagaaaacgaaaagaaagggttgaaaaatggcgagaagagcagcgtaaaaaggcgatggagaacataggggagctgaagaaggagatcgaggagatgaagcaggggaagaagtggagcctggaagatgacgacgatgatgaagatgaccctgccgaggctgagaaggaagggaatgaaatggaggacgaggagctggacccattagatgcctacatggaggaagtgaaagaagaggtaaaaaagtttaacatgaggagcgtgaaaggcggcgcaggaaatgagaagaagtccgggccaacggtcacaaaagttgtcactgttgtgacaaccaaaaaagcagttgtggattctgataagaagaaaggtgagctgatggagaatgaccaggatgccatggagtattcttcagaggaggaagaagttgatcttcagacagcccttacagggtatcaaacaaaacagcgaaaacttctagaaccagttgatcatggaaaaattgagtatgagccatttaggaaaaacttctatgttgaagttccagaactagcaaaaatgtctcaagaagaggtaaatgtgtttcgattggaaatggagggcattacagttaaaggaaaaggttgccccaaaccaattaaatcctgggtccagtgtggaatttccatgaagatcttaaattccctcaagaagcatggctatgaaaagcccacgcccatccaaacccaagctattcctgctataatgtctggacgagatttgattggcattgccaaaacaggaagtggaaagaccattgcttttctgttgcccatgtttagacacatcatggatcagaggtcattagaggaaggagaggggccattagctgtcatcatgactcccactcgagaactggctttacagatacctaagggtgtaagaagtttcaagactttgggacttagagtggtctgtgtttacggaggaacaggaatcagtgagcagattgctgagctgaaaagaggtgctgaaattattgtttgcacacctggtcgaatgattgacatgttagccgctaacagtggtcgggtcacaaatcttcgaagagtgacatatgttgttttagatgaagcagacagaatgtttgacatgggttttgaaccccaggtcatgcgcatcgtggataatgttcgtcctgatcgacagacggttatgttttcagctactttcccaagagctatggaagcgttggcccgcaggatcttgagcaagcccattgaagttcaggttggaggccggagtgtggtttgctcagatgtggaacaacaagtgattgtgattgaagaagagaagaaattcttgaaattgctggagcttttaggccattatcaggagtcaggatctgtcattatatttgtggataagcaggaacacgctgatggtcttctgaaggatttaatgagagcatcttatccttgcatgtctcttcatggaggcattgatcaatatgacagagatagcatcataaatgactttaagaatgggacctgcaaacttcttgtggctacctctgttgctgcccgaggtctagatgtgaaacatctgattcttgtagtaaattatagctgccccaaccattatgaggattatgtacacagagcagggcggactggaagagcaggaaacaagggttatgcttatacttttatcacagaggatcaagctcgctatgctggtgacataattaaagctcttgaattgtcggggactgcggtgcctcctgacctagagaaactatggagtgacttcaaagatcagcagaaagctgaaggaaaaataattaaaaagagcagcggcttctctggcaaggggttcaagtttgatgagacagagcaggctttagccaatgagaggaaaaagctacaaaaagctgcccttggcctgcaagattcagatgatgaggatgctgcagttgatattgatgagcaaattgaaagcatgtttaattcaaagaagagagtaaaggatatggctgctcctggaacatcaagtgttcctgctccaactgcaggaaatgctgagaaattagaaattgctaagagattggctcttagaatcaatgcccagaagaatttgggcatcgagtctcaggtagatgtgatgcagcaggccaccaatgcaattcttaggggtggcaccattctggctcccactgtttctgcaaaaaccattgcagaacaacttgctgaaaagatcaatgccaagctcaattatgtgccgttagagaaacaagaagaagagagacaggatggtggacagaatgaatcttttaagagatatgaagaagaattagagatcaatgacttcccacagactgctaggtggaaagttacctctaaggaagctctgcagagaatcagtgaatactctgaagccgcaattacaatcagaggaacctacttccctcctggcaaagaacccaaggaaggcgagcggaagatttacttggcaattgaaagtgccaatgaactggctgtgcagaaagcaaaggcagaaatcaccaggctcataaaagaagagctgatccggctgcaaaattcataccaaccaacaaataaaggaagatacaaagtcttatagacatccggaaaaaagatttttacctgtgctggtctatgatgtatgtggcagttgctgtctgcagtttacaatgtattgtaaatgaagattttttaaattctatcttgctgattttttttaaatataagaaactggtacttggtaaagaaatctgtccgtaagtacccccacaatcagtcaaactatatttaaagccagcctgttttcagagtatgatgtcctttaatgtaaactcaaatatcaatattttaaatgtccggataatattctagaggtttaaaaaatggaaatatttgaactttctattgaagacaataaagtacacaagtcgttaaggggctattcactttatcctgtactttcaatgaaattgtgatcatttcctaagaaaaggtaaaattcactatcatattttgtgtccccaccttgatgttacatgactctggaacaatatgaactggatttaagaatgttataatagaagtcttacaaaatggaaaaa

SEQ ID NO: 681612 - DNA, 249 bp, Homo sapiens
aactactcgcgagccgcatgcatcataatgagaggcacgctgaccactacattcttcctaggaacaacatatgacgcactctcccctgagctctacacaacatattttgtcaccaagaccctactactaacctccctgttcttatgaattcaaacagcatacccccgcctccgctacgaccaactcatacacctgctatgaaaaaacttcctaccactcaccctagcattgctgatatgatatgtctcc

SEQ ID NO: 681613 - DNA, 466 bp, Homo sapiens
catcaaaatctggtgtcctattcatttgaaaaatcagatgtgggctaggtgcatggctcatgcctgtaatccgagcactttgggagcctggggcacaagagtccctcaagctcaggaggcagaagttgcagtgagccgagatcatgctactggaccccagcctgagagacagagagagaactctgtctaaaaaaaaaaaaaagaaagaagggaagaatatacctcccctcaacccaaaccattttctcactaccaacttctatcatagtctatggaattacctgaagttatcaagtaaattaatttctttggttagctactgttgtatccttcttccagagaggttcttttatatcttgccctaaccactgcttggcacatggtaggtacatatctgtatttaatgattaattgagctattctacctctaatatcttaaactctaggatcttgccctgtgatacct

SEQ ID NO: 681614 - DNA, 724 bp, Homo sapiens
aggagttgtgatgatagttggtgcatacatggtgtcctgtggtaactggccaaaagtggttgcatcggcctctaatgtatatgcatgtactaggtgggaggctagtgcgatattatgtaagagagggagggtatcaaacagtgagtacatgcttcatgctatgtttgccaggatgtcatgcaagtggagcaaatcttggtcaactttaacctcctatttccctggttcaagcaatacaccctgtcttagcctcccgagtagcgtgggattacaggcacgaaccaacacgcccagctagttttccgtataacacagtagagacggggttttcaccattgcatgcccagttgaaccacgttccgttgttaaagcaaggggctgtgaagaaggccacagtgaggtatgtgggtgtctcgtggtacgttcatgcggctacatagacctgcattaaatttcaagaccgggggggggatccctcttctggacgctttctctttaagggtctaccttcttacctgtttagaatgacacagatgaattatttacaataatcttgtgtccacagactgaaacaaaacaatacaccctaatcaaaacgtgggggacaaaatgtattggtttgtcctttcatcctgtctgggtatgtgggtgggatggtttcattcttcattaatgtttgttaatccttggtatttgaatactttattattaaatctggtgtcaa

SEQ ID NO: 681615 - DNA, 1093 bp, Homo sapiens
ccgctgtcgcaggctacggtcatggcagatgtcgctcttactgttcgagctccccgcccgtgtgtttgtcggtcgatgtctgtctttttgcgagtgctcttcttgggggtatgttgtactagtcttgctctttctgttgtctctgtttgctctttggcctggggtgctccgaggtgtcatcctgtcgttatggctctccccggggactttgcccgctgtttggagaggtcgggacaagttctctgtgttggctcagcgtctcttcttgcttccgtggcaatgtccaatctgttgcagacggtcccagactgtagtgcgaaaaataaggagggaaggaatatgactgaccatagtcccaggagaaagatttccgggacccttgcatctccgagaacctgatccaattctgtgccattggacgagcgttggcaccaactaccccaaggatatgtgtgatccgcatgtctggtctgaggactcctactatgaggccttagcccaggccccagaaaattgagatggaccaattggaaaaggcccaaaaggagcgaaccaaaattgagtttgtgaccgggcaccccaaaaaggcaccaccgacccacgccacgtccaccacccactagcccctgccacgcacacgctgttgcagaatgctcagaagaggaaagagcacagtgggattcggctattccccgtgaccaccgatatgccccgccccccatcctcacccccaccagccacccctgccacgctgttgtcccggtcaccccccagcgccacgcggctccaagacccaccgtcatttcttgctgtgtggcacccattgtgaagaaggcccagccagtgacctgaggggcccaccctaggacttgaaaggaccgtgcagccccagtgacccctgccccagtgggaggcgccacatttgtatatttcaggactgggacctactcccccagatgcccacctgagaggagcttcttgtttggcattcccagatggaaggaccaggccagcacgggagcccggcgctgtggaccgggtctgtccacgcaccacctggggtctgccgcctattaaaagtgccgtattctta

SEQ ID NO: 681616 - DNA, 1288 bp, Homo sapiens
  misc_feature (1087)..(1087): n is a, c, g, or t
  misc_feature (1105)..(1105): n is a, c, g, or t
  misc_feature (1221)..(1221): n is a, c, g, or t
  misc_feature (1223)..(1224): n is a, c, g, or t
  misc_feature (1226)..(1226): n is a, c, g, or t
  misc_feature (1229)..(1229): n is a, c, g, or t
  misc_feature (1231)..(1231): n is a, c, g, or t
  misc_feature (1234)..(1234): n is a, c, g, or t
  misc_feature (1242)..(1242): n is a, c, g, or t
  misc_feature (1244)..(1244): n is a, c, g, or t
  misc_feature (1246)..(1246): n is a, c, g, or t
  misc_feature (1249)..(1249): n is a, c, g, or t
  misc_feature (1251)..(1251): n is a, c, g, or t
  misc_feature (1259)..(1259): n is a, c, g, or t
  misc_feature (1262)..(1262): n is a, c, g, or t
gacctaggcaggaagtcggcgcgggcggcgcggacagtatctgtgggtacccggagcacggagatctcgccggctttacgttcacctcggtgtctgcagcaccctccgcttcctctcctaggcgacgagacccagtggctagaagttcaccatgtctattctcaagatccatgccagggagatctttgactctcgcgggaatcccactgttgaggttgatctcttcacctcaaaaggtctcttcagagctgctgtgcccagtggtgcttcaactggtatctatgaggccctagagctccgggacaatgataagactcgctatatggggaagggtgtctcaaaggctgttgagcacatcaataaaactattgcgcctgccctggttagcaagaaactgaacgtcacagaacaagagaagattgacaaactgatgatcgagatggatggaacagaaaataaatctaagtttggtgcgaacgccattctgggggtgtcccttgccgtctgcaaagctggtgccgttgagaagggggtccccctgtaccgccacatcgctgacttggctggcaactctgaagtcatcctgccagtcccggcgttcaatgtcatcaatggcggttctcatgctggcaacaagctggccatgcaggagttcatgatcctcccagtcggtgcagcaaacttcagggaagccatgcgcattggagcagaggtttaccacaacctgaagaatgtcatcaaggagaaatatgggaaagatgccaccaatgtgggggatgaaggcgggtttgctcccaacatcctggagaataaagaaggcctggagctgctgaagactgctattgggaaagctggctacactgataaggtggtcatcggcatggacgtagcggcctccgagttcttcaggtctgggaagtatgacctggacttcaggtctcccgatgacccccagcaggtacatctcggcctgaaccagctggctgacctgtaccaagtcccttcattcacacggactacccagtggatgtctatcgacagatcccttgacaggatgactgggagctggcagaagttcacagccagntgcaggaatccaggtagngggggatgatctcacagcgaccaaccaaagaggatcgacaaggccggaaccgagaagtcctgcaatggctcctgctcaagtcaccagatgctccggaacgagttttcaggcgtgcnanngnccngncanggtggggngncnggngnccatcgcnggnagacggaatactaaggaccgtgtggg

SEQ ID NO: 681617 - DNA, 829 bp, Homo sapiens
tgtggtggctaacgcctgtaatcccagcatcttagggaggccgagcgggtggatcaactgtgggtcaggagtttgagatcagccaggccaacctggtgaaaccccgtctctactaaaaatacaaaaattagctgggcgtgatggtgggcgcctgtaatcccagctacttgggaggctgaggcaggagaatcacttgaacccgggaggcggaggttgcagtgagccgagatcgcaccattgcactccagtctgggcaacagagtgagattccgtctcaaaaaaaaaaggaacaaggaaaaaaaaataggattatacctcttcctgtgttttcaagccgccatgaaatttctgaacactccaaatccagtggaataatccaaaagcaaaatttactaggtataaaacataatttgacttcttatagtaatagtattacttaaaaagcctcagggtatataatcttctaaagcagtacaattcagctgcagttaaattaaccaagtatgtctctagtagagaacagtaggcctattcacctgtgtgtagcctcagtgcctaacattgtggttgccgagataacattattccgtagaatttaccctgaaatttggtaaaacaccattcgtttttggttaccaattgcaaaatatttcaaaaggcccgtattttatgtaatctttgaaatagatattggaataaaatttcccaagattggaggggggggggattagaaaaaaggatcaatgaataaactcaatatgaggagttacccaaatcttccataacaataatgagaaattggtacaccaaaggtgagttagataaaaag

SEQ ID NO: 681618 - DNA, 888 bp, Homo sapiens
gacctaggcaggaagtcggcgcgggcggcgcggacagtatctgtgggtacccggagcacggagatctcgccggctttacgttcacctcggtgtctgcagcaccctccgcttcctctcctaggcgacgagacccagtggctagaagttcaccatgtctattctcaagatccatgccagggagatctttgactctcgcgggaatcccactgttgaggttgatctcttcacctcaaaaggtctcttcagagctgctgtgcccagtggtgcttcaactggtatctatgaggccctagagctccgggacaatgataagactcgctatatggggaagggtgtctcaaaggctgttgagcacatcaataaaactattgcgcctgccctggttagcaagaaactgaacgtcacagaacaagagaagattgacaaactgatgatcgagatggatggaacagaaaataaatctaagtttggtgcgaacgccattctgggggtgtcccttgccgtctgcaaagctggtgccgttgagaagggggtccccctgtaccgccacatcgctgacttggctggcaactctgaagtcatcctgccagtcccggcgttcaatgtcatcaatggcggttctcatgctggcaacaagctggccatgcaggagttcatgatcctcccagtcggtgcagcaaacttcagggaagccatgcgcattggagcagaggtttaccacaacctgaagaatgtcatcaaggagaaatatgggaaagatgccaccaatgtgggggatgaaggcgggtttgctcccaacatcctggagaataaagaaggcctggagctgctgaagactgctattgggaaagctgctacactgacaacgccttaatcctgggatcacca

SEQ ID NO: 681619 - DNA, 101 bp, Homo sapiens
gccctctcccctgccccagtccccaggggtactctggagtgagcagtgcccctgtgggacgcctgtaaatgcgggctcagtggaccactggtgactgggct

SEQ ID NO: 681620 - DNA, 89 bp, Homo sapiens
gcggccgcctactactactactactgctcgaattcaagcttctaacgatgtacggggacatgtgtataaaaataaaaaagatcccaaat

SEQ ID NO: 681621 - DNA, 1423 bp, Homo sapiens
  misc_feature (1222)..(1222): n is a, c, g, or t
  misc_feature (1240)..(1240): n is a, c, g, or t
  misc_feature (1356)..(1356): n is a, c, g, or t
  misc_feature (1358)..(1359): n is a, c, g, or t
  misc_feature (1361)..(1361): n is a, c, g, or t
  misc_feature (1364)..(1364): n is a, c, g, or t
  misc_feature (1366)..(1366): n is a, c, g, or t
  misc_feature (1369)..(1369): n is a, c, g, or t
  misc_feature (1377)..(1377): n is a, c, g, or t
  misc_feature (1379)..(1379): n is a, c, g, or t
  misc_feature (1381)..(1381): n is a, c, g, or t
  misc_feature (1384)..(1384): n is a, c, g, or t
  misc_feature (1386)..(1386): n is a, c, g, or t
  misc_feature (1394)..(1394): n is a, c, g, or t
  misc_feature (1397)..(1397): n is a, c, g, or t
agatcatctgtgcggtcattatgggtgagagtatcccacttaaatcgtactatcagttttgtagctagtgcgaggtgcttaaatgtacgtccagtctatctatagctcatcattgctgttacagccaggcttgcaggccatttggaacactgtgatccaggtctgtccccagcaccctcctggccagactggagagatgctttcttcttggcagctcggcttcggctcttagcaggtttactgttgttgtccatggatgcagctcttctcctaggagatttcccgctcttgccaccccctgggtctagccagggagatctttgactctcgcgggaatcccactgttgaggttgatctcttcacctcaaaaggtctcttcagagctgctgtgcccagtggtgcttcaactggtatctatgaggccctagagctccgggacaatgataagactcgctatatggggaagggtgtctcaaaggctgttgagcacatcaataaaactattgcgcctgccctggttagcaagaaactgaacgtcacagaacaagagaagattgacaaactgatgatcgagatggatggaacagaaaataaatctaagtttggtgcgaacgccattctgggggtgtcccttgccgtctgcaaagctggtgccgttgagaagggggtccccctgtaccgccacatcgctgacttggctggcaactctgaagtcatcctgccagtcccggcgttcaatgtcatcaatggcggttctcatgctggcaacaagctggccatgcaggagttcatgatcctcccagtcggtgcagcaaacttcagggaagccatgcgcattggagcagaggtttaccacaacctgaagaatgtcatcaaggagaaatatgggaaagatgccaccaatgtgggggatgaaggcgggtttgctcccaacatcctggagaataaagaaggcctggagctgctgaagactgctattgggaaagctggctacactgataaggtggtcatcggcatggacgtagcggcctccgagttcttcaggtctgggaagtatgacctggacttcaggtctcccgatgacccccagcaggtacatctcggcctgaaccagctggctgacctgtaccaagtcccttcattcacacggactacccagtggatgtctatcgacagatcccttgacaggatgactgggagctggcagaagttcacagccagntgcaggaatccaggtagngggggatgatctcacagcgaccaaccaaagaggatcgacaaggccggaaccgagaagtcctgcaatggctcctgctcaagtcaccagatgctccggaacgagttttcaggcgtgcnanngnccngncanggtggggngncnggngnccatcgcnggnagacggaatactaaggaccgtgtggg

SEQ ID NO: 681622 - DNA, 790 bp, Homo sapiens
  misc_feature (41)..(42): n is a, c, g, or t
  misc_feature (49)..(50): n is a, c, g, or t
  misc_feature (54)..(54): n is a, c, g, or t
  misc_feature (56)..(56): n is a, c, g, or t
  misc_feature (59)..(60): n is a, c, g, or t
  misc_feature (62)..(63): n is a, c, g, or t
  misc_feature (65)..(65): n is a, c, g, or t
  misc_feature (67)..(67): n is a, c, g, or t
  misc_feature (69)..(71): n is a, c, g, or t
  misc_feature (76)..(78): n is a, c, g, or t
  misc_feature (81)..(82): n is a, c, g, or t
  misc_feature (86)..(88): n is a, c, g, or t
  misc_feature (92)..(93): n is a, c, g, or t
  misc_feature (103)..(103): n is a, c, g, or t
  misc_feature (105)..(107): n is a, c, g, or t
  misc_feature (110)..(115): n is a, c, g, or t
  misc_feature (120)..(120): n is a, c, g, or t
  misc_feature (122)..(122): n is a, c, g, or t
  misc_feature (124)..(124): n is a, c, g, or t
  misc_feature (127)..(127): n is a, c, g, or t
  misc_feature (132)..(132): n is a, c, g, or t
  misc_feature (134)..(136): n is a, c, g, or t
  misc_feature (138)..(139): n is a, c, g, or t
  misc_feature (143)..(145): n is a, c, g, or t
  misc_feature (150)..(151): n is a, c, g, or t
  misc_feature (156)..(159): n is a, c, g, or t
  misc_feature (161)..(161): n is a, c, g, or t
  misc_feature (164)..(165): n is a, c, g, or t
  misc_feature (167)..(167): n is a, c, g, or t
  misc_feature (173)..(174): n is a, c, g, or t
  misc_feature (176)..(177): n is a, c, g, or t
  misc_feature (183)..(183): n is a, c, g, or t
  misc_feature (187)..(187): n is a, c, g, or t
  misc_feature (192)..(192): n is a, c, g, or t
  misc_feature (194)..(197): n is a, c, g, or t
  misc_feature (199)..(199): n is a, c, g, or t
  misc_feature (202)..(202): n is a, c, g, or t
  misc_feature (204)..(204): n is a, c, g, or t
  misc_feature (206)..(208): n is a, c, g, or t
  misc_feature (211)..(211): n is a, c, g, or t
  misc_feature (218)..(218): n is a, c, g, or t
  misc_feature (221)..(221): n is a, c, g, or t
  misc_feature (226)..(226): n is a, c, g, or t
  misc_feature (232)..(232): n is a, c, g, or t
  misc_feature (234)..(234): n is a, c, g, or t
  misc_feature (237)..(238): n is a, c, g, or t
  misc_feature (242)..(242): n is a, c, g, or t
  misc_feature (253)..(253): n is a, c, g, or t
  misc_feature (261)..(262): n is a, c, g, or t
  misc_feature (265)..(265): n is a, c, g, or t
  misc_feature (270)..(270): n is a, c, g, or t
  misc_feature (273)..(273): n is a, c, g, or t
  misc_feature (288)..(288): n is a, c, g, or t
  misc_feature (294)..(294): n is a, c, g, or t
  misc_feature (299)..(299): n is a, c, g, or t
  misc_feature (302)..(302): n is a, c, g, or t
  misc_feature (318)..(320): n is a, c, g, or t
  misc_feature (327)..(327): n is a, c, g, or t
  misc_feature (332)..(333): n is a, c, g, or t
  misc_feature (335)..(335): n is a, c, g, or t
  misc_feature (339)..(339): n is a, c, g, or t
  misc_feature (347)..(349): n is a, c, g, or t
  misc_feature (357)..(359): n is a, c, g, or t
  misc_feature (363)..(363): n is a, c, g, or t
  misc_feature (369)..(369): n is a, c, g, or t
  misc_feature (375)..(375): n is a, c, g, or t
  misc_feature (378)..(378): n is a, c, g, or t
  misc_feature (382)..(382): n is a, c, g, or t
  misc_feature (394)..(395): n is a, c, g, or t
  misc_feature (398)..(399): n is a, c, g, or t
  misc_feature (404)..(404): n is a, c, g, or t
  misc_feature (406)..(406): n is a, c, g, or t
  misc_feature (416)..(417): n is a, c, g, or t
  misc_feature (420)..(420): n is a, c, g, or t
  misc_feature (427)..(427): n is a, c, g, or t
  misc_feature (433)..(433): n is a, c, g, or t
  misc_feature (526)..(526): n is a, c, g, or t
  misc_feature (537)..(537): n is a, c, g, or t
  misc_feature (562)..(562): n is a, c, g, or t
  misc_feature (579)..(579): n is a, c, g, or t
  misc_feature (639)..(639): n is a, c, g, or t
  misc_feature (648)..(648): n is a, c, g, or t
  misc_feature (653)..(653): n is a, c, g, or t
  misc_feature (686)..(686): n is a, c, g, or t
  misc_feature (690)..(690): n is a, c, g, or t
  misc_feature (700)..(700): n is a, c, g, or t
  misc_feature (731)..(731): n is a, c, g, or t
  misc_feature (742)..(743): n is a, c, g, or t
  misc_feature (745)..(745): n is a, c, g, or t
  misc_feature (761)..(761): n is a, c, g, or t
  misc_feature (767)..(767): n is a, c, g, or t
  misc_feature (773)..(773): n is a, c, g, or t
gccgcccacctgcccggatctcctggctctcatccctgganngggaagnnaaananaannanngngnannnaaaannnaannaaannnaaanngaaaaagaanannnaannnnnngaaanangnaanagaanannngnnaaannnaaaannaaaannnnanaannanagagtnnannaaacancccngagancnnnnanccncncnnnacncgacccnccngaagnggccancnccnncgangaggacaacgnggaccgcnnccngacgnagnccacccgtgagcgtngtgacngtccncancaacccagagcccaannncgtagtnaagtnnanaaanaaagtaannnaacgtgtnnngcancgtccncaggtngcncaangcgcgtcccaanngtnngtcantncacaccaacnnaanaaacgtngtcgtnaaaagtaaaaaaagtgtacgtagtcaaaaaacgtaaaaaaaagtcaaacgtccacaagtccgcaaacaacagtcaacaaacgcgtaagtagtngtcgtaaacancagcaaaaaaaaaaaaaaaaacaancgcagcaaaccgcgcanaaaaacgcacccaagtaagtagcccccgcaagtaagtagcaaacaaaagtaagggtcagnaagtgcagnggtcncgttcaaaaagcgcgcaagtaagtgtagtagtncaancgcaaacaancagcgcaaacgcagcaagcaagcagtgcaancgccccccaannancgcagcgcaagcaagnaaagtncgcagncgcaaagtaaagtaagt

SEQ ID NO: 681623 - DNA, 1448 bp, Homo sapiens
  misc_feature (486)..(486): n is a, c, g, or t
  misc_feature (493)..(493): n is a, c, g, or t
  misc_feature (495)..(496): n is a, c, g, or t
  misc_feature (502)..(502): n is a, c, g, or t
  misc_feature (526)..(526): n is a, c, g, or t
  misc_feature (1247)..(1247): n is a, c, g, or t
  misc_feature (1265)..(1265): n is a, c, g, or t
  misc_feature (1381)..(1381): n is a, c, g, or t
  misc_feature (1383)..(1384): n is a, c, g, or t
  misc_feature (1386)..(1386): n is a, c, g, or t
  misc_feature (1389)..(1389): n is a, c, g, or t
  misc_feature (1391)..(1391): n is a, c, g, or t
  misc_feature (1394)..(1394): n is a, c, g, or t
  misc_feature (1402)..(1402): n is a, c, g, or t
  misc_feature (1404)..(1404): n is a, c, g, or t
  misc_feature (1406)..(1406): n is a, c, g, or t
  misc_feature (1409)..(1409): n is a, c, g, or t
  misc_feature (1411)..(1411): n is a, c, g, or t
  misc_feature (1419)..(1419): n is a, c, g, or t
  misc_feature (1422)..(1422): n is a, c, g, or t
agatcatctgtgcggtcattatgggtgagagtatcccacttaaatcgtactatcagttttgtagctagtgcgaggtgcttaaatgtacgtccagtctatctatagctcatcattgctgttacagccaggcttgcaggccatttggaacactgtgatccaggtctgtccccagcaccctcctggccagactggagagatgctttcttcttggcagctcggcttcggctcttagcaggtttactgttgttgtccatggatgcagctcttctcctaggagatttcccgctcttgccaccccctgggtctagccagggagatctttgactctcgcgggaatcccactgttgaggttgatctcttcacctcaaaaggtctcttcagagctgctgtgcccagtggtgcttcaactggtatctatgaggccctagagctccgggacaatgataagactcgctatatggggaagggtgtctcaaaaagggctgntttgaangnncacaanttcaaattaaaaaccttatttggncgcccttgctgccctggttagcaagaaactgaacgtcacagaacaagagaagattgacaaactgatgatcgagatggatggaacagaaaataaatctaagtttggtgcgaacgccattctgggggtgtcccttgccgtctgcaaagctggtgccgttgagaagggggtccccctgtaccgccacatcgctgacttggctggcaactctgaagtcatcctgccagtcccggcgttcaatgtcatcaatggcggttctcatgctggcaacaagctggccatgcaggagttcatgatcctcccagtcggtgcagcaaacttcagggaagccatgcgcattggagcagaggtttaccacaacctgaagaatgtcatcaaggagaaatatgggaaagatgccaccaatgtgggggatgaaggcgggtttgctcccaacatcctggagaataaagaaggcctggagctgctgaagactgctattgggaaagctggctacactgataaggtggtcatcggcatggacgtagcggcctccgagttcttcaggtctgggaagtatgacctggacttcaggtctcccgatgacccccagcaggtacatctcggcctgaaccagctggctgacctgtaccaagtcccttcattcacacggactacccagtggatgtctatcgacagatcccttgacaggatgactgggagctggcagaagttcacagccagntgcaggaatccaggtagngggggatgatctcacagcgaccaaccaaagaggatcgacaaggccggaaccgagaagtcctgcaatggctcctgctcaagtcaccagatgctccggaacgagttttcaggcgtgcnanngnccngncanggtggggngncnggngnccatcgcnggnagacggaatactaaggaccgtgtggg

SEQ ID NO: 681624 - DNA, 755 bp, Homo sapiens
  misc_feature (11)..(11): n is a, c, g, or t
  misc_feature (22)..(22): n is a, c, g, or t
  misc_feature (41)..(41): n is a, c, g, or t
  misc_feature (54)..(54): n is a, c, g, or t
  misc_feature (82)..(82): n is a, c, g, or t
  misc_feature (202)..(202): n is a, c, g, or t
  misc_feature (211)..(211): n is a, c, g, or t
  misc_feature (242)..(242): n is a, c, g, or t
  misc_feature (246)..(246): n is a, c, g, or t
  misc_feature (272)..(272): n is a, c, g, or t
  misc_feature (276)..(276): n is a, c, g, or t
  misc_feature (336)..(336): n is a, c, g, or t
  misc_feature (416)..(416): n is a, c, g, or t
  misc_feature (420)..(420): n is a, c, g, or t
  misc_feature (617)..(617): n is a, c, g, or t
  misc_feature (625)..(625): n is a, c, g, or t
  misc_feature (637)..(637): n is a, c, g, or t
  misc_feature (743)..(743): n is a, c, g, or t
actaccccctncttcctccccngctgcgggccaccctccgngggccggcggcgntcgccgggcccgcgggcgccggacgtgncttccccccccccggacctgccccctctcgtctcccctcttttccgccctgtgggccccccgaccctttttcttccgccggggcgggagcccctagttcccacactgaggacgcgtgacntggtgggcnccggaaaggaggggacttctcctgccccccnagangtggtggggagattgctgcccctatngccntatctcggccccttcccactccccccccccccccccggtgctgggggtcccttatttttntgccctacctgagcttgatgggggtgggcagggggcccgttgagccccgccccccgccccgctctgccgatcctgccccnagangctggggtggtgggggcagtaattcctgcccccctctctgccctagggatgggcacgggggcgctggtgaggtcccactggaccctcccgggtgctagggggccgggaggggacaccccctccccgcctttacctcacttccactgctgccttgatctctgtctgggaggggggagtgaaggggccctaaccacctncactccgncgcctcagaganatgcggttaattcctgacttagtttatttttgcaaaacgtcgatctcctcctcccccgccccgcatccgcgaaggcttttaatgggaggggcgtcaaagctcaaanctgtattcctct

SEQ ID NO: 681625 - DNA, 467 bp, Homo sapiens
  misc_feature (52)..(52): n is a, c, g, or t
gaccggatggcgacattccaaaattatggtgatcagactgccattcaacgtngtgataatccaagcccaggcacagaacacatttaagaaaacatttggggctgggcacagtggctcacgcctgtaatcccagtacttggggaggccgaggcgggcagatcatgaggtcaggagttccagaccagcctggccaacatggtgaaacccagtctctactaaaaatacaaaaattagccgggcatggtggtgtgcgcctataatcccagatactcaggaggctgaggcagcagaatcacttgaacatgagacgtggaggttgcagtgagccaagattgcactactgcactccagcctgggtgtcagagtaagactctgtctaaagagagaaagaaagaaaagaaaagaaaagagaaaagaactgagtcccaagctctgcttgtggaaaccagtttctgctgaagtgtttg

SEQ ID NO: 681626 - DNA, 840 bp, Homo sapiens
gacctaggcaggaagtcggcgcgggcggcgcggacagtatctgtgggtacccggagcacggagatctcgccggctttacgttcacctcggtgtctgcagcaccctccgcttcctctcctaggcgacgagacccagtggctagaagttcaccatgtctattctcaagatccatgccagggagatctttgactctcgcgggaatcccactgttgaggttgatctcttcacctcaaaaggtctcttcagagctgctgtgcccagtggtgcttcaactggtatctatgaggccctagagctccgggacaatgataagactcgctatatggggaagggtgtctcaaaggctgttgagcacatcaataaaactattgcgcctgccctggttagcaagaaactgaacgtcacagaacaagagaagattgacaaactgatgatcgagatggatggaacagaaaataaatctaagtttggtgcgaacgccattctgggggtgtcccttgccgtctgcaacctccgcctcccaggttgacaccattctcctgcctcaccctcccaagtagctgggactacaggcgcctgccagcacgcctggctaattttttgtatttttagtagagacagggtttcaccgtgttagccaggatggtctcgatctcctgacctcgtgatccgcctgcctctgcctcccaaagtgctgggattacaggcgtgagccaccgcgtccgacctctttttttcttttcttttttttgagacaaagtctcactgtgtcacccagactggaatgcagtgacacaatctcggctcactgaaacctctgccttccagaaccccatgatg

SEQ ID NO: 681627 - DNA, 1289 bp, Homo sapiens
  misc_feature (1088)..(1088): n is a, c, g, or t
  misc_feature (1106)..(1106): n is a, c, g, or t
  misc_feature (1222)..(1222): n is a, c, g, or t
  misc_feature (1224)..(1225): n is a, c, g, or t
  misc_feature (1227)..(1227): n is a, c, g, or t
  misc_feature (1230)..(1230): n is a, c, g, or t
  misc_feature (1232)..(1232): n is a, c, g, or t
  misc_feature (1235)..(1235): n is a, c, g, or t
  misc_feature (1243)..(1243): n is a, c, g, or t
  misc_feature (1245)..(1245): n is a, c, g, or t
  misc_feature (1247)..(1247): n is a, c, g, or t
  misc_feature (1250)..(1250): n is a, c, g, or t
  misc_feature (1252)..(1252): n is a, c, g, or t
  misc_feature (1260)..(1260): n is a, c, g, or t
  misc_feature (1263)..(1263): n is a, c, g, or t
gacctaggcaggaagtcggcgcgggcggcgcggacagtatctgtgggtacccggagcacggagatctcgccggctttacgttcacctcggtgtctgcagcaccctccgcttcctctcctaggcgacgagacccagtggctagaagttcaccatgtctattctcaagatccatgccagggagatctttgactctcgcgggaatcccactgttgaggttgatctcttcacctcaaaaggtctcttcagagctgctgtgcccagtggtgcttcaactggtatctatgaggccctagagctccgggacaatgataagactcgctatatggggaagggtgtctcaaaggctgttgagcacatcaataaaactattgcgcctgccctggttagcaagaaactgaacgtcacagaacaagagaagattgacaaactgatgatcgagatggatggaacagaaaataaatctaagtttggtgcgaaccgccttgctgagcgtgtcccttgccgtctgctgagctggtgccgttgagaagggggtccccctgtaccgccacatcgctgacttggctggcaactctgaagtcatcctgccagtcccggcgttcaatgtcatcaatggcggttctcatgctggcaacaagctggccatgcaggagttcatgatcctcccagtcggtgcagcaaacttcagggaagccatgcgcattggagcagaggtttaccacaacctgaagaatgtcatcaaggagaaatatgggaaagatgccaccaatgtgggggatgaaggcgggtttgctcccaacatcctggagaataaagaaggcctggagctgctgaagactgctattgggaaagctggctacactgataaggtggtcatcggcatggacgtagcggcctccgagttcttcaggtctgggaagtatgacctggacttcaggtctcccgatgacccccagcaggtacatctcggcctgaaccagctggctgacctgtaccaagtcccttcattcacacggactacccagtggatgtctatcgacagatcccttgacaggatgactgggagctggcagaagttcacagccagntgcaggaatccaggtagngggggatgatctcacagcgaccaaccaaagaggatcgacaaggccggaaccgagaagtcctgcaatggctcctgctcaagtcaccagatgctccggaacgagttttcaggcgtgcnanngnccngncanggtggggngncnggngnccatcgcnggnagacggaatactaaggaccgtgtggg

SEQ ID NO: 681628 - DNA, 281 bp, Homo sapiens
tttaatattggtgatggggtggaagagaactgattgattgaacccagcattatttcttgctagatagacagattaacaatgttgaagatatggtccacattattaataacactttggattgcactgatgtagcccagggaggggatagcatcgaacagagattgaacatagttgtatttgatgccagatctactattgtgtctttatttaggagctgacgactgatgggctgctacctctttggcctgccggtgggagtaatgagcatgatgtgctatggg

SEQ ID NO: 681629 - DNA, 200 bp, Homo sapiens
caacaaaagaaagcgccagagctatcatatctgactcttgtgactctttcaactatatttcatcatttataaaatatgggaagtgatagcagcttaccagagggtactaggagaatggatgtgcatgtgcatgcagcttaatgcctgagtatagtgataaacactaaggaaacgccgatgcattgcatcacggtctctca

SEQ ID NO: 681630 - DNA, 507 bp, Homo sapiens
taccttgcagtcggagaagtgaaggtgcagtgagccgtgactgcgccactgcactccagcgttggcaacagcatgagaccggggggttaaaaataaatagatatgccaggcccggtggctcacgcctgtaatcccagcacttcgggaaggtaaggcgggtggatcacgaggtcaggagttcgagaccagtctggccaacatgaagaaacctcagtctctactaaaaatacaaggattagccgggcgtggtggcaggcatctgtaatcccagctacttggaaggctgacgcaggaaaatcatttgaaactggaagacagagggttcagtgagccaagattacgccactacagtccagcctgggtgaccacaggagactgtctcaaaaaaaaaaaaacaaaaagggttcctaccaggtctaccggaatccggtctaatgtgggccccttttggatagaccaatttttttaaataatatggtgggacagaagcaataaatgtccaaattt

SEQ ID NO: 681631 - DNA, 684 bp, Homo sapiens
gagctccttcttaaaggccagaatgaccctgaggacgctgtttgaagttagctttcctgtcacagtatactaacatggttgaacctgccagcgtccattgtagcaacatgggaaatcaactttccggagcatgttaatctcacctctcccaaaagattttgtaactcatcctagtggctcattattcagagcagggtttatgccatcaaacatgatatgtgccttcaacgaacagtcagcactggggtgtccacaagaacgctcatgaggtccatcgtgtgagacaggcaaaaccatgcctaggtcacatctcgaaaatgtattccccctgtggtaaatgtggcacttgcacttcaaagagtgttagcatgaatgcatcacatttttttaccgcagtcaaagcgtgggatttcaaaatgtactacgcaatcaaatttgcaccccttcatagtttcttcgtctcacacagtcagttaataaggtagggataaaatcttacctgctacggagtcttgagatactgttaaaaagatgagattatgtaatatgtatataacacttttcaaaggaactgttttccattgacaagcaataatgtagccatagattttgcagctaggaaccttcgcgccccaaaaattattatgcattgtggatgacaatgaatgcaacttgttgtgtatt

SEQ ID NO: 681632 - DNA, 178 bp, Homo sapiens
catctctacgtatgcctcggaaaactcatctctcctctgtgcaaatttctaaattctggctctgtagatgaaatacacctctgatttttgacacaaaagggctttgatcaaagaaacatcttgtgattctgtggactctgtgagacccgagcattctgaggcagcaggtattctcgag

SEQ ID NO: 681633 - DNA, 282 bp, Homo sapiens
tctgtatactgattgtgtatccgtgacacttagctcgaagtatatcagttgaaggagctttgggtctgagactatgggtttatgagagtatagaattaagtcatctgcaaagagacgtagttagacttccctcttcctatttgaataccctttatttctctctcttacctgactgccctggccaggacttccagtactatgttgaataggagtggtgggagacagcatgggtgtcttgtgtcagttttcaaagggaatgtttccagcttttggttatttcag

SEQ ID NO: 681634 - DNA, 227 bp, Homo sapiens
cccctttccccaaaccccccccgccttgaaatgtttttgctttcccgtttacttttggccccccccctaaattttaaatgggttttttggaaaaaccggtttgggccatgttttttttttgggaggaaagaggccggctgtgggggggctggggaggggataggttccccccttggttcccccgctttagaattttaccccaaaaaaaaaccctgttttttagggga

SEQ ID NO: 681635 - DNA, 772 bp, Homo sapiens
tgggtccttgaatatgtatttttactgaaaaaatcatccataaattaacatacaaaaatgtccaaacacttgattaaataatgtaatgacaaaggactattttggtgaaaagtgtttttaaaacatcttaagaattccagtgtgcaaaaatgtgtacccctgtgcacctcttttaaaacgtaagagcaagctcaaaaacacgttaggtgagtggaaataagctagctacgctcaatgtgccatcgtcaaggggtgagtgttggatacaactcaactccagtggttggtctccgtgctcagctataaagtgtcgtggtggtagaggatctcgtgacacagcaggcacctatttatgttcaaaatgagtattctggcaaataccccccacaccccccaaaacagcatgaacaaagcggggacacctttcccttgcacacagcaatcaaagacaacattagggggccacccatcagtagcctgaagattttcagctaccaatatatgcacagggtcacattgggtcctgtatgggtttttcttgtttaaactatgacaaattccacactattaacagcaacaggggcctgggctggtacgtatttaaactcatgaccttttcccccatatgattatccaaggccgggtggacccctatgactggacatgtgccacatcccacaagtattctactctccatacaggacacagaatttggccccgaaggggttcacaacgtgaccccaattttaacgcagcgaaaaaacgaacttcg

SEQ ID NO: 681636 - DNA, 646 bp, Homo sapiens
gggcaggggctccctcaggcccctgattcccagcccacagctctttctactctgcagacagagttcctcgtgagactggccctgcattcaggcagggtagcagaggggtccctgcctgcagcacccagagctgaacctgaagctacaaagatgggctgatgaggtggcccatgaggtgtcagcaacatctccgaacccccgtgggtctcccctagttgagtcagggcacgtgatttgcatatagctggagctacatgcaccgtcgtcctcgcccgtcgagccaccttttaggggagaaaggagggcagatttgtaacctcgtggttctcgtgcatgggatcctgggcgtggaagaaagttcgataccatggatgattgccttttagaactccagacttatgtccaagcagtcgattcaccaaagcgatttgggttaggctgtagagagaaaagctggatatgagaaaataggaatgttggatcgtgagggataaaaacaatcgaaggtgtggaagtgcctgggtgtgtggagtgtaactgtgggagaactcggttgtgtcggagaggttggaggtgaatgaagtgcgatgtcgggtcatgagagggtcggtttacgcggcgggttcacagccagttctgtcgtgcc

SEQ ID NO: 681637 - DNA, 215 bp, Homo sapiens
cggacgcatcggcatttattttctcacagttctggaggctggaagtctaagatcaaggcgtcagcaggggcagtttcttctgagagctatgagggaagatccgttccagtcctctccccttggcttatagatggctgccttcttgttgtgccttacatggtcttccctttgtgtgtacaaccctgatgtctctctgagtatccacatttcttctt

SEQ ID NO: 681638 - DNA, 415 bp, Homo sapiens
gtgatatatatacgtcaataaacgacccatcacagctcttacccacctaggaacagcacatctcctcacagttatgaaaactggaaaacttggcaggatgcggtggctcacgcctgtaatcccagcactttgggaggccgaggtgggtggatcacgaggtcaggagatcgagaccatcctggctaacacggtgaaaccccgttctactaaaaaatacaaaaaattagccggacgtggtggtgggcacctgtaatcccagctatttgagacactgaggcaggggaatcgcttgagcctaggagtgcaagaccagtctgggcattacagtgagacgctgtctctacaaataataaaataaaatagctgggcatagtggttcatgcctgtagtccttgctacttgggaggctgaagca

SEQ ID NO: 681639 - DNA, 185 bp, Homo sapiens
cgctcgactcaagagttatccccacagttcagtgatctattagggcattgtttatgtgttggtttctctctcccctcccttggtcttaattcttacattctgccaacactctgcaaatacacacttgcgaagggccagagaagcccagcccttgctgcgggccaagctgcgagggtaccgagctc

SEQ ID NO: 681640 - DNA, 410 bp, Homo sapiens
  misc_feature (162)..(162): n is a, c, g, or t
  misc_feature (168)..(168): n is a, c, g, or t
  misc_feature (170)..(170): n is a, c, g, or t
  misc_feature (179)..(179): n is a, c, g, or t
  misc_feature (216)..(216): n is a, c, g, or t
gattacagaaacgtccaggtacatctcctttgcaagatagccatggtgaagggcaacttcagtaacaaaagaactaccaccatctttgctacagaagtgtttaataaacatcataatagatttggagaaagaacacacactccacccatgccactaccttcntactcncnagggatacnagacagcaaagaatttctgtctcctacaggacaactncaggggattaaaaaaacagtaactgccagctgggagggatagaattaaagaccacatatagtgtttttaatctagtcacttgccacaaggagaaatatatttaggatatacaataaataattcaaatgcttaaaataattgaatgaacggaagagtagacttgaccaaatttacattcgttgggcgtacgggga

SEQ ID NO: 681641 - DNA, 918 bp, Homo sapiens
atctaattaaactaaagagctcctgcacagcaaaagaaactatcattagagtgaacaggcaacctacagaatgggagaacatttttgcaatctatccatctgacaaaggtctaatatccagaacctacaaggaacttaaaacaaatttacaaggaaaaaaacaaccccatcaaaaagtggacaaaggacatgaacagacacttctcaaaagaagacatttatgtggccaacaaacatataaaaaaaagctcaaccttactgatcattagagaaatgcaaaggagaaccacaatgagataccatctcatgccggtcagaatggtgattattaaaaagtcaaaaaacaacagatgctggcgaggctgtggagaagtaggaacacttttacattgttggtgggaatgtaaattagttcaaccgttgtggaagtgtgtgtggctattcctcaaagatctagaactagaaatactatttgtcccagcaatcccattactgggtatatacccaaaggaatataaaccattttattataaagatacatgcacatttttgttcattgcagcactcttcacaatagcaaagacacaatagcaaatgcccatcaaagatagactggataacagaaaatgtggtacatatacaccatggaatactgtgcagtgcagccattacagcttttggtgatacagtgaactcagatttttcattaattcttttaactggttattactgaaacgttgacaaaaagtaatgttggtattgaaatcttgagtctggccaatgttctatcttacattcctaaagaattctaaaagaggattccaagaatgtcataaatggatggtttctccatggatgaaggaatggtttattcacttgctgataattccagcctaaaccagttgagatcatattgaa

SEQ ID NO: 681642 - DNA, 134 bp, Homo sapiens
tccgtgacatctcgtgtctcacttgacgaagtgtaggctcaggaaagatccacattaagttctgtgctatctagcctggctgctgctccactggctacatcgctgggcactgcctttgggttttattgagcgtg

SEQ ID NO: 681643 - DNA, 171 bp, Homo sapiens
tacaactaccactacagatttattaaaatggctaaaaatgagaaaaacagaaaacaaaactataccacaagctggtgtggatgcagagtaacagtaactaatacattcctgctaggaatgcaaaatggttttggaccacagtttggcactttcttatagacttaaacatgt

SEQ ID NO: 681644 - DNA, 237 bp, Homo sapiens
tagtgacgtctcatcatattactctatcatactacacagtcaaacactcagaagcaggaaacacataaatgagatagggcacatgaagcctgacacaatgactcctccagatctgaaagaataacaatagaacatcaaatgggatgagtaattagcagtgtccaggaccagagcattaaagttttagcaaagaaaacacttgctcaaagtcaggaagggtaggtatgatgaaggacg

SEQ ID NO: 681645 - DNA, 776 bp, Homo sapiens
tccactttataaaccagccagttaattatttggtagtaagattaaaaacttttaccaggcagacggaaatatctgtgtcagcatgaacagtacattttcttcctagaaggcagttacatggaaaaccaggttattatcagggttatttagcaaggttttgggaatccaaacaagaggagactaatcttaagacctataactcgtccatgaagggctgggggcacacttttctaccaccagaatgccttagcttccagaaagctgtgggactcttccctctccgtctgggtctgggctgagtaccgtacggctcagtcacttcctgagccataccgtcaggccagttgggcctaaaagctggttatctctgggtcacgggttggtggtggtcacagccactggctactaacagttaagggttctgaaggggggcatgtcaattggctcccaggtaccaactaggagacacaataatcctataagtttggttctcccaaacccatctccagtttatcaggtaatatgctctgtaaggttctttccaaccccattaggcacattactatagattacctataaatttcacctaaggtaatactacccttcctaagtgaaggatggaggtttccaacgcttggtgttttttcccccccatttttctggatcaggtgtttctcaccccatgtgggatttatgaaacaaaaaatttctaacatcaccctagaatactttattggatggttcccataccattaaatttcaggattcccttaatt

SEQ ID NO: 681646 - DNA, 977 bp, Homo sapiens
agcggggtccgctccgacgcgcgcccgtccggggctccatccacagcaactgttagccttcattagtcagcttttcctcctcttaccctgcacttcccagaaccaaacgaatgtgaagggggtccatggagggctcgacgtccccggcgccccgcagcggtcacttagcgccgctcgccgccggcctttcgacggtcgacgcgtggatctgctagcgagtactccgacgggccagccgtgatggcgcacgcggtcgctcgggatggggagctggttgacgcctggtcttgagagtccgtgcgacggcagaatcggcgcgttcccgcgtgccctgttgtgcgggaagctgcttccgagttcaatctctatccttgctttgccacctgcgggcgcacccgggagcccaggcctttccagtgccgctcactggggacactcgcgcggggcagcgggctctgctgagctcggacctgcgcacactagccaggccgagacgcccacgtaggtcctgtcgtgcacgcactgattgctggagtcggaatgagcacggcgctactacgctgagggccgatggggagagcccgaagctcagggggcatgcagggcacagccccctggtcggacttgaggggtcctggcgcggcccccatgtgcgtccttccagttccgtgccggccttcgcgttgcctccttacgtggccagtacgcaagttgtcgcagcttcgtgctggagcttgctaaacggccagcttgcccatcttgcgagtagggccctggagaagatgcggccccggtgccaagagtgcgggctccaagaccacgcgagggaaaggaagcaatgaatgaacccaaaggacatagagaggcgcacggggggcccccgagacagtacccaggacaggcaacacactcgggaggaggatccgagctaaactcagcacagcgtccaaacccaagtcggagacaaaagaagccca

SEQ ID NO: 681647 - DNA, 206 bp, Homo sapiens
ccactgctccgtcccagggcattgtcttcagggagtaggagggaaaagaaacggaaataactaggaagaacaagaaatggatttccaggggacaggacaggagcggggccagtagacttacacgaggtcgtgaagttgacagacgactcaggtagtgtgttgagtcagggaatggttgtcctcatgtacatggcatgggtaccgag

SEQ ID NO: 681648 - DNA, 245 bp, Homo sapiens
  misc_feature (5)..(5): n is a, c, g, or t
gtcanttttattttatttttggcttttaaagggaagccggaacagttcactaggttaagaaaggaaaggaaagaagaacagaaaaaacaaaagtttatcagttcccagcagcaaggcaaaaccaccccagtgtgcacctctccctgtgccgtggttctgctgatgtgcccagaactcgtgtttggcgtggctacacggaacacaccgtggttgcaagttttggcaggttgcccattgtggcacac

SEQ ID NO: 681649 - DNA, 161 bp, Homo sapiens
aagtgctgggccctgggtctaccccacgacccctctgcctctccccaggctgtgagctccccgaggacgacgccccctctgcttacaccacctgcaggcgctccagccccggcactggaaggccttggccaccgacacagcagcctcatctctggctggat

SEQ ID NO: 681650 - DNA, 232 bp, Homo sapiens
  misc_feature (69)..(69): n is a, c, g, or t
tgaggctcattttgcagttgttgaaattgtccccgcagttttcaatcatgtctgaaccaatcagagtcnttgtgactggagcagtggtcaattcatattcactgctgtacagtattggagatggatctgtctttgggtaaaggtcagcctatcgttctgtgctgtggagatcaccccatgatgggtgtctggacggtgtctaatggacctgcagactgtgccttcccctcct

SEQ ID NO: 681651 - DNA, 274 bp, Homo sapiens
ggagggtctgactctctcatggcggttagaaactcagctatacacagatctgtcgtgcctcctctgcggcgccaggagtccctcagatgcatgaagaagctggcttgcgaagatcaggactgttagtaagccggttctccaagtgttccccagctcagagattcgcgtagtatctcaaagcccggtgaacgttggcattccttggagagactttagaggaccatccggcgctagaggactcttgatatatggctcaaggattgaggatggcaca

SEQ ID NO: 681652 - DNA, 693 bp, Homo sapiens
tggtgaggaatcgtggtggtgctggtgtgcacagggtttgtgtgggcagcccacaataaagacgtccttcgccggatgaagaagcgctaccccacgatgtgcgtatatgtgtggtcatgttagtgctgcagcgtattctccttatctccatgttccggaggagtcatggatcttctgtgctttgggcattcactttatccttctgctgtagatgtctatccatgcatcgtgtgagacttcggaacctcaagaacaatagctggagaataaaactggaaggaatacgtctgcagaggacaccgatgggcattgtcctggatgccctataacagcaggaagaaggcatcacacagactcactgactatagtcacgcaaagtgaacggaataagatataagttatctgatgcatagaggttgcagcagaaattgagttgcagcttgcccttgtccagacctattttctgcttgcgttaattgaaaacaggaggtgcacagtaccatgccaattatctatgggcaggcatgcatgtattggcccgaagtatttatcagctctgattgtctccagagagaagacctcagaaaccgaaagaaagccaccgcctcctaatgtgtctgaagttcacgtgtgtttattggaaccctcactgggactggttccccgattccttacggggaattatcgcccttg

SEQ ID NO: 681653 - DNA, 155 bp, Homo sapiens
  misc_feature (69)..(69): n is a, c, g, or t
  misc_feature (102)..(103): n is a, c, g, or t
tgaggctcattttgcagttgttgaaattgtccccgcagttttcaatcatgtctgaaccaatcagagtcnttgtgactggagcagtggtcaattcatattcgnncagcctataattcttgtgctgttggtatcacccctaggccctggacggtctc

SEQ ID NO: 681654 - DNA, 174 bp, Homo sapiens
ctggctccactggtgagctggatgatggtgccaggaggcgaacgtctcgtcctgggcaaaggtgatgttggcatggtcatgcaggccaaagatctcaggcatatcatggagtgggaggctcttgatgtaggagaggtagccggtggaggtcgataggtagagcgggatcgtggt

SEQ ID NO: 681655 - DNA, 330 bp, Homo sapiens
gtactgactacgccgctaggccactcccaaattcctggccggaagaaactacatgatataataaatgccccccccccccaatgatcgcccttttttgccgagtctggactgtactgccgtgatctcggctcactgcaacctgcctgcctggggctcccatgattctcctgcctcggcctaccgagggcctgggattccaggcacgtgccaccactcctgactggtttttgtatttttgggggaaacggactttcgccgcgttgaccggcctggtctccagctcctggcctcgggtgatctgcctgccggggcctcccgaggtgctgggat

SEQ ID NO: 681656 - DNA, 501 bp, Homo sapiens
  misc_feature (165)..(165): n is a, c, g, or t
  misc_feature (268)..(268): n is a, c, g, or t
  misc_feature (301)..(301): n is a, c, g, or t
  misc_feature (350)..(350): n is a, c, g, or t
  misc_feature (431)..(431): n is a, c, g, or t
  misc_feature (489)..(489): n is a, c, g, or t
gaattaacccaaatgcccatcaatgatagactggatagagaaaatgtgatatccctacaccatggaatactatgcagccataaaaagaaacatagttacatcctttgcagggacatgaatggagctggaaggcattttcctcagcaaactaatgtagaaacaganaaacaaacaccacatgttcccacttataagtgggagctgaacaatgagaacacctggacacgaggggaacaacatacactggagcttgttggggaggggcgangcaagagattgagggggattgggatagcagtangaaaaatagtgcatgctggggttaatacctaggtgatggattgataagngcggcaaaccattcactgtgggcacatgttttcctatggtaacaaaccttcacatcctgccacaggtaccccagaacttanaaccaaaaaacaatagtgttaatatggtatatttcctccatagtttccatatgattcntagtaggttctt

SEQ ID NO: 681657 - DNA, 230 bp, Homo sapiens
taaggatccctcccttccaccagcactttcattaacagatcttcatcccagtactagcctattatggggtatcatcattcttacgggcggccccacagggaacctatttgctacaccggggccagcttgtcagtactacctagagagctgccttggattccaaatgctactttgcatggcctagctcaatattgttcctacttcctagcagggtcatccttcaggattga

SEQ ID NO: 681658 - DNA, 235 bp, Homo sapiens
  misc_feature (3)..(3): n is a, c, g, or t
gtngatctagaggatccgatttggcgaggcagtctcgagtagctgggattacaggcacgcgccccatgcctggctaatttttttgtatttttagtagagacagggtttctccatgttggtcaggtggtctcgaactcccgagctcatgtgatctgcccgccttgtgctcccaaagtgctgggattactgcgtgagccaccatgcctggcctgtgttcttttactataaatttttg

SEQ ID NO: 681659 - DNA, 208 bp, Homo sapiens
ctcaggtcagatgcagccttctcgagcaaaggccgaccaaggaaaactcactaccatgagaattgcagtgatttgctattgcctccataggcatcaccgtgtgccatacctagttaaacatggctgattcgtggaagttctagaggaagagcagctttacaaccaaatacccagtatgctgtggccacatggcgtaaagccctgaccc

SEQ ID NO: 681660 - DNA, 104 bp, Homo sapiens
tcgctatcatcggcaccctatagattcgcaggctctatgatattaccaaatattccttttctggctttagacaaagctggcttctatggtttaaaactaagaag

SEQ ID NO: 681661 - DNA, 391 bp, Homo sapiens
gctcgcacccacagttgctgatgggagcggctgctatgaaggcttctgacatggcctggagacattttccccatggtcttagaggctaacactaggttccgtgctacttatgcaaatttctgcagctgccttgaatttcttctcaaaaaaatggtctttttctttagtactgcgtcttttcttctgccagataccctaaattatctctctcaagttcaaagttccacaaattcctagggcaggggcaaaatgctgccagtctttttgccaaaacataacaagagtcacctttgcttcagttcccaacaagttcctcatctccatctgagaccacctcagcctggaccttattgttcatatcactaacagcatttttgtcaaagccattcag

SEQ ID NO: 681662 - DNA, 170 bp, Homo sapiens
gccaaagctaagaccttgaaaccagacgagctacctaagaacagctaaaagagcacattttctatgtagcaaaatagtaggaagatttataggtagaggcgacaaacctcccgagcttggtgatagctagttgtccaagtagaatcttagttcaactttaattggccctg

SEQ ID NO: 681663 - DNA, 897 bp, Homo sapiens
agagtcgcgctcgccgatgggaatgtgctcaccacttgaaaatgttgtgcacatgtaacccccgatatgtgcggctacccgggagctgttcctcccaaccggggatgtccaaaactaatggtgttggagaacacatatccctgggcagatatactcggaatatctgcactctcgactagtgggcccaagttccctctctcgaaccgcaagtttactcttcgcggtaatacggtgtgtacaacacgttatactgcgcccccacgttcaaacacattcggcggcattcacaaaaaaaacagctggcctcccccgtacccgccccaatactttcttagggagtggtcaaagaaccaggaggtagtgcacggaccggtttgccaaaatttcggcccccctctcacaggctccggaaaataatgtcgcaccccccagtgcaccactcgcactttcagctgtccacgcccacggatgcacactatttatcttcttctcgccaagcgctttatgatacttctaccgtcaaattattggagggaacagtgtactccctttaggtacaagaaaagcatatgggcacacatcgtgcgtgtggcgccgggaagccggctccggatagagttcaagtccacgaggtccccccacttacagggctccgacagctaccacaacccaaaggttgtagaacaatggttagtacaagtagtcgcaccgtacaccacccgagtggctattagagacaacatttataacactcgccttggctcccattctcatgagggtccctcacccggaaggataaatttttttgttggagatcgttaatagtctgctacgaaacaagtttctttttaaaaggcaaacaaaacaaaagaataacgaaatttcaaccccaaaaca

SEQ ID NO: 681664 - DNA, 429 bp, Homo sapiens
  misc_feature (185)..(185): n is a, c, g, or t
  misc_feature (307)..(307): n is a, c, g, or t
  misc_feature (309)..(309): n is a, c, g, or t
  misc_feature (316)..(316): n is a, c, g, or t
  misc_feature (320)..(320): n is a, c, g, or t
  misc_feature (334)..(334): n is a, c, g, or t
  misc_feature (345)..(345): n is a, c, g, or t
tcttaaacatataaaccccacaggcctgtatacttcaaaaatatcactgtcggccaggcgcgtggctcacacctgtaatcccagcactttgggaggccgaggtgggcaaatcctttaggtcaggagtttgagaccagcctgggcaacataaaattaactttagttttttttgtctctaaaagaanatttaaaaacaaaataaaaaaccactaattccctatatacctcctttcccctgacctcttgcaacctccattctttcactccagcctgggcaacagagcaagactctacctcaaaaaagaananagaaaanaaanaagaacagtctttncaatacccaantcacttcattaaaaataaagacggcaagataatcacttggattgcccaggagccccaactactttatggagctcactgtaggat

SEQ ID NO: 681665 - DNA, 154 bp, Homo sapiens
ctcgtctgtataatgctcgaggtttgcgtcaccggccccggggcacgccctatgaactcaaggacccgctgtggcaaagccgcgtcgaggtactgcgcggcgccaacggtatatgaccaggacgccctggccctgggtggctcggtcaactatg

SEQ ID NO: 681666 - DNA, 504 bp, Homo sapiens
  misc_feature (119)..(119): n is a, c, g, or t
  misc_feature (121)..(121): n is a, c, g, or t
  misc_feature (137)..(137): n is a, c, g, or t
  misc_feature (331)..(331): n is a, c, g, or t
aagagggtggtggcaagggggggtcccccaaaaagaaccccctgtcctttgggcaggagttaaccccgtcccccccttggtggagaacaaaaaagctcagtgggtggtgattgcccccnangtggatcccatcgagngggtggtttttttgcccgccctgggtggtaaaaagggggtccctttctgcattatcaagggaaaggcaagattggggggtttggtccccaggaaacccggcccccctgtggccttcacccaggggaactgggaaaacaaaggggctttggttaagtgggtggaagctatcgggccccatttccatgcacaattnaatgagatcccccggtcctggggggggcaatgtttggggtcctaagtttgggggtgggttcgccagggttgaaagggcaaggggtaaagaacttgcccctaaacgggggtaaagggccccgggggggtttttgggacataaaaaaaattgaaaaaaaacaaattttcccccca

SEQ ID NO: 681667 - DNA, 225 bp, Homo sapiens
gcgtgctgcggaggccccccggaccgccacccactttaccactgaccgacggccggcgaccatgcgacgcgccggagacggaaccccggaccgccgccactttcccactggaacgacggcacggcgaccactgcgacgatgctgacggacggacacccatggaccgccacctactttcacactggaacgacggcacggcgacaactgcgacgtgctgacggggga

SEQ ID NO: 681668 - DNA, 255 bp, Homo sapiens
cgccggatacactgcacatccacctcttggactctaagcggattctcctactcagcctcccaagtagctggaattacaggcccccgccatcacatccagctaatttttatatttttagtagatatggggtttcgccatgttggccaggctaggtctcgaactcctgacctcaggtgatctgcctgccttggcctcccacagtgctgggattccaggcgtgcgccggcacagccagcctgttgcagtgtgcttccg

SEQ ID NO: 681669 - DNA, 244 bp, Homo sapiens
ccccccccccgggggggggccccccccccctttttttttttgggttttcccctttttttaaaaggggaatttttccccccttttttcccccctaaaaaaggtgtttttttttttttggggggggggggggggggggggggggggggatttttttttttcccccccccttaaaaaaaggggtttttttccccgggttgggggggccccctaaacccccctttccccgggtgttctttttttttta

SEQ ID NO: 681670 - DNA, 337 bp, Homo sapiens
cgtgtctccagcacttcagtgaggctgaggtgggcggatcacctgaagttgggagttcgagaccagcctgaccaacatggagaaactccatctctactaaaaatataaaattagccaggcacggtggcacatgcctataatcccagctacttgggaggctgaggcaggagaatcgcttgaacccagaaggcggaggttgtggtgagctgagatcacacctttgcacgccagcctgggtaacaagagcaaaactccatctcaaaaacaaaaaaaggcttctgcaatgacttctaagagttagaaacaggttttgagaggatacgtggcttgctccaag

SEQ ID NO: 681671 - DNA, 146 bp, Homo sapiens
cttctgcattctgaactgtatgctccacgagagacatgtctgtgttagtgtacactgtctcgcggagtctagcgatagtgcctggtacctagcaggaactcgaatacatatttgttgacataatatgaatgcaataggagggtcga

SEQ ID NO: 681672 - DNA, 1702 bp, Homo sapiens
  misc_feature (202)..(202): n is a, c, g, or t
  misc_feature (319)..(319): n is a, c, g, or t
aaacaggggggtgtaggacaccagcgaggcactctgtggaaagaagtagctacacgtcccgtggcgggggggacacctctgcgcagcgcaacaccagcaaggaagagggaagtggtatgacccagcagagctgccgcaggggggagcacagacaggagaaaaggaggggcgccgccgcacacaagcccgtggtgcggggacngacacagagaggctgttgccggcgccaactaactactactccggtgggggggacaaacaagggcagccccccacctcgacggggggccgcagacacgaggcgcgatcacgctgtcgnctgcgggggtgtgtgcgcacagagaagaaagaggcggcggggtagagacgaccaagcgtgctcctcgtcgtgggggggacaacaaccaggtgagtaccctcattggagggcgagctacgccgctgtcgagcagcaggagagtgttcccttccgctgcggccctcgcccccggcgagataagtggttggcgccccccccacgaggaggagagaaagctcccttaaaagaggttggggggagagggaacgcccctcctcgggcgcggaaagatagtgccacccgagtccacgagcggtgcaacccaccagtgggggcgccaacatatggagctacagacagctctgcgtgagagtaagaaggaaggacccacaaagacgacgtcaggtggccgcagcacatggttggtgcggccccacccccccagcggggaaggggggcgcacacacacccacggcgggtgttgttgtcccaccccccccgaggaggggggcgccaataactatggtcaaagagaagaagaggaggctggcgggcgcctcacaacaggtgagactattctccacgagaggagcgtccgactagtggcgctcgcgcgcgctgctcatcaaagaaccacctcccgcgcggagtatgagagagggcgcaacacacaccccggggggcctcccccccgcgggagagggagtaccccgcacgtggtggggccacacaccgacggagtatctctctacacccccgctggtgtgtgtgtgtctcaacacactttctttgctcgctccgcgctggtctcgaacagcactgtggtgtgtgtgtgtgcgcagagagagattatctctcagcgcagagagtgtgtgtgtgcgacacaccacacaggcgggtgtgttctccacactcctctccgacacacagatggctgcgacgcgcgcacacacactctctcacagagcgcctcacactctctcacacacagcggcgcgcacagagcgcgcacacaccgcgcgcccgctggtggggataacacacccacccgaggagcgcccacagagcgggactgtttcccacacaagtgtgtgtgtgagagagtgtgagcgccccgccacctgtgcgcgccctcttgtgggagagcccgacagagagattccgggccacccggagaggcgcccggagatctccccgcacgagaaggagcagaaagagaggagcacacaacccgggtccgcgcgggagatatttttctccacctttcacacagcgaggcacaccttgggcccgccctttctcctgcccacagccccccggcgcaccctgccacgcccccccgcccccgggtggggtcacaagggttttgtgtgtgaaaaaaaggcccttttttttttttcccca

SEQ ID NO: 681673 - DNA, 90 bp, Homo sapiens
ggatttgctggtgcagtacaactaggcttaatagggacatgggtatgacataggccaaggcccaactaacagtcaagaaacaaaaaaaaa

SEQ ID NO: 681674 - DNA, 207 bp, Homo sapiens
  misc_feature (68)..(68): n is a, c, g, or t
  misc_feature (94)..(95): n is a, c, g, or t
cgaggaaaaccgtgtactattagccatggtcaaccccaccgtgtcttcgacattgccgtcgacggcgnagcccttgggccgcgtcttcctttgnnagctgtttgcagacaaggttcccaaagacagcagcaaaattttcgtgctctgagcactgggagagaaaggatttgcgttattaacgggttccctgggcttttcacaggaaat

SEQ ID NO: 681675 - DNA, 174 bp, Homo sapiens
gacaggattccacccgaaggctaccacacaacaagcacagctggcggcagcagctgaaatcgatgaagaaccagtcagtacatgcaaaacagagtcgcgagctgacacaagaaggcacggaaggctatgtccacaactgggtcttcggcagcgttacaggcagttactacgagt

SEQ ID NO: 681676 - DNA, 185 bp, Homo sapiens
aaaagaaagaaagaaagaaagggaagggaatttataaggtcaagttaccagttttgaggttttgtgtttttttttggacctccttcaagtgagaaaataaaaaaaaatggtgccaaagctgtccagatagagataatagaagccaaagagattaaaaggaaataaaaaggcatgattaaaaacta

SEQ ID NO: 681677 - DNA, 524 bp, Homo sapiens
  misc_feature (488)..(488): n is a, c, g, or t
gaggcttggtgggggagggcagggcaggtggacggaatgtcgttctttgactcctttttacaatttgtcttgtagagatcaaaatatgccactccaaaacatgccactttggcatacaattatttcagattcaacagatgcagaaagaagccatctcagagcttcccttatctcatgagaagcagaaacttctgagaaatgaggactgctgtaaatctcctcttctagggaagttttatggccacagagaagatgaagttggcgccaagatggatctgcacaaacaaaccttactccattaatttccctcatatatttactttcccatggtttactgcctttgggagcctaagatttttttttttttttgacttgtcacttctctacgaatttattgttctttgttaagatgcataaacccacattctaaccacctctttgagtttttcatcatatcactgagtttctcctgggtacacgcccactgnacatgctaataaactatttgtttttcccttgttaaa

SEQ ID NO: 681678 - DNA, 213 bp, Homo sapiens
  misc_feature (32)..(32): n is a, c, g, or t
  misc_feature (65)..(65): n is a, c, g, or t
  misc_feature (97)..(97): n is a, c, g, or t
  misc_feature (101)..(101): n is a, c, g, or t
  misc_feature (175)..(175): n is a, c, g, or t
  misc_feature (181)..(181): n is a, c, g, or t
gaggacaccgccaaggaggatgcggccaaccncaagctgggccaagtctgacaaggtctccaatnggttgcagggaccattgtccgtttccctcgtnggtnatggagaaccccttcccccagggggcctgaagtaagaggctgcttcatcctggcccatggcaaagatgggaaantctttntttggaaaggcaagcaggcaaacacggaggag

SEQ ID NO: 681679 - DNA, 492 bp, Homo sapiens
  misc_feature (7)..(7): n is a, c, g, or t
  misc_feature (38)..(38): n is a, c, g, or t
atagacncccgttgctactgattccgatagtatcgtcngcgcgcccttgcgcaagacttcgcaaggagcacttatggccgggggaccaattgaaaccagcgtttttcagaaggaaaccaacgggagcaattgagagattattggagagaatgcccgggacccccaggaagcgaagaacaacactaccacactagaagccacagggaacgcaaacgagttcgcaactaacctgcctaccacagaagtcaacgctatcagagggttacaccggacaacagcccacggcagttgcgaacgcgggacgggtgaacggcgaccagcggacttaacagatgaaaactcggaatacacgcagggcctggatggaccctgttgccgggacgcggcatcgtgatgctcccaacattccccgtagctcctccgacatccgccttgtggactagccgcggtgctacggatcaagggcaaggcccacggtcagccgcattagat

SEQ ID NO: 681680 - DNA, 221 bp, Homo sapiens
tgagacaaggtctggctcttatcacccacgctggaggacagtggcacgatctcagctcaccgcaacctccgcctcctgggctcaagccgttctcccagctcagtctcctgagtagctgggactacaggtatgcaccaccatgcacgaagccttttggtcttttttttttcttttttttttggaaacggagtcaccctcttgtctacaagctggtgtgcagt

SEQ ID NO: 681681 - DNA, 541 bp, Homo sapiens
cctctcccaacccccccccccttttttcctcttctcttcccctcaatcacttgtgcctccttctcaaaaaaaaaaaaaattcttcctcccttttcctccttctttttaatactttccttctatttttctccctttaaatttctcctccccccaactcttttaactcttttttttttttttgcccctctccttttcctcacatccccctctttttattctcctcgtatttcccccggtctaattctttactcctggcctttcctctatatttatatcttcccttctttttttccttattccccctcctctcttcatttctactatacacttactttttcttttttcatttcccccccctcctcttctcgttctattctttctattttccttctctttccaaactatttacctctttttacctccccctaatcttcccttctttactacattaattttaactcttctctccttttctgcctctcctcctcctatttctttttgtccctccctttccctctttctatgccacctacttttttcc

SEQ ID NO: 681682 - DNA, 805 bp, Homo sapiens
  misc_feature (135)..(135): n is a, c, g, or t
  misc_feature (430)..(430): n is a, c, g, or t
  misc_feature (453)..(453): n is a, c, g, or t
  misc_feature (602)..(602): n is a, c, g, or t
  misc_feature (617)..(617): n is a, c, g, or t
tgaggtgtctctgtggggcgttaacatcgggggtgtgcggcttcgccactttgcattttgtcggccatggacctttaggatttctgcggcctcttgaattctggtatcctcgccgcatcggtgactgtcctgtcncggaggcgctggttcacagcgcgagaccgctgcttaccgacaaggatcggcttcggaccgggaaggctcgccgggatgacatagccgctgtgcagctctggccaaggatgaactatacgaggcatagcgatgtactccgtcgaacatcggtatcgcgccaccttagctgtacacgggtcactgtagagagccttgaaacgtctctgtgccaacttgcgcttggggacaaggcgtgtgttatcgactagcgagtgggcaagtggattgcggaggcgcacaaccatagaaaggctgncttcgagttggcggatcgttggntgttgaagaatttgaggaggcccgtgtaaaggggccgcccaggctttgtgttggccgcgcaaacatcttggggtgcttggcccattccctttgtgttactccgctaaaaactatccactaggatagggtgcgtctaggacggagaattncttgctagaacccantcgcgagggcgcagcgaccattagagccccttgcttcgttatcctaccatggtctgaggaccttggggacgctaggctacagactctagtcttcttgacgattcgccacaggtaggtcgatccaccaagggaccgttccctctggagtcacgctggtgtatcgcatgggtcatccatgcgccagtgtg

SEQ ID NO: 681683 - DNA, 371 bp, Homo sapiens
  misc_feature (25)..(25): n is a, c, g, or t
cttgttaaagggttttattccaacnacattcccctggagtgggggaaccattgggcgccggggaaaaaattcaaaacccccccccccctgttggggtcccgggggtccttttttcttttcaacaaactccccgtgggcaaaaaaaggtgggcccagggggaggttttttttttttcccttatggatgagggtttgccccaccccctccccccaaaaaaacctttcccctttttcggggtaattagttgggcgggcggccaacccccccttccccggcttttggggttggggggggaagttttgggcggtccccgtgttcattttttccgggggccccgcattgaaattaaaccccccccccttcccttgga

SEQ ID NO: 681684 - DNA, 556 bp, Homo sapiens
atgtcaaacaatccaaagagatgaggcttggtgacctcgtcgaagcagcactcctgcggcaatagttgtcgcacctttggtgaagtatgatgatctcagtatctgattcgcagtacaccttcatccgatcagatggcctgcaaactatgaccgaggggagtaactgacgaacgtcttggattggataagaacgaccgcctgcacaaacatcgtcaccaccagcacaggcgtcccgggacttactaaaagctaaacagaccgaaaaagaaaaaagccaagaagtctccagcaagtcgggatcgatgaaggaccggatatcgggaagttcaaagcgttcgaatgaggagactgatgactatgggaaggcgcaggtagccaaaagcagcagcaaggaatccaggtcatccaagctccacaaggagaagaccaggaaagaacgggagctgaagtctgggcacaaagaccggagtacaagtcatcgaaaaagggaaacacccaaaagttacaaacagtggacagccaacacggagatcaggagccccacaggaagtgtctg

SEQ ID NO: 681685 - DNA, 172 bp, Homo sapiens
gtcgccgctgttctcctacagtatgacatcattttaactttactaattatgttgcacatcactatttccaaataaggtcacattctgaggttcctggactgatgtggatttttttttttttttttttttttttttttttttttttttttttttttttttttttttttttggg

SEQ ID NO: 681686 - DNA, 213 bp, Homo sapiens
  misc_feature (176)..(176): n is a, c, g, or t
  misc_feature (206)..(206): n is a, c, g, or t
cgacgtaggacgactggactctaacctggttaccagacgctccctctgaactaacgtgacaccgacacgacaatgacctgttattaccaactgtgccaaggaccggagacataccggagactgacagaccatacagctacgacaacagaaaacactgaccaacactggttccctgncaactcgtggagactgttaacgtaccctgngagactg

SEQ ID NO: 681687 - DNA, 538 bp, Homo sapiens
gcttcctcaggtaaacaccgtatcctacttaatccctctgaccgtacagcctttaatctcgtcctctacggccggcgtagtactcgtcctggtagagattctccaaaatttaagccggggcattctaccgatctcggcatgctcacctttgctcggagaagcttccggtctctttcgattctcttctaagttttcacgggatttttattcccgaactatacagccggatcgcccttaactcgccaccgctggacgtccacgcccggaacaaagtttcgacttaatgtccatcgttagttcacgagaaggacacctcaagctcgaaatttatcaaaagacgcgtggtcaacaaacgggtcaggtcctttatataagacggactccacagtattaaaccggggcattacgaacttcctctcgaggaggagattctattcataattttagcggtcccgttgtaagattaccgtagccggaaactcaacaccccgcttccagtcattcttttaaaaataaaatcctcgtcacggaaaacggt

SEQ ID NO: 681688 - DNA, 221 bp, Homo sapiens
catgctgtaccagtcgaaaggcacatatatccacacatgcacacacagcacacacacaaacgcacagcacacacaaacgcacagcacacacgcacacacagcacacacacgagcacacagcacacaaacgcacagcaacaacgcacacacatgcacacacagcacacacactagcacacagcacacacacaaagacacagtacacatggaatgcacacaca

SEQ ID NO: 681689 - DNA, 244 bp, Homo sapiens
agaggtataagctctccataataataaagagcacgttaataagttaaacaagttaaacattgtaaaaaactgaagctggacagcaatgtaatcccagcacttcggaaggccccagctggaggatcactgtgaacctaggagttcaagagcagcctgggccacacaggcgaagcccatctctacaaaaaaaattttttttaactagccaggtcaggtgtcatgtctgtaggatcttggactcgtg

SEQ ID NO: 681690 - DNA, 106 bp, Homo sapiens
taaatatacataatggaatgctactcatccggagaataaagaacaaaattaatgccatttggagcaacatggatggaactagagactctcatactacattgcaaca

SEQ ID NO: 681691 - DNA, 1005 bp, Homo sapiens
gggccgctgacatgttgagtgactacgcgcggaccagtgcctggtgccccccgctgctccagtgccgcgctgggccttggtgctgggctggtgtggcactgtgcctgcgggccgtgtgctgtgcgagctggtggtgcgctgtggctgggtgcctggcttgcagcccactgggcctgggagactgtggtgtgcagtgtgtacaacatgctcaccgtggaggaaggaacccctaatcgtggcgcactgccgaagcctgcctcctggtatagctgtggaccaactgtatatgatcatgcgcaccttggccatgcttgctcatatgttagatttgatatcattcgaaggatcctaaccaaggttttttggatgcagcaatagtcatggtgatgggtattacagatgtcgatgcatcacatcatcaaaagcgccacatgagatgcaatatttaccccacgaattgccatcgaccagacgttaaatgagggaagaccttccacgcatggcacatggaaagaccctgaacggttctaccgcaacacaaaggaggtaacctgagaggttaaacccgagacaacttattaccttccagactccacttttacatcttcacttgaccggggagctccattctgccctccgttgcggcaaccagcattaatatcaacagggcaaacacgggccaccggtcatacatatcgcactccttgaacgtcctaagaagctacgaccaaccctattgcgggacattgcggtcggccaattaggtcaccctaggggatccccacgtcacgcgcagacagccaacgtagggcgcatacttggaccacagccgtcatttgggcacaggtggactttccggccgcatgattcgggaagtgtcgtggccaaaaccccaacgaaacgtagttctgggcacaccttccacttgggggaccccaggcgaatcgaccgggggttaggacacttcgacgtcgcctctagcagtccgcacagaatggatgcgga

SEQ ID NO: 681692 - DNA, 243 bp, Homo sapiens
tactgatctgcagtgatctaagatcccgacggtatgtgtggtcttctcacgatactgtgaaaggtagtccttgtgttcattcgggcttgtctgtatatttctaacgtggaaaaccccggctcatctcaaacatgaggactcccagcgcccaccagtccacgctgaacccgtactcctctccccgcaggatttcgggggcgatgtaattcggggttccgcagaaagtgctcgttgtgtcaccag

SEQ ID NO: 681693 - DNA, 286 bp, Homo sapiens
tgccctgtcacacctgtacaccacaccttcatgctgcagggtctccctcctcaagaagagggtggagtttctttcccagagccagctcagtttctccctgagcctgattctgtacctggtgaatgctttgctggttgtcaatgtcttcacagactcagcctgccctcctcatctgagctggcaccctttacgtttaattactcaaacctctttcttttattcctagtgttgagtgaatgctcatggctgagggtaagtccggggaacaccatacctaaagaatctg

SEQ ID NO: 681694 - DNA, 491 bp, Homo sapiens
ggttgtcaggcagcgctgagcagtaatgtgtcctactcacctgctgtttatccagcaccagacctcttctaagaactttacctgtttcagctcactgaatcctcacaacacccattgtacagaagaggaaactgaggcagcgagtggttaagtgacttctccgaggttacacagctaggaaatggtggcaacagtaagagcccacgaagagctgcggttggtagttcattctggacagccctcccgtgaaccgtccctgtactggcacttgttgctggggactgtcgctgtcctctccctccccgggccaggtgtgtcctggagggcagggaagcgtcttggcacgcgggtgcgcgccgccccctcggcctcctgggctccctgaacctcgcaggaccccggcaacttcgagccccgccccagctccaggccgcgggggcgcatcgcgggcgtcgggcggggcggcccagcgggtaaaagctgcgcggccg

SEQ ID NO: 681695 - DNA, 1125 bp, Homo sapiens
  misc_feature (505)..(505): n is a, c, g, or t
  misc_feature (520)..(520): n is a, c, g, or t
ggttatgtgccgctgtggctgctcgtgttgaatctagaaccgtatccagacatgggactggcaggactgagcaaaatgatgcttaccgaatccggagatcctgaggaggaggaagaggagataggaggaattattggatcccctaacaacagtgagagagcgatgcgagcagtctggagaaatgtgtaatagggccctgggagcggttagagctctagtgatgagcgtgtatccgtctctggatcacagtacagaagaggattgcacggtaggagctctttgaagttcttgcatgcgagggaccattgcagtggcccacaaactctttaacaacttgaaataaatgtgtggacttaattcaccccgagtcttcatcatctgggcatcagaatatttccttatggttttggatgtaccattgtgtttcttatttgtgataagctagtaagttcatcatgaagcatcgatgggtttggcttaggctggtagcttctatgtaattcgnaatgattccatctanataaaagttctatgatctgcaaaaaaaaaaaaaaaaaaaaaaaaaaaaaaaaaaaaaaaaaaaaaaaaaaaaaaaaaaaaaaaaaaaaaaaaaaaaaaaaaaaaaaaaaaaaaaaaaaaaaaaaaaaaaaaaaaaaaaaaaaaaaaagaaaaacagaaaaaaaataaaaaaaaaaaaaaaaagcaaaagaaccaccggacacaaatattacaaaaaaagccacaacacagcacatgatatcaccaagaatacgatgaaataacactagagcaagccagagaatgacgtggaccacaaacatagaagtcatcgcagtcacctttaacgaaaagccaggatccctagtagctatacactacagggctacgtggtttgataacaccatgagagacagacctagtagttctataagaaattgcaaccgatgatacacagacaatcagaatacctgctatatatctaatgtgtgctagactagttaataagtaagaataaaacataagagctaagtagtcataattcgattacttaatataagtaatataagacaatagaaggatataaatcaaatagtatactacaacatctcgttgcaacagatacaa

SEQ ID NO: 681696 - DNA, 453 bp, Homo sapiens
atgccgtctctgcgagatttccagacacggccacatctcaccttctccgtgctactgcccggacccagctacctcctctctctggcatttattccacgggcttcctccccgccccctgggcatctacccttgcccttccctcttccccgatccacccatctgtcctcagcgtggcagccagagagattttttaaaaaattcaagtcagccgggcgcggcggctcacgccggtaatcccagcacttggggaggccaaggcgggcggatcacgaggtcaggagatcgagaccatcctggctaacacagtgaaaccccgtctctactaaacatacacaaaactagctgggtgtggtggctggcaccggtagtcccagctacacgggaggctgaggcaggagaatggcctgaatccgggaggcggagcgtgcagcgagccaggatcacaccacggca

SEQ ID NO: 681697 - DNA, 261 bp, Homo sapiens
tgctcgcatcactgcacagcgatctcagctcaaaacataccctttggcgacacccttctcaagtcaatgcgcagcactacagtctaggtctggccgtcttcaacaaccaccttgcaatagcagtggtgcactctgctgcaaacctgtgagtggaactctagcttccttccattcctgccttgcagaaactggtatccctcctttgctgagcttgtgagtgggatcctgactttcttctccaccctatagtagaagcagcaa

SEQ ID NO: 681698 - DNA, 311 bp, Homo sapiens
atgggaaaggagttgtggccaaaatccccatttttttgcccctcaacgtttgtgggtcagggctggggtggcagagggaggccttccccttatatttgtgttgttatccagggctccagatttcctcctttgcctgcccccttgccccctttcccccttatttttttccttttgggctccccagcccagttttggttttttgtcccctcctggggtcatccctcccctttgactttgattatggcaccagaaccccagggcctggcccagtggttttcatggtgttctttaaaaaaaaaaattcgcaccca

SEQ ID NO: 681699 - DNA, 105 bp, Homo sapiens
tataatataaggagatctgtagggagataagtatagagaggtagagttgttaacgtgatagtggtacactggataagtggcgttggcttgccatgactagtgaga

SEQ ID NO: 681700 - DNA, 138 bp, Homo sapiens
  misc_feature (105)..(105): n is a, c, g, or t
ggcggctgagctcatattctctccctggttctactgactcgtagttggtaacttgtaatctgaatctctcttcttctgaaaaacattagataatgaaaagagatngccaggcaaccttatgaaagacgaaatagcatc

SEQ ID NO: 681701 - DNA, 126 bp, Homo sapiens
tcgaccgtggtattttataggttgaggcgtcaaacctaccgagcctggtgatagctggttgtccaaaatagaatcttacgttcaactgtaaatttgcccacatcaaccctttaaatccccggtcga

SEQ ID NO: 681702 - DNA, 985 bp, Homo sapiens
ggaggtgagtgagcgggcgaatggagagagaggcgtgtcatagtatactacttcaccggcttgcttgtagtgcgtacatgaccatggttatcggtgtgaatccggaggagtatcaggaaacatactgggcgcggatgtcatttggtcgtgggtgatcatcatgtcgtccatatacgaacctctcattttgttgaggcgttaggcactatgcacgaatgtctgcggccaaacacagcaactacaagacagcaatgcgtgaccaaggtcgtttcaacaagcgtcctaggaaataattcgttgccagaatttgggctggtcggagaggggcagataagtttgaagtgttcagtacacattcctcattaaagcaaacagaattgcgaggacggggagtctaacccagctacatgtccacagcggggtgtcaaaagggatagaaatagtagatagctctagctgggtaggggctcctatttcgtaaagaggcgtgcaaacatgtagactgtagggaggctagctagagctattaggctaagtattgcctcattgtaacctaatattattgaaaatgactatagatgctaacatgcccttgaatagaagttttgaggccccaaagctgatccttcggttcccttgttacctcctataggggtgcccaatgttattgggattagagcaaatatgcactaggtacacttgccgtattgtgccacgtgtgctaacgtataaaggatgtgtacaggctcatgaagaggaagggacccaccttcgcaagtaccgggtgttggggcgcccgttgaaattgaaggcgtcgttagatatgcccttgggcttttggattaactctttgacgagaggtctttgagtagccttggttacacgtggtagatttgggtcccctgtttcgggaaaacaagggggcagggaaagataggaaaagtccgccccgctggaaatatgccagggggaaggggactccggg

SEQ ID NO: 681703 - DNA, 206 bp, Homo sapiens
  misc_feature (57)..(57): n is a, c, g, or t
acagttttaacaaagaaagttgatagtctcccgtgtatatcgggagctcaggattanagcttcccagccatcccatagcattccttatctttttcctgtcttatgctatttagcaagctttttggatttactgtcttggaaaggcttcttgtctttgtattctattacacattcttgattgtgtctttattttatatatatataga

SEQ ID NO: 681704 - DNA, 1189 bp, Homo sapiens
gacccacgacgtccgcggacgcgtgggtcgcaccacgacgtccggacccacgcgtccggagacttgcctgatcctctggcccctggtcctgtccgtcttctccagcatggtgtgtcgtgaagctcccttggaggctccgagcttgggagctgttgacagtgacactgatggtgctgagctcccgactggctttcagcttgtgtgtgacgaccctgaccacgtttcttggagctagattaactctgagtgtcatttcttcaatgtgtgacggacgccgggtgccggttcctggagagacacttccataaccaggagcgagtaccgcgcgcttctgaacagcgacgtggcgcggagtacctggcgcgcgtgagcggagctggggcggccatgatgcccgagttacttggaacaggcacgacatggacctcctgggagcagaagcggggccaggtgggacgaattgacatgcagacacgaactaacgggggtagcgtgagcagcttcagcagttgcacgcggctgagtccatcctcaccgtgactggtgtatcctgccaaagacccatccccatgcagcaaccactaacctcctggtctgctctgtgagatggtattctatccagtgccagacatttggagtcacggtgggtcccgagaacaggtcaggcaagcagaacaggctggaggctggatgtcagcggggccgtggatcccatcaactgagcacaactgggggaccctttcccaacaaccccatgggctcgactgcctagcacaaacaacctcccttccgcaaagtcggcgcaaagcgttcaaccaacattggccaccaggtgcgcaagcgaccgccagacagcgatcacagagaggcccgcactcacagagcaggaacatcgcgacacgcaacaggatacatttcaaacatgtgcgacacgtatgcaccacaatgactctgacaagtggccaataaacgtggcgacaacgacatggctgaggagacagtgtgtcaatccaataggcggaccacggcctaggacacactacgtaagtacgctaaatgacacaaagagacagacactgtgagacgattcaacaacaaagggtcatccgtaacaagaagaggactttacaaatttaacagcaaactctttcccacatggtgagcagtcacaatacacacggagactaat

SEQ ID NO: 681705 - DNA, 1132 bp, Homo sapiens
gaaaactacccctaaaagccagaatgggaacggaaaagactcatatcaacatgtcgtcattggactaggtagacttcgggcaagtccaccacatactggccatctgatctataaactgcgggtggacatcgacgaaaagaagccattgataacatatttgagaaggaggctgctgagatgggaaagggctccttcaagtatgcctgggtcttggataaaactgaaacgactcgagcgtagaaactgtaggctatcaccgattgatcactctcctatgtcggagaatcatgagaccagcgaagtactatagtgactatcattgatgccccaggacacagagagctttatcaaaaacatgattacagggatcatctcaggtctgacgtgtgctgtcctgcatggtagctgcgggtagatggtgaagtttgaacgctggtgatgctccagagaatgggcagacccgagagcatgtccattcgtaggcttatagcactgggtgtgaaagaattaatagtcggtgtaaacaaaatggattaccatggagtcgaacgtacagacagaagagatatgaggaaatagtaaaggaagtcaggacattaccattacgaaacattggctacagacccgacaacagtacgcatggggtcgtcaattactggattcggcatggtgacaacatggctggagccgagtgctaacatggctcggtcccacgggatggcaaaggcacacagaaagggatggacaaagcccagcggagaccaacgcagatggaagcactggaaaggaaatacaaccaccaaatcgtccacatgacaagccctagcacaaggcaaactccaggaagcataaagatggaggacagaactggcacagagacacataggaaacagggaccaaaaacacgatagggaccacctaggaccagacagcgaaagcgacaggaaacgaagaacgaacaaagaaatgaaaaaacaggggaaagagcggaaagaaacaaagtcggaaaaaaaacaagcaagagaaaaaagacaagaaaaaactaaggaaaacaacagaaagcaaacagagaagaaaaacaagcagaaaacagaaaacagagtagtaagactagaaccgacccacggcaaga

SEQ ID NO: 681706 - DNA, 825 bp, Homo sapiens
cacaggcagcgcctgactgtacagcgcacccggggacgccaaggacggcgcggtgacactgacgcggaccctgagctagacagataacacgtgcgccagctggaacggcgagcgagccgacgggcgagtgaggggcgcaccatgatcacctcggcgctggaattatttctcttctggatgaagatgaaccacagcttaaggaatttgcactaacacaaacttgacatgcagttgtataatagacttctgggcagaaattatccgagtccgtagacaaaatagaggttttatacgaagatgaaggtttccaggagatcgagcagttatgcagccttagtggcatctaaagtattttatcacctgggggctattatgaggagtctctgaattatgctcttggaagcaggggacctacttcaaatgtacaatgataaactctgaatatgtggaaactatataatagcaaaatagcattgatcactacaccaaagaatgtagtggaaaatgcagatttgctgaaggagaaaaaaaaccaattagacagagatatggaaggcatcgtaactaaacatgtaccagcgatgtctagatgatcacaatataaaccaggctattggcattgctcttggaaacacgaagaactgaccgtactatgaaaaaaccatactggagtccatgatgtaccacggcatatagaagtatacgcttaaggccttgatgtctttttgcgcaaacaaagatcggcataagtctaagattcagtataaactacataaatgcgaaactagtacaccagttgacgctattacacaccacacaagaaat

SEQ ID NO: 681707 - DNA, 693 bp, Homo sapiens
cggcgtaattacaaatttctggtttcttccccctttcgaaccgttagaagggataaggatttttgcgtacttgctgcagccgcgaaattttcaaaggccagctattacccgtaggcgttagccgccgaacagatagaatataaagattatttagagacatcataatcaaaagtacaatttccgcctcaaagatgtcctcacgtccaagttcagcagtgcctaattcagcatcactcagtgaggaccagagcagtgatagaagtaaatttcctaaggcagatgacttaattgatgaaagagatagaaaactgaccgaactatactgcgtatcccgcttgaaccagctgctagagttaacagatgaaaacaaacttcggaaggaaatagatgcatttttaaagaaaaacgatatacgaaggggtataaggtttgacgaggcgtcactgccgaagctcctacatacagctgcgactcccataacaaaaaagaaattgaaggatgtaaatttaataaatgtacctaaccagaggctatccgattctaaaatgagtagggaactgccagacaatagcgaaaatgtatcagtcaaatcagagagtcattttgttccaagccacgataattcaatccgtgaaaatatggtggattctttgaggccagctgaaaagacaggaggtatgggaacaaaaggcc

SEQ ID NO: 681708 - DNA, 187 bp, Homo sapiens
  misc_feature (50)..(50): n is a, c, g, or t
  misc_feature (90)..(90): n is a, c, g, or t
atacatatacgaatcgagctgtgtaccccccgatagtccgaagtaccaanttctactccatcgctagcgcagtaaaacactcaccaaganctcaaccctgacccccatgcctcaggatacccctcaatagccatcgttgtagtatatccaaagacaaccatcattcccccctgtcgggctagtcggg

SEQ ID NO: 681709 - DNA, 720 bp, Homo sapiens
  misc_feature (459)..(459): n is a, c, g, or t
ttgcaggggctgtcctgtaccttgtaggacagcagccctgtcctagaaggtatgtttagcgtatgtttagcagcattcctggcctctagctacccgatgccagagcatgctccccccacagtccatgatcgaatcaagaaaatgtctccagacatgtcaaatgcctcctggggggcagggtttctcaagcacttttaagcaaaggtgagtattcatacaaagaaatttaggggggaaaaagcattgtttaaataaaagctatgtgttccgtattcagacaatattttagctttaaaagtaagtagagggcataaaagatgtcatattcaaatttccatttgcataaatggtgtacagacaaggtgctatagaatgtggtaaaaggcttgattggaaacaaggttataaaatagtaagatagtaaaatagcttatgaagaaactacagagattgaaaatngtgcatgactcatttcagcagcaaaataagaactcctaagtgaacagaaatttttcgtacctagcaagtgttagttctgtgttaacaatagttacgctattaaaacgtgtgaagagtaaagaaaactaaaggcaatgttattatagtccacacaacgtgattatactaaagaattattataaggtataattgtataactgtgtttactgtcctgggtattaggtataaccattttgaaatttccatttggactttctatga

SEQ ID NO: 681710 - DNA, 131 bp, Homo sapiens
aatagtcccaggtgatagcattctgactttgaagattactagaccactgatcactaagaaactaatattagctagaccatatgatcactaagaactcactttgactgataaattatgactgataaatttga

SEQ ID NO: 681711 - DNA, 301 bp, Homo sapiens
cgaggatcccttatcgtgttgcctattacaaaggaccagtcctgacagtagagaggaggcgcagttacgggacagcacttcaggagacggttggttttcgtttacatgttgggacactccatttttctgtttcctgaaataaattcacacgtactttgtgctgtctgaactgtaccaggaactcatcggaaatctcaatatagagcttcctgttaggttgggctgagagttgtgcgatagagcttggtggccattttcaatcaggtgatcactgctgaaagacgacacgtcctctttaact

SEQ ID NO: 681712 - DNA, 684 bp, Homo sapiens
gactcaacccagtctacgtggagaggatcctccgtgctgagacagggtcacatttgccgcctgcgaggactatggtgtccccagtatactcttatcctgtggactcgccctgcagtaggtcgagcacagctggacgccatctcggagaaggtggatgtgattgccaagcgtgtgctggggcttctagacaagatctggtatgagctttacctcaggatatgctgagatggacgaactgagagaacgctatcatgacacggtctggaaggccaccaagtacaggaatgtgaggaacactccttcggatggtcctcagtggacagcagcaaggacctcctgtagctgagatgatgtcggccttgggaccaataggaggtacgggaagcggatccagaatggtggtttccagctagggagaggatgtgtcgggcatgtgtgatgatcgccaatttgatccttgtgagcattagaaaccgactgtacacgaggatcagaaggaggcctggggaccgatcgggaacgcttgctgaacggcaactaagagtggaaacaatctctgactgcagcacaagtgcatttgtgatccaccaggaggcacgtatatgtcaaattggctggggaagcccaacccatctaacctcctggcactctggaaaggcattctccgggtctggctcctcacag

SEQ ID NO: 681713 - DNA, 643 bp, Homo sapiens
gccttgtgtatgcgcgaggccatgccttgtcggctgtgatgggatgaagaaactggatcgaatcacctcaccatggttgtagacatctctgtgcagtgatgatgatagagtttcctcgctgacgtgtgaccgtttacaaccatgaaatcctaggaaccatgcatggaaggtggaatattctagtaccattagatccaagcgaagacaacgttaactttgaaccattcgtcgcgaacatggaatattatcctcgagttacgtgtagaaaaatcctataaattgagaggatgtgcttgaagcactgaaaagctcgtagcgagtcagagtggcaacagtcgcactaagtcgtgtcatctagtaggcggatcctcccgatccattcaacccagtctgtgctgcaggaacctcgtgatgataacaaatgtgtgacatataccattggtcaaccacgtacaaaataggaacccagatgaataagatctccatacatatctctagcattgcagctgtagcccgggataatttaaagaattgggatagcgattactcatgtgcgacaagatggatgctgtggtgtctgttgcatcgtggcgacaacgaaaggctcgcttgttaaggcactgcaggcaagggtgcagaggaa

SEQ ID NO: 681714 - DNA, 551 bp, Homo sapiens
gctccagatccgagtcggcagaagatgggattcatgtagattcaaccaaaggctccttgttttaaaagaaaagggcccataaatacttccgaccagggaaatatgatgagagccaattgactgcgtaccacccaaggcctggatgcccgatcccatataatcccctgttgcccaccgaccgagcgtccagcctattttagactggaaaaatttgctgttgctgagtctgattgtatttagccgttgccctggatagaagttataccaaggcttattcccgacgaggtgctgctcgatttgctttgccaaaattagaagaggccccaaaagattatgaaagagtattaggactaggaccccataactttggagccaccaatggactccgggaaatccctcaggctttagcatcccaaggaactcatatcccaaggaagctgacatagtgattaagtccaccgaaggagagcgaaagccaattgaagccccaccgaataagccgccggccctttcagagaaagatcgggggaatggatttttccaagagggga

SEQ ID NO: 681715 - DNA, 156 bp, Homo sapiens
ggccagctctcacggatatacaactaaaatatctgtcctatatatccaagacttcttgagaactgaatcccactctgatattattccagcaattgtcactatattatcataattttcttccctctctactggatcatagtaatcgttgagaagctt

SEQ ID NO: 681716 - DNA, 441 bp, Homo sapiens
tatgctgggctacgcgagatccgatagacgggagatgatacaggaatattactttacgctccacctggatgtcccagtagcctcagcatccaggtgtgtgtatacattctcggacaagaatggctgacatggggactggacggttttcgaaaaacccagatccccctgatggtttagtcctcatccctgacctcaagtggaaccaacagcagctcgatgacttgtacttgatcgccatctgccatcgccggggcatcagatccctacgcgaccttactccggagcacttaccgctgctcaggaacatcctccaccaggggcaggaggccatcctgcagcgctaccggatgaagggagaccatctgcgagtatacctgcactacctgccctcctactaccacctgcatgtgcacttcaccgccctgggcttcgaggcccccg

SEQ ID NO: 681717 - DNA, 301 bp, Homo sapiens
ccctcccgctcacgtgctcgcgatgtactctctgctggccccatgagaagcaagcacatggtctataagcctccaccggaggggactcggttgtgtgttgtgccaccaatgtggccaagacgtcgcttaccatccccggcatcaagtacgtcgtgcctggtagaacagtcatgacccgctactacgaccgcgtcactggcgtatcctccttccgtgtcacctgggtctcccaggcatcagctgaccagcgagcgggcagaccaatacggcggacaaaagtacgggcgcccaagggtaccga

SEQ ID NO: 681718 - DNA, 122 bp, Homo sapiens
atttttctttctgatgaaggaagcaactacagacagcttttatttatttgttcaaagtgacccagtcaattaatgcaaaagaaatcacagcactctccatactacttcaaacaacatacaac

SEQ ID NO: 681719 - DNA, 843 bp, Homo sapiens
tattggggttcacgcgcctcgtgcgaactgtcttctgggtggcccttaatgtcttgtgctctaaggtgctgaggggaaagacgcagggaggtcgtctggcctgacactatgaagggaagtagagaaatacgagttcgacggtgtgagcactcaacgcggcgtgaaacagcagttgctgggagaaatgtccgcaagaagtagtgaatggagcacccgttatgagacacaaattgatttaaatgatgaattagaaaaagcaaatggtgtatctcaagggagaagggtggaaaaaatccatggaaaactcttcagagtagactatcattcgtattgcgtgtcatatgaacgaatgccagtgaatagtatgaggttgcagtccaggggtggtgcagtggtgtataatgccttcaggaatccaggcttcccctaatgtttctattctgccatccatttgtgagtgcctttggtcctcgtgtcaaaagatggtgcgttcgcttctcagctgttcacgttatcatttcagaaaaacgacataggtgccggacaaaatggtaaggtgaagcggtcacgtctactcccctgcagagagttataagatgttgaccagtagttctcttgaatttattgggagtagactgtatcatatgcgccttcggtgctggcagctggaatatagggttactggattcgaaaggaggtgtggacgaagtggggttgcacaaagtttaagggggctattgtctaacgaaattggaagtgggtcttggaaagggaaaattagaattcggaggggaatggaattttaacaaacagggggtttgtaaaggggggagatgatggggg

SEQ ID NO: 681720 - DNA, 288 bp, Homo sapiens
agccagagaagagagatgagagaagagtagtgggtgcagaatcactcgttgggtcttctatgcacagtcaagattgagggtttaactttgagtgtgatgggagctcactcaaagtacaagccgcgaatcttgagctgcagctatacaagcaggcccggtaatgggcctccacgatgtccctgccataggctctgtctgctccacatatcacagtaatatggaccctggtggccctgggaagccgttggaacgccaaccaaaggggtgcccatctgtccccgtgagggt

SEQ ID NO: 681721 - DNA, 250 bp, Homo sapiens
  misc_feature (188)..(188): n is a, c, g, or t
  misc_feature (228)..(228): n is a, c, g, or t
  misc_feature (236)..(236): n is a, c, g, or t
tcccgcagttggggctggcgaagacggaggtaggacacgtactttgcacacctaacaccaggttgaaggtacagaaatttcacagcaaggcaggatcacatttagctgccccctaaagtagtggggcaaggtggagcggggtagaggggggagctcgagaagtttccgctggcagacatgctgtcttnggcggatcttttcacatgggcaagggaaggcttttagttncgaggatntgttcggctcaggc

SEQ ID NO: 681722 - DNA, 113 bp, Homo sapiens
tcttgtcagtctgacaagaaagggaaagtcaggctgggcgcagtggctcaagcctgtaatcccagcactctgggaggccgaggcggatggatcacgaagtgcaggaaacaaga

SEQ ID NO: 681723 - DNA, 680 bp, Homo sapiens
  misc_feature (648)..(648): n is a, c, g, or t
  misc_feature (680)..(680): n is a, c, g, or t
gacacatgcatttcctatcgtgcctctgactttgtgggtatcacagagtgttgacaggcttgtgagcacatcctggcacgcccgaaaggacaaaccatatcatggggaagcagtttggcctcaaaaagcagctttggagtgaggctgaagtccctgctctgacttcactagctctgtgaccttggatgtcattctctcctgagctttggcttagttatctgtaaagcagggctaatgacatcctccttgccaggcttataggcagactagagctggcaggaaaaggccagccacagagcacaggatttgtttttgaggatccatcactcccaaggccttttagttcttggacattccatcactgagcctattggctatagtgtctgtccccatcgaggcccctgtccctgtactttgcttgcttgtctagcaaggcccattgggatgacaggacaaggacagggacacacgactctccttgttttcaaggacaaaacaggaaagtctccctgactccaaacaggatcacttttactcaacgtttttatttattggcccacccatgaaaggaatctgcccacacttgcccttatgatctaggcctttggtggcctgaaaatagaaaatttatttctaagatgaacaatntatttttatcttaatagtgttgttattctgan

SEQ ID NO: 681724 - DNA, 99 bp, Homo sapiens
atgattatgaatttaaaaataaataccaattatggaaatagtactaaaggcttgcgcgcatgaaacattaattggtttaaagtccctttataaagagtg

SEQ ID NO: 681725 - DNA, 267 bp, Homo sapiens
gcctttttattttcccaacccccccaggggttttgaggggtttttattttggggccctctctagaaaagaaatgctccctcttgtttgggggggcaaaagactggcctttttcctcaagggacttccttttcccggggtcctcatgggatccaggtgaaggccgtttttttttgaggggcccttttttctccggtttttttctttgtcctccgctgcttccccccctccccttttccttaggggcctccctccattaaccccttggc

SEQ ID NO: 681726 - DNA, 696 bp, Homo sapiens
gaacaatgatccagtagtacaagaatctaccaaattaatactcatcagttaagtaatcataatgactattagctgataagaactagtgattagtgccacctttcagttacatgagctcccagaggttataccaatgggcatccactctgacatctaggccctgctacttctcacatgacaaataactagtgccctatctcaatcatataccaaatctctccctcagtatacgtaagccttctcgctcgattcagcgtcagattcgttgtccgtcatagcaggcaagctagcaggtggagtatagaaccaaaaccaacatacgcaagaatcttagcatagctccgtcaattacccacataggatgaataatagcagttctaccgtacaaccctaacataaccattcttaatttaactatttatattatcctaacgtactaccgcattcctactactcaacgttaaactccagtcaccacgaccctactacatatctcgcacctgaaacaagctaacatgacgtaacaccctataattccagtccacccatcctcgtcccataggagagccatgacccacacataacccggctttttgcccaaatgggccattatcgaagaattcacaaagaaacaagtagcctcatcatccccaacatcatagccacgcatcacctccttaactctacttctaccta

SEQ ID NO: 681727 - DNA, 235 bp, Homo sapiens
gactaccctgtagccctacacctggcagacgctcagtgaatagtatgggatagaataaatggcttcatactaggggttacttgatttacgatagagtctatagcagggatgagagataaagactagaccacggcaagctgtactatcatagtatactacatactacaacggtagtaccctagtatcccacaaaatgtacaggctgggtaaccgtagctacgacatatcgtaaata

SEQ ID NO: 681728 - DNA, 743 bp, Homo sapiens
catagccctcgttagtaacagccatactcatccaaaccccctgaagcttcaccggcgcagtcattctcataatctgctcacggaacttacatcctcattactgattgctgcctaggaaactcaaactatgaacgcactcacagtcgcattataattctctctcaatggacttcaaagtcttactcccacgtaatagctttgttgatgacgttctagcaacgcctccggtaactctcgtgcttacccccccacgtattaaactactgggagaacgtctctgtgctagtaaccacgttctcctgtatcaaatatcatctctcctacttacagtgactcaacatacttagttcacagtcctatactccctctacatatttaccactagacacaatggggctcacttcaccgcaccacattaacgaacagtaagaaccctcattcacactgagaaaacaccctcatgttcagtacaccgtagtcccccgattctcctcctatgcctcaaccccgacatcattaccgggttttcctcttagaaaaaaaagaaataaggaatcatgaatggacagaagactcgaagcagctcaaaggccaaggggggggcgcgccatggagggacctctaggaggcccgcagatgcgggagctagccgccgtgttttgtggaacagggtggggccatcagagagcccgctattaagagggagcgcgagcaacctggctgacagacatctgcgcctcaca

SEQ ID NO: 681729 - DNA, 881 bp, Homo sapiens
  misc_feature (178)..(179): n is a, c, g, or t
  misc_feature (209)..(210): n is a, c, g, or t
  misc_feature (215)..(215): n is a, c, g, or t
  misc_feature (222)..(223): n is a, c, g, or t
  misc_feature (249)..(249): n is a, c, g, or t
  misc_feature (286)..(286): n is a, c, g, or t
  misc_feature (288)..(288): n is a, c, g, or t
  misc_feature (293)..(293): n is a, c, g, or t
  misc_feature (297)..(298): n is a, c, g, or t
  misc_feature (306)..(307): n is a, c, g, or t
  misc_feature (314)..(315): n is a, c, g, or t
  misc_feature (351)..(351): n is a, c, g, or t
  misc_feature (386)..(386): n is a, c, g, or t
  misc_feature (479)..(479): n is a, c, g, or t
gctcccttatcccttcgctttcgctcgtttccgtcgaggccgacccctgagttgtgagtctggggtctggttggtgaaaaagagcccttgaagctggaagacgggagaggacaaaagcatgtcttcccttcctgggtgcatggtttggatgcagcaacagctacagtggagtctgaannagattgcagagctgcaacaggcagtggttnnagganactgggnnatctctatggaggaacttcggcattncatcgatgaggaactggagaagatggattgtgtacgncnacgcncganngcagctanncagagtnnagagacatgggtaatacagaaagaatctgaggtggntcacgttgaccaactctttgatgatgcatccaggncagtgactaattgtgagtctttggtgaaggacttctactccaagctgggactacaataccgggacagtagctctgaggacgaatcttcccggnctacagagaataattgagattcctgatgaacgatgatgatgtcctcagtattgacttcaggtgatgctgggacgcacgcacacgtccacaacagaccagaacgtccgagaaggcttctggctggggcttaacggaaacgttccggggtcacagaatgtccaagagaagcttctcggaatgctgttcgacagcgcagacgacagacccacggactctggccctaataggcaacctagacacacctgtccggacgcatccccaaactgctgacctggacattacgcaagcaatctcgggcagcaccgaacctaagactggacaccaacgcaactactgcctcacaaagagggctcggaaccaactctcgcacctcgaccccggaagcacacgcgccgacaaaga

SEQ ID NO: 681730 - DNA, 1504 bp, Homo sapiens
tgcagacactgaccttcagctgcctcgtgtccagcgccatggtgccctccaggacagtcttcgtgtgggggaaactggaagatgaccgggcggacagcacgacgtctggggggagctcactcgagcactctgacacgcggccaaggtgccggccgaccaccgagggtggtctggtgctcccccactatgggcctatatcgacattcggccacgggcacacacgctaagcttccccaaaggcattggctggtgacattggccgcagcacacgggctacacacgaggtgaccctacattggggcgcatttatacctggggtcagcctcaggcccttggggcatcttgatcacacacgcactgtggtggacccccacctgatggggtggaccaccttggggcgaacaattccacgaacggacgacaaagggcaaattggtccccacggggagaccgctccaagaactgacaggcctggcatgggcgggcacagaacaggttgggccacccaaagatgctccttggcaccacgaccgaggaccacaccagaaagaacaaacatccgggcccggtggcagtgggcgggacaacgaacagccatcagcacttccaacagcgtcagcaaacccctggggcgccctccacagttggagaacagggcgcgggcacacgcgcacacgacaccgacaccaagcgggcccacactccgcaagctaacccgcggggtcaacacagcacgtgggcacgcccacgggccacggcaacccttgggcaccaacatgtgcagcccctgtgttgcggaaccaatgtgggcaaagtggggcaaacgcagtgggcacaccacccccaaaagcagggccccgaggaaacgtaacccgacgaacgaacagccacccccagcaagcaactgcccaagcaagcccccaacaggagtcacatcaacgcacggaggccacccagacagccagcccgggacaccacacaccagcggccggccctaggcaccgcgtgagccacaacccctgaaaaagaaagacgagcaaagaacaaacaaaggaatgatggacacaggaccccatatgagtggaatgcaggcaaccccacacgagccccagacacgggggcacaccacacaaacggacaagaccaaatgggagccacaccaatagtcacaaccccagctagaccaaaacaagacacaagagacaaacagccaaaaaggcacaccagcaacgacgcagagcaccacaccacaggggcaaccacaggcggcaataagagtctacacaggaggagtaacagcacacacaaagcgggagaccaacggtctctaccaaaagggggcgttcatgcagggaagacacagctgacgacagtgtcctctttcacgaccctatatcccaggagagaaacaggaaagacagacgaaacgaagagacaaacagcacggacaccacgaagacagcaaacacacaagccacgaagaggaaggaaacggcggacacag

SEQ ID NO: 681731 - DNA, 455 bp, Homo sapiens
agtcatttgccctgtgggcctgtaaagcaagattgattgattataatgatgcctcggttaatgttctgaaagatgcatccttaggtgatttcactgttatgctaacatcacagtttacttacacaaacctagatgatataacctactatactcctaggctatatggtatagcctattcctcctaggctacaagcctgcacagcatgttactgtactgaatactgtaagcaattgtaacacaatagtaaatattcatatatcaaaacatagaaaaggtaatgcattgcactatgatgttactagctacaatgtcactaggcaataagaattttcagcttcatgataatctatgggactaccattgtatatgcagctcattgttgacctaaacattgttatacagtgcatgattatacttggcaatatttttcccaataaagagagatcagtgctat

SEQ ID NO: 681732 - DNA, 474 bp, Homo sapiens
tgcttaccttatgcactcacaataagttgaccctgtagccagattagtttgaattgtgagggtccacttatatgcaggtttactctcaatagaacgattacactgagtgtgctacctctccgcgcctcccccttccagctcctccagctcttccacctctgagacagtaagaccagctcctcctacttcctcctcagtcctactcaacttgaaggccatgacgagtcaaaaccactcctacttcatgacacagtacatatgttttccttatgattttcttagtaacagttttcttctctctagcttattgtacgaatcgagtatgcaatacatgtgacacactaaatatgtgttggtagactgtgctaggtcatagcttaggtgtcagtaaggtgaccagtagactattagtacttaagtctccgcgggagtgaaaacctctatgtggattttctacagcacaggaaggttgct

SEQ ID NO: 681733 - DNA, 1406 bp, Homo sapiens
  misc_feature (648)..(648): n is a, c, g, or t
gtttcctcctgacttccccgccgtcgtcgtcgacgacgatcatgagggtaattcgtgcacttgcaggccgggcagtgcggtaaccaaatcggggccaagtttcagggaggtgatcagcgatgagcacggcatcgatgcctcgacggagtgacctaccacggaggtacatgacgatgctgcgagcgtggaacgcatcaaacgtgttactatcacattgaggctcaacgtacggccaatgtacgtgtcgcccgtcgccgatgctcgtggatctaggatgcccgagagactcattggcactccgatgcctgtctcggggcgccgttcggggcgatgagtcttcgcgggcgcggacaaacttcggtgttcgggctcgagaggtgcgtcgcttgggaacaaaggtgcgagccaaaggaggcacgatacactcgaaaggcagcgtgaggatgagtgtgacatccgagtgcctgggactgtttgtcggatgaacacggtacgggcgtggcacggatggcttggttgacccttgctcatcgccacgtgcgttgttgccgcgctcgaattcgcgaccattctcctttgagtggtgagcgtgcgtggagcatggagcggtgctgggtgcgactcgcgggtaagggcgcttggccctcncatttctagccggaagagggggtcctccagcggggcccgtacgctcccccaccggggccacacaattgcgcatttccgacgttcatgggcaacgccttggtgacgttggtgttgcggtgggcacattttggaccccggaaatttaatcgctttcaaagtagcaaacgcaagttcgcggtgcggaagcattggcacccctgaacgaggattgacccaggcccttcttccatcccaagtctcaaccagggccacggcagtcgggtgaggaaaaaattaccgatgacggaccgggaacgaaatccataaggcgtagggcaaattgcgtaaggttagacctagaacaggttcttgcctcccttgagggaaactttattctgtaggccatgccggaggaattgccgctcaacaacggctctggacaacttacccttcccctacttcttacattcgtggtggacgccactggaagaccttaacgcacgtgccgttgggcctcctgggattagtccccagtggatcgtatgtgcagcggctacatctcgggcgccgatgtgcagtgcggggagctttcccgcgcgatggggtccccggggacgtcggcacagctgttgtttgtccccagttgtccgtgtcaccgttctcggtgcggggatagaatggcgacaatgtcgctgcggccggggggcatctccccacgcggacagtgacaccactcctttttcaacttttcccccgtcgattttaatgggtcgcttgga

SEQ ID NO: 681734 - DNA, 229 bp, Homo sapiens
  misc_feature (10)..(10): n is a, c, g, or t
  misc_feature (32)..(32): n is a, c, g, or t
  misc_feature (37)..(38): n is a, c, g, or t
  misc_feature (105)..(105): n is a, c, g, or t
attaccattnaatactttaattttattcaagnaaaannggaatcatatatttgacatgagaactaagtatttcatatcgttaaattagtttgaattagatatgcnttttattatgtatcaggaataacttactttctttaacatttatttgtctttacatttatttgaataactatgtaatgagtatctgtttcctacatttggtaatataggtatacattaataatat

SEQ ID NO: 681735 - DNA, 192 bp, Homo sapiens
gtcgatcaccggacccagacggccctgctctacaacgaagattaaaacatccagccaggcttggtgactcatgcctgtagtctcagctactcaggaggctgaggggggaggtcaaggctgcagtgagctgcgatcactgcactgcactccagcctgtgagataacgcgagatcttgtctctcaaaaataaga

SEQ ID NO: 681736 - DNA, 995 bp, Homo sapiens
gggcagcactggagatctcgccggctttacgttcacctcgagtgtctgcagcatcggctccgcttcctctcctaggcgacgagacccagtggctagaagttcagcatgtctattctcaagatccgatgccagggagatcttggacttctcgcagggagatccacacgtgtggaggtcgatctcgttcagcctcgaaaaggtctcttcgagagctgctgtgcccagtggtgcttcacagtggtcatctatgaggccctagaggctccgggcacaatgataaggactcggctatatggggaagggtgtcgtcaaaggctgatcgacgcaccagtcatataaaatctattgacgcctgccgcatgggttaggccagaggcgaaacctgagacgctcaccgagatagcatacgacgaacgacttcgaccagaaactcgattggactcgagcactgggactggaactcatgacagacattagacattgctacagtggcgcgatgccggaaacggcacaactccgtgtgagtcggttgttcccacgttggtccctggggcttcggcaaaaataacctggagtttgtcgccgggtttcagcgacggatacgtgggcgagatccgcgcaccccatgggtgacctccgggccaaccaaggatccggaccggctggacacacctctgggagagcctgggcgcgcacacactttccctgccacaagggttcgacatcttcttgggcgccaacgactcccctgccgggcgacggaatcgccgaaggacgttggggccacgcagttccaaacacatggggacccgggggatggtaccgtcccacatgggccataggagggacgtaggccaaaaaggccccgtggggacacaacatgcccaacgggggaacgtggtttacccactgggagaaatccgcggtccacacaatgtgaccggggcgacgcgaccacggacccgtagaaacaattccaaggggagggaacaccc

SEQ ID NO: 681737 - DNA, 308 bp, Homo sapiens
agaccggagctgggactaagacagtgtattgagtacaacaaacaccaagacctctccgacctgcccatcatcgattgtggccccctatggtcgttggtgccccagaccatgatatcggcttcgacgttgtccctgtctgcttattgtataactccctccattccaacctggctccctcccacccaaacaacttatcccccctacccggaaacagaccagtgactcttggaactgtccacgtgcagatttccacaagtcaccactttatgaatctgtatccatatgccgagactcggggtaccgagctc

SEQ ID NO: 681738 - DNA, 250 bp, Homo sapiens
ttcatgccatgtcacattgcccccaatgattttaccattacacctttcaccattccccaaacccagcagcctgtgctactgtggggcttccagtctggaatgtccctaccaggaactttctggtttatctgtccttctcctgcaagtgactgagtcccatcgctgcctctgctcccattcacccctagcttggcacagtccaagagaaggggcccaatccagtaggtgttgaatgaatgactgtggacta

SEQ ID NO: 681739 - DNA, 390 bp, Homo sapiens
  misc_feature (72)..(73): n is a, c, g, or t
  misc_feature (370)..(370): n is a, c, g, or t
aagcttcaaaggactctcttggtagggttatttaatgctgctggtaacttgaagttgaagccaatgctcatnncccattctgaaaatcctagggcccttaagaattatgctaaatctactctgcctgtgttctataagtggatcaaaaaagcatggatgacagtataacagttgcagcatggttgactgaatattttaagcccatttttgagaactactgctcagaaaaaagattcctttcaaactatttctgctcactaacaatgcacctgggtcacccaacaggtctgatgggagatgtacaagacgactaatgttggttccctgcctgctaacacaacatccgtttctggcagccctgggtcaaagngtaattttcaacttttcaag

SEQ ID NO: 681740 - DNA, 299 bp, Homo sapiens
ccccttttcaagggtttggggtgaccccataaacattttttgttgaggatgtccaatcaggggtttcaaggcccaggctcaaccccccgtggttgggagggttccctccagtgccagtttttcaccagggaaaattgggcaaaaacaacgagggggcccacctggggaaactgtagccccctccccctccccccctcccttttgcaaagcctgggtttttaaacagcgggggggtttcattcccctttaaggtttccttttaacaaaaggtttgggggtaaaaaaagttttaaaatcca

SEQ ID NO: 681741 - DNA, 1004 bp, Homo sapiens
gggtgatactatgtaatacccatgtactatgaaggatcaagtgtctaccgtatttttcattgtccagtccctattcgacagaggtcttgtaatgaattagcctataatagtgcccagataccgtcctcgtgaatacatcggttaggagcgtgacgtagtacatggactaattattgcttacaaaaccctcttgtccgacacttatggatggaaacaagtgcgtcgacttatgcgggtaacttagtgatctcgtcgcagtctgattcggttggcaaggctgccgtgcggtgtgcttgattgtcgcttgctcatggtcggtcgtctttcacagacgtatcaataagacgtagttgagcattatagttgaccattgagcgtaaatcacctggagttaccaaagcattatttggaccatctgtattgctcaaaagctattttggtcattggtattcagcagcgttgaaattctgtggtggtcaatgcgcataatatgatatcacgcaattatggttttcgaggggtcaagcgcatgcttagcttctacctatatgacgtgaaagttccctcttatgaggcggatttcctctcttacttggactgttagtggattgcatcaattattgcgcacctgcagtcaatcctcgttaggcattcaggggtttcgttggttttccttcgcgtaattgctacggtctggggaggagcatcgcttctcagaaatttaattttctaccctgaaattaacgtacttcgtagactgttaccttgaatacgggcacatacttggggtcccattcgtgccagtgtgggagatttttctcacgagttgactcccatgttgttacaacccatgttcaatcattagtatattcgtgtgaatctgcaaatatggcttggggttccttattttttgttaggcttgttgtcctaagaaccattgtgttgcactacttaattttttggggcacttgtagaaattgcctgctaggaattggttgatccgt

SEQ ID NO: 681742 - DNA, 183 bp, Homo sapiens
gcaccaccatacccctaggcctggagatgtggttgtctttgcccagggcaggtggggtcctgaccacagcctgcagtatctccgggtgttttttatttcactcttaggctttaaagtttagacctgccccctcctctctccctcttgctctcttgctcttgctctatcctcttgcgtagacgc

SEQ ID NO: 681743 - DNA, 369 bp, Homo sapiens
  misc_feature (297)..(297): n is a, c, g, or t
gggcgcttgctaggaacaatcgtgcccaagtgttttgtggatgtgtgttttcagtgctctcaggtatacacctaggagtggaattgctgggtcacatggtaaatctatttattgaagagctgtgaaactgtttgccacagtggctgccccattttccagccccaccagcaatgcatgaagattctagtttctccacatcctccccaacaccagttatttcccttttcaaaaatatagcctcagggtgggggacactggggcaggtgggcttacacctctaatcccagcattcgggangctgagtgagagaattgctgggcttaggagctcaagaccagccggggagacatagtgagaccctgtctctcc

SEQ ID NO: 681744 - DNA, 409 bp, Homo sapiens
  misc_feature (34)..(34): n is a, c, g, or t
  misc_feature (59)..(59): n is a, c, g, or t
  misc_feature (182)..(182): n is a, c, g, or t
  misc_feature (238)..(238): n is a, c, g, or t
  misc_feature (384)..(384): n is a, c, g, or t
gggccttgctgaccccacaagctttcgttctctncagtaacttgttacccagcttctcnaacatcccagggccccaatttgccctgcctggagttccccctggttcttaggacactctaacaagcttcttgtccaacggggtctcccccattcccaaccaggcccttgcacaacaaccccantccgtaaccttctcccctgtaccctgtgccaagcctagcacttgtgatgcctcccnatgccgagggccctctctcagttctgggaggatgactccagtccctgcacgccctggcacacccttcacggttgctacccaggcggccaagctccagaccgtgccagacccaggtgccccagtgcctttgtctatattctgctccncagctgccaggcccaggaggaaata

SEQ ID NO: 681745 - DNA, 374 bp, Homo sapiens
aggctggagtgcagttgcgtggcctgtactcactgcaacctccacctcccaggttcaagcagttctcatgtctcagcctcccgagtagctgggattacaggcggtgccaccacacctggctaatttttgtatttttagtagagatggggtttcaccacattggccaggctagtctcgaactcctgacctcacactgatacgctcacctttgcctcccaaagtgctgggattacaggtgtgagccaccatgcctggcccttaatttttcttttaaaggcaaaaataaaacaaataaatatttatgttccataagattaagaacagtactgtgataccgttccttctatcaaacaaaggaaaaatataaaaaatca

SEQ ID NO: 681746 - DNA, 376 bp, Homo sapiens
tttgcagtgagctgagatcatgccactggactccagcctgggcgacagagcaagactctgtctcaaaaaaaaaaaaaaacaaaaaacacatgttaacactgtgaaattatattttgaggtaccctttgatcctagcactttgggatgccgaggtaggtgggttgcttgaagcccaggagttttgagagcagcctgggcaacatggtgaaccccgtttctacaaaaaataaatggtggcagacacctggagtccttcctagctactcaggaggctgaggtgggaggattacctgagcctaggaggtcgaaattacagtgaactgtgattgcgccaccacacttcagcctagctgacagagtgagactctagctcaca

SEQ ID NO: 681747 - DNA, 944 bp, Homo sapiens
ggactcgtgcgtgacgcgaaggagtcggaacagagaccagaggaccgcactcgggtctgacaagatggccgggctgccccgtgaggtatcatcaaggaaacccagagttgctggcagaaccagtgcctggcatgcaaagaccgaagccaggatgagacgcaacgcccgtcattgacatgtggtcattgctggccctctagggattcccccttcgagggaccggagccttgaaaactggaaactattcgctatccagaagaagtacccattgggcgagccgcctaaaagtacgtatcagtgatcagggagtaggtcatcctagagtgtagacaagttgggaagaatatgtttagctattgggaatgatgacgtgtgtccccagtagtgcagatccgcgagcagttctgctatcgatccagggcctgtgtcaactgctcccagatccagatgatgccattgagcaaatgatagtaggcgcgagccgtcggaaggacctaaggaaagcccatcggcgcatagaaaacagggagagcatggactaagggtatatgccggtgaataagatttcaaattgatacgatccatcgaacgtgtgcgttcattctcctggtctggcaaagagttcctccctcctgggttcggctctaggggacagcagcctagacccgatgccgcactcagaagaggcagagattcttcggccttgcgagtaatgccgtaccatccgagttggcctgagtcgcggcacagcagaacgaggcaaacgttacccggaacggggacgggtaaagggggcccccggtatataacggcccacggaatacacgcggaaagagggggcacgcgggcaacaatacaacaagggaggagcagaaatggagcacagaaaacagaaacagaataaaaaagaaggaggaaacatccaaggcgagacaacacgctcc

SEQ ID NO: 681748 - DNA, 123 bp, Homo sapiens
agtccccatcaacgttggatgccttcctctaagtcctttaggatgtgatagctcatcgctgtccgaagtgtcatacaccaagttgttggcaaacatactcctgaggcaccgcacggactccag

SEQ ID NO: 681749 - DNA, 240 bp, Homo sapiens
tgggaaatttgtaaccaacactcacttaggctgcatcaacgatcggaaggagcagttgaggcagctgttccgatcccttcaagtgcagaagaaagcctctagctgacccccagccggaagaaatgaggccctggcaggtgccgccctggcctctagcagcgggatcccagcacagtgcaccagtcttcaccttcctccagcatggcagctgttttactggagaggcagcctcagcttgac

SEQ ID NO: 681750 - DNA, 394 bp, Homo sapiens
  misc_feature (42)..(42): n is a, c, g, or t
  misc_feature (64)..(64): n is a, c, g, or t
  misc_feature (331)..(331): n is a, c, g, or t
  misc_feature (336)..(336): n is a, c, g, or t
  misc_feature (340)..(340): n is a, c, g, or t
aatctgacgagggagacacagttgacgccaaagggctaacangggggagcgtttgaggaggccngtggctgcctagcaagggtcctgggccagggatttccctgcctgtctgctcttgaagccctgggtcctggtctctcccagctggaaaacacggttttgtagatgtaggacccaggcgcagtggggctggctcatctcagccgctcagaaccacacagactccagcccacccgcagttggctcatggcttccaacaccgcagcaaggctgtgtgtagaaacagcttagttatcacagacatctcttagaattgcagataataagccgnagagnaccnagtgtaaaagtgactgtaagcgaatgcagtttgtggttatagtatccgtaagag

SEQ ID NO: 681751 - DNA, 337 bp, Homo sapiens
tggtgcaacaataaggaagggtccccaggttggggagagccccaagtagagaacaataatgaatcaattagtgtatgaagcaattgttagagacagcgtaatcacaaacaacctgcgggcactatgacctcattccacacgtagcacccttcagcaggaccctataaaactttcgtccagcccttgcctcttggcaggtagccccttctctgctgagctgcccactgcaacatattttcacacaggatcgagtaatgtatgaccttctttaactaggaaaatctcggtgggtggctttaccacctgcaaaactgaccctaggtagttgctacccaca

SEQ ID NO: 681752 - DNA, 201 bp, Homo sapiens
ctcaggaacgctgaatataaccgaagaaaatatattagatcgggacatccatatctggtaaacatatccttcaaacctaagaaagatgcataggctgggtgcagtggctcatgcccgtaatcccagcactttgggaggcctttaactcacaacttaaacaactgtacaagtggtcttcttcaaggcaaccatcatactttg

SEQ ID NO: 681753 - DNA, 168 bp, Homo sapiens
agactggctcaactctagagtttcagagagttagaggaggtggagagatttactccggccatggatcatatgcacttctaccatcaactccgggtttggcagtatttttataaatggagttgggacctgggtgacactcagcctctcttccccttttcctatgttgca

SEQ ID NO: 681754 - DNA, 288 bp, Homo sapiens
  misc_feature (18)..(18): n is a, c, g, or t
  misc_feature (247)..(247): n is a, c, g, or t
  misc_feature (259)..(259): n is a, c, g, or t
ctgcttgtctagctctgnctctgagtagctgggatacaggcacccaccaacatgcctggctaattttttgtatttttagtagagacggggtttcaccatgttggccaggctggtcacgaactcctgacctcaggtgatccacccccgctcagcctccaaagtgctgggattagaggcgtgagctaccacgccctgcctgcccttctaacttaagcaaaaattcacattgcagcacatgatgccaganaatagcactganagtcaagaaaatagccagttgcggagctg

SEQ ID NO: 681755 - DNA, 1173 bp, Homo sapiens
  misc_feature (295)..(295): n is a, c, g, or t
  misc_feature (297)..(297): n is a, c, g, or t
  misc_feature (438)..(438): n is a, c, g, or t
gccacaacagagagagtgagagaaagatgcataccaatgaaaaggtgaacgaggtggtaagttctaagtgacatagaatataggcaatcagccttgcttatgtctgaaatgccttccaaaatatctgtacgttgcacgtacgagatttgtacagaggactgatcaccatcctagtaaacatggtgcagagggtcaaacaacagactgcgagagaaatcatccatcatctcaccatcagatatttcacccatacgtaggcatgtcaatgtagatcacttgaaatgcataactaatntnatcagtcagtaaccttccatgcttactatgcgctgcgttctcgtgagagcgtacgcccgagtgtaataatgaatcactcagcacttgtccattacccttgcttgtacgtgtttgtgctttacctatggatcgatgctcccnttcaggggagataggaccgtcgtttcctcgtccattgaagtcgcaatattagcaagctcgtgcaagtcagttccgtgtactttcaaggaaagactggtagagagagtacatggcggaagagcactctgcacggaggactcttggaatgcgaggttcctgatcacacttcatgtatcgataccaactaggtcacctaatgcaacgtttcagggacttttcaaatggatcctaggcttggatccctgttccctgtaccttctcagcaatacacaggatggagcaagagaattcccgatggttcattgggcgaccttcacttaacattcgacagaggcgctaaagtggtggtgccattaaaccttttcactaaatcttcgaaaaatttggttgctggccttccctttctggacatggttttttattgctttccaagaattttcaatggaagccttttgctggcctctggagcccacaacttggcttaccagtgtaatacgcttcttgcggcaaaacgaagaaatcgttcgggaacagcattactggacattgtggggctccgatcgtaaattgtgtggaggttgccccccagggaaatttggcggacaaacgctagttccgtgaacgtctttcacatatgtgtttctacgggggaacatctacaaaagttaattgtctggcacctaggtgtccgcaactagacgacacaaacaaccacatatgcactcaagcgtgcat

SEQ ID NO: 681756 - DNA, 150 bp, Homo sapiens
gttcatgatgtaatgctctcccccattttcctatgtatgtggcttcctgtgagctgaattgcagtgattgttgtctttcttctgggatctagccacctagcgagtctaccaggctctgagctggtactgggtattcatagatgcgtgttt

SEQ ID NO: 681757 - DNA, 227 bp, Homo sapiens
ttgcccctgacttctgctggtcgtctctagacggactccccctcggggctccttagttaccctactacaattgtgctgggcgtgctggtctgtgcctgttatttttatgctcctctgcgaggctgaggcgggagcatctgctttgaacactggagttggaagttgcatgtgagcacgccactgcactccagcctggcaactagacgtgagactctgtctcaacaaac

SEQ ID NO: 681758 - DNA, 127 bp, Homo sapiens
ctgacctagcagttaccttcgcgtatataaagcagatgttagatcttcacagacttgtgttcttatcagcctctccttttgcttaatgtctcaataatggaatggtcagggtttatgataccgcgaa

SEQ ID NO: 681759 - DNA, 440 bp, Homo sapiens
  misc_feature (57)..(57): n is a, c, g, or t
caaaaaaaaaaaaacaaaaaacaaacctcacagccccagaggctccccagtcctcancagtcttgtcagcctcagaacctgcagctaccttctctaggctcaacaagcacattttcctttgcccatcattcccttaaaaattctgccttggccgggcacagtggctcacacctgtaatcccagcactttgggaggtcgaggcagttggatcacctgaggtcaggagttcaagaccagcctcgccaacatggtgaaaccccggctctactaacaatacaaaaattagccaggcatggtggcacacgcctgtggtcccagctacttgggaagttgaggcaggagaatctcttgaacccgggaggcggaggttgcactgagctgagatcgcaccaccgcactccactgcagcctgggcaacgagcgaaactccatctcagaaa

SEQ ID NO: 681760 - DNA, 278 bp, Homo sapiens
taaattctcgtggcacagggagttaaggatctggtgtgtcaccacggctgctgtggctcaggtgcagtccctggcccagacttcacatgccatgggctttgccaaaataaaataaagtggaaaggtgaaagttctcaataaggaaagaaaaaaaatcataggccgaggttgctaatatctatggtaagaatgaattggctgtcaacttgtgaagaaaaaaaaaccctcgtgctagcttggtggtcacacctcaaacggcaaaagttacagccacggtg

SEQ ID NO: 681761 - DNA, 258 bp, Homo sapiens
  misc_feature (28)..(28): n is a, c, g, or t
  misc_feature (74)..(74): n is a, c, g, or t
  misc_feature (81)..(81): n is a, c, g, or t
  misc_feature (139)..(139): n is a, c, g, or t
  misc_feature (160)..(160): n is a, c, g, or t
  misc_feature (256)..(257): n is a, c, g, or t
cgggtaagagacagggtctagctttttntccctgagtggaatacagtggcatcatcatagctcactgcagcctnaaattcntgggctcaagcgatcctcctgcttcagcctcccaagtagcaaggactacaggcatganccactatgcccagctattttnttttattatttgtagagacagcgtctcactgtaatgcccagactggtcttgcactcctagcctcaagtgatcccctgcttggctctgaagtaccgnng

SEQ ID NO: 681762 - DNA, 350 bp, Homo sapiens
agaaaccccgggtttttaaaggggtttttttggggttttaaccccttttttaaatgggcccgcccccgggggttcggcctttgggggccccccccgggtttttttttaaggggaaaaatactgaaacttttttggttggttggttaaataagggggggtttacttttgggccggttttttaagggggggggggttttcccggttcccccttccaattttttttggttccctttttaatttggtcttggtctggttttaaagcccggggaggggggtggcctttttggttttgccaattgccaggttttaccccttttggggcaggggtaacccttttctttggcccccca

SEQ ID NO: 681763 - DNA, 325 bp, Homo sapiens
  misc_feature (13)..(13): n is a, c, g, or t
  misc_feature (18)..(18): n is a, c, g, or t
  misc_feature (60)..(60): n is a, c, g, or t
  misc_feature (67)..(67): n is a, c, g, or t
  misc_feature (95)..(95): n is a, c, g, or t
  misc_feature (303)..(303): n is a, c, g, or t
gatttcggcacgnggtgngggcgcgggcaggaggacggcaagacctatttataatatagnctcgaantcggtctccctcagatcccccgcgaganggctgctggacccaccccgctgtcccccatgatagaagtctgtaaataccttggtgaccaatgcccacttcccctcctgggtcacctctgatggctgctgtccactgagaacgtgggcagtgtccaaattcctgtactgtaaagactaaaaggcgtttgctctgagactgacaaagggggaaatttcaatgtgtctcctgcaaggttntggtccccctaaggcaatcccg

SEQ ID NO: 681764 - DNA, 190 bp, Homo sapiens
gcgctccatgacatctagaggtggattccactgatgaagagcaggcgactagattggagaggaagatcatgctggctgcaaagaagggactggacccatacactgtactgccccaagggagcttcaggcaccaggaaggccctaatttagtcccctccatttccacaaggagattagtaggctgcatctt

SEQ ID NO: 681765 - DNA, 220 bp, Homo sapiens
  misc_feature (157)..(157): n is a, c, g, or t
tttacaaagcttcagaaaaggattggtgaaggcagcagatctcttacctgggagatgtagggatgtaagaaactgatctagatagttagttacttaggcctcggaacctggcctttaatcatccgcgagcaggactgctctctcggggaaggcgggnagggaccatgttaattacccacaagtgtgttgactcaaagcctttgtcattacatctgtactg

SEQ ID NO: 681766 - DNA, 704 bp, Homo sapiens
acccatctatcatcatcatcacctcatctccctcctttctctctctctaaagtatatacatgcgggtatgtggagtgtgtatatattcatttgatgtgtgtttatatggtgtgtgtgtgtgtgtattccgaggcagatgtgtgcatatatacccaaactttcctgagtgaccttgaaatgtaaatgggtcagtgtgaagctaaagattatagaaccaccttgaattcctttataaacagtatttctaagataagatcagcactaagtctttcaaattaggttgactgtgtatagaacaacgttgcgttatttaaagtgcatctagtctaatgcaatcaaggagtaaattgatagaatgaaccagttagcattagatgggaagaaaatagttcgctttgtcttgtagaattcgatttcatgtgtgagatttttcgtgtgcgcacatatggaacatgaatagaaatatggcccatttcaatatgcaaattcagccactatatagttgtactctttctggtagctaataataataacattgtgaacgtcaagatctgattgcgaaatatgaaaagaagtttatcctttcctgtgttaataacacctgataccgtataacttccctgtgtttgattcttgggggacattcatgttcacacgttctgtcaaagcaatctattattcttggtttacctgatggatcatgg

SEQ ID NO: 681767 - DNA, 418 bp, Homo sapiens
attgtccagctcgaagcccaagactccaggcaatgcggtcgccagcgctcgatcttgaagtcacaggcatgtcatttcgtgcgcacacatattttcatagatctcgcttcgcgatatgggcacgcccatcctccatgtataatgccctgcttccggataggcgtcttgcatgcagatcaggtcaagcaatgcactgtcccaagtcctcttcagggccgttcatgattcatcgcctgtgatcttcttcttgcagctttgcacagctcgagatgcatagcgcatgttctaacctttttcctttttaaaggggcccttctcctcaaagaagccaaccctcttccaggacccttcccacactggctacacacaaactcctccgggtggtacgcgtggcccagcgccaccaggtagcggcccc

SEQ ID NO: 681768 - DNA, 1438 bp, Homo sapiens
caaaccttagggctagggtagcgaggcctgcggggggtttagaatcggcgaggctgagtcctgtcctttctctctccccggacagcatgagcttcaccactcgctccaccttctccaccaactaccggtccctgggctctgtccaggcgcccagctacggcgcccggccggtcagcagcgcggccagcgtctatgcaggcgctgggggctctggttcccggatctccgtgtcccgctccaccagcttcaggggcggcatggggtccgggggcctggccaccgggatagccgggggtctggcaggaatgggaggcatccagaacgagaaggagaccatgcaaagcctgaacgaccgcctggcctcttacctggacagagtgaggagcctggagaccgagaaccggaggctggagagcaaaatccgggagcacttggagaagaagggaccccaggtcagagactggagccattacttcaagatcatcgaggacctgagggctcagatcttcgcaaatactgtggacaatgcccgcatcgttctgcagattgacaatgcccgtcttgctgctgatgactttagagtcaagtatgagacagagctggccatgcgccagtctgtggagaacgacatccatgggctccgcaaggtcattgatgacaccaatatcacacgactgcagctggagacagagatcgaggctctcaaggaggagctgctcttcatgaagaagaaccacgaagaggaagtaaaaggcctacaagcccagattgccagctctgggttgaccgtggaggtagatgcccccaaatctcaggacctcgccaagatcatggcagacatccgggcccaatatgacgagctggctcggaagaaccgagaggagctagacaagtactggtctcagcagattgaggagagcaccacagtggtcaccacacagtctgctgaggttggagctgctgagacgacgctcacagagctgagacgtacagtccagtccttggagatcgacctggactccatgagaaatctgaaggccagcttggagaacagcctgagggaggtggaggcccgctacgccctacagatggagcagctcaacgggatcctgctgcaccttgagtcagagctggcacagacccgggcagagggacagcgccaggcccaggagtatgaggccctgctgaacatcaaggtcaagctggaggctgagatcgccacctaccgccgcctgctggaagatggcgaggactttaatcttggtgatgccttggacagcagcaactccatgcaaaccatccaaaagaccaccacccgccggatagtggatggcaaagtggtgtctgagaccaatgacaccaaagttctgaggcattaagccagcagaagcagggtaccctttggggagcaggaggccaataaaaagttcagagttca

SEQ ID NO: 681769 - DNA, 1684 bp, Homo sapiens
aataaggctaggtagaggctgggtgtgaatcggccgaggcgtcgtccgcaaagcctgagtcctgtcctttctctctccccggacagcatgagcttcaccactcgctccaccttctccaccaactaccggtccctgggctctgtccaggcgcccagctacggcgcccggccggtcagcagcgcggccagcgtctatgcaggcgctgggggctctggttcccggatctccgtgtcccgctccaccagcttcaggggcggcatggggtccgggggcctggccaccgggatagccgggggtctggcaggaatgggaggcatccagaacgagaaggagaccatgcaaagcctgaacgaccgcctggcctcttacctggacagagtgaggagcctggagaccgagaaccggaggctggagagcaaaatccgggagcacttggagaagaagggaccccaggtcagagactggagccattacttcaagatcatcgaggacctgagggctcagatcttcgcaaatactgtggacaatgcccgcatcgttctgcagattgacaatgcccgtcttgctgctgatgactttagagtcaagtatgagacagagctggccatgcgccagtctgtggagaacgacatccatgggctccgcaaggtcattgatgacaccaatatcacacgactgcagctggagacagagatcgaggctctcaaggaggagctgctcttcatgaagaagaaccacgaagaggaagtaaaaggcctacaagcccagattgccagctctgggttgaccgtggaggtagatgcccccaaatctcaggacctcgccaagatcatggcagacatccgggcccaatatgacgagctggctcggaagaaccgagaggagctagacaagtactggtctcagcagattgaggagagcaccacagtggtcaccacacagtctgctgaggttggagctgctgagacgacgctcacagagctgagacgtacagtccagtccttggagatcgacctggactccatgagaaatctgaaggccagcttggagaacagcctgagggaggtggaggcccgctacgccctacagatggagcagctcaacgggatcctgctgcaccttgagtcagagctggcacagacccgggcagagggacagcgccaggcccaggagtatgaggccctgctgaacatcaaggtcaagctggaggctgagatcgccacctaccgccgcctgctggaagatggcgaggactttaatcttggtgatgccttggacagcagcaactccatgcaaaccatccaaaagaccaccacccgccggatagtggatggcaaagtggtgtctgagaccaatgacaccaaagttctgaggcattaagccagcagaagcagggtaccctttggggagcaggaggccaataaaaagttcagagttcattggaaaaaaaacaaaaaaaaaaaaaaaaaaaaaaaaaaaaaaaaaaaaaaaaaaaaaaaaaaacaggcgcgcgcgcgcgcgccccgcgcgcccccaaaaaacctttaaaaacacacaccccgggggggcgcggggccgccccagagaaggaagagggaaaagagggggaaaagggggtgttcccttagggaaaaccggggggaaagaaaaaaagggggggggtctctcccccaaaaaaaacaag

SEQ ID NO: 681770 - DNA, 1806 bp, Homo sapiens
aataaggctaggtagaggctgggtgtgaatcggccgaggcgtcgtccgcaaagcctgagtcctgtcctttctctctccccggacagcatgagcttcaccactcgctccaccttctccaccaactaccggtccctgggctctgtccaggcgcccagctacggcgcccggccggtcagcagcgcggccagcgtctatgcaggcgctgggggctctggttcccggatctccgtgtcccgctccaccagcttcaggggcggcatggggtccgggggcctggccaccgggatagccgggggtctggcaggaatgggaggcatccagaacgagaaggagaccatgcaaagcctgaacgaccgcctggcctcttacctggacagagtgaggagcctggagaccgagaaccggaggctggagagcaaaatccgggagcacttggagaagaagggaccccaggtcagagactggagccattacttcaagatcatcgaggacctgagggctcagatcttcgcaaatactgtggacaatgcccgcatcgttctgcagattgacaatgcccgtcttgctgctgatgactttagagtcaagtatgagacagagctggccatgcgccagtctgtggagaacgacatccatgggctccgcaaggtcattgatgacaccaatatcacacgactgcagctggagacagagatcgaggctctcaaggaggagctgctcttcatgaagaagaaccacgaagaggaagtaaaaggcctacaagcccagattgccagctctgggttgaccgtggaggtagatgcccccaaatctcaggacctcgccaagatcatggcagacatccgggcccaatatgacgagctggctcggaagaaccgagaggagctagacaagtactggtctcagcagattgaggagagcaccacagtggtcaccacacagtctgctgaggttggagctgctgagacgacgctcacagagctgagacgtacagtccagtccttggagatcgacctggactccatgagaaatctgaaggccagcttggagaacagcctgagggaggtggaggcccgctacgccctacagatggagcagctcaacgggatcctgctgcaccttgagtcagagctggcacagacccgggcagagggacagcgccaggcccaggagtatgaggccctgctgaacatcaaggtcaagctggaggctgagatcgccacctaccgccgcctgctggaagatggcgaggactttaatcttggtgatgccttggacagcagcaactccatgcaaaccatccaaaagaccaccacccgccggatagtggatggcaaagtggtgtctgagaccaatgacaccaaagttctgaggcattaagccagcagaagcagggtaccctttggggagcaggaggccaataaaaagttcagagttcaaaaaacaaaaaaaaaaaaaaaaaaaaaaaaggggggggggaaaaatttcccccggggggccccaagttaggggtccccggttttttggtcccagggggcccgtataggggggccgtatttaaaaggaaaggacagggcccggccgtttataaacacgtccgtcactgggaacaaagctgagcttgggaccctttgaggaaaggcccttaactttctgggggggcgcacatacttcgacaaatacctaaagggaatttaacggctccaggaaaattaaaatttccactgtttagggggtgaccaacgctgaattgtggggtgaaagttggtcacgattgtttacattcgggcttattattaattagga

SEQ ID NO: 681771 - DNA, 964 bp, Homo sapiens
  misc_feature (134)..(134): n is a, c, g, or t
  misc_feature (620)..(620): n is a, c, g, or t
  misc_feature (667)..(667): n is a, c, g, or t
ctttccatctctccccagacgagccgtgagactctgtggaccggtagcagggagcagggtttctacagctgctccccactttctcggacccggtcctggacccagcccccgactccgacagcggactccaccantggagtgaggcgagacacgaagtccgtcatcacattcgctgtcgccaggtccggctacggcaggttaccgtccagcatgtgctaggaccttgacgcgccttcatccatctgagtctggttgtacgatggctgtggtccgctgcctgcgtgtgatctaacccgtgcgtgtgggctcttgggccatcaagctccttcatgcgtgctcgtcttgcccaatgtcgtgctcgcggttcgcgctcttggcccatagagcctgggctccaggccgtgccgatgggacctggggcctatcccgtttggtagctgtggcttgatcagaaacttgccgttctaatccgccagattgaggcgctgaacaccgtccggagcaccagtgctttgcttccttcgtttgggcctgcagccgttgcgtgcccctagcccggatgccgctcctgcagggattgcctagaaccccaagtcgcatgacagcgctagacatccagncgtagtatgcgtctcgtaccggggcgcactgtgtgcgagcccgaaanttccggcgaccaggcatgagcacgtgcccgttgcgagattcccgggccgccaagcattcggcaactcaccagagcatggcacgcacccttcccagggcgctcgtggcgctcgcgacgcagtcctcttgccatggcccaggcatgagctggtgtcagtggcctaggaacttgacgtttcccagcactggtgacgcctgactggggatgtgtcccagcgcggcagctcccgccgtgctggactttccaagcttcccgtaccccagagtcgccggtcagccctggtttggacagggcgtg

SEQ ID NO: 681772 - DNA, 1516 bp, Homo sapiens
aataaggctaggtagaggctgggtgtgaatcggccgaggcgtcgtccgcaaagcctgagtcctgtcctttctctctccccggacagcatgagcttcaccactcgctccaccttctccaccaactaccggtccctgggctctgtccaggcgcccagctacggcgcccggccggtcagcagcgcggccagcgtctatgcaggcgctgggggctctggttcccggatctccgtgtcccgctccaccagcttcaggggcggcatggggtccgggggcctggccaccgggatagccgggggtctggcaggaatgggaggcatccagaacgagaaggagaccatgcaaagcctgaacgaccgcctggcctcttacctggacagagtgaggagcctggagaccgagaaccggaggctggagagcaaaatccgggagcacttggagaagaagggaccccaggtcagagactggagccattacttcaagatcatcgaggacctgagggctcagatcttcgcaaatactgtggacaatgcccgcatcgttctgcagattgacaatgcccgtcttgctgctgatgactttagagtcaagtatgagacagagctggccatgcgccagtctgtggagaacgacatccatgggctccgcaaggtcattgatgacaccaatatcacacgactgcagctggagacagagatcgaggctctcaaggaggagctgctcttcatgaagaagaaccacgaagaggaagtaaaaggcctacaagcccagattgccagctctgggttgaccgtggaggtagatgcccccaaatctcaggacctcgccaagatcatggcagacatccgggcccaatatgacgagctggctcggaagaaccgagaggagctagacaagtactggtctcagcagattgaggagagcaccacagtggtcaccacacagtctgctgaggttggagctgctgagacgacgctcacagagctgagacgtacagtccagtccttggagatcgacctggactccatgagaaatctgaaggccagcttggagaacagcctgagggaggtggaggcccgctacgccctacagatggagcagctcaacgggatcctgctgcaccttgagtcagagctggcacagacccgggcagagggacagcgccaggcccaggagtatgaggccctgctgaacatcaaggtcaagctggaggctgagatcgccacctaccgccgcctgctggaagatggcgaggactttaatcttggtgatgccttggacagcagcaactccatgcaaaccatccaaaagaccaccacccgccggatagtggatggcaaagtggtgtctgagaccaatgacaccaaagttctgaggcattaagccagcagaagcagggtaccctttggggagcaggaggccaataaaaagttcagagttcaaaaaaaaacacaacaaaaaaccccgggggcatataaggggggggggaaaagggggttgaatgggccagggaaaaggg

SEQ ID NO: 681773 - DNA, 1585 bp, Homo sapiens
aataaggctaggtagaggctgggtgtgaatcggccgaggcgtcgtccgcaaagcctgagtcctgtcctttctctctccccggacagcatgagcttcaccactcgctccaccttctccaccaactaccggtccctgggctctgtccaggcgcccagctacggcgcccggccggtcagcagcgcggccagcgtctatgcaggcgctgggggctctggttcccggatctccgtgtcccgctccaccagcttcaggggcggcatggggtccgggggcctggccaccgggatagccgggggtctggcaggaatgggaggcatccagaacgagaaggagaccatgcaaagcctgaacgaccgcctggcctcttacctggacagagtgaggagcctggagaccgagaaccggaggctggagagcaaaatccgggagcacttggagaagaagggaccccaggtcagagactggagccattacttcaagatcatcgaggacctgagggctcagatcttcgcaaatactgtggacaatgcccgcatcgttctgcagattgacaatgcccgtcttgctgctgatgactttagagtcaagtatgagacagagctggccatgcgccagtctgtggagaacgacatccatgggctccgcaaggtcattgatgacaccaatatcacacgactgcagctggagacagagatcgaggctctcaaggaggagctgctcttcatgaagaagaaccacgaagaggaagtaaaaggcctacaagcccagattgccagctctgggttgaccgtggaggtagatgcccccaaatctcaggacctcgccaagatcatggcagacatccgggcccaatatgacgagctggctcggaagaaccgagaggagctagacaagtactggtctcagcagattgaggagagcaccacagtggtcaccacacagtctgctgaggttggagctgctgagacgacgctcacagagctgagacgtacagtccagtccttggagatcgacctggactccatgagaaatctgaaggccagcttggagaacagcctgagggaggtggaggcccgctacgccctacagatggagcagctcaacgggatcctgctgcaccttgagtcagagctggcacagacccgggcagagggacagcgccaggcccaggagtatgaggccctgctgaacatcaaggtcaagctggaggctgagatcgccacctaccgccgcctgctggaagatggcgaggactttaatcttggtgatgccttggacagcagcaactccatgcaaaccatccaaaagaccaccacccgccggatagtggatggcaaagtggtgtctgagaccaatgacaccaaagttctgaggcattaagccagcagaagcagggtaccctttggggagcaggaggccaataaaaagttcagagttcacaaaacagaaaaaaaaacccttcggtgccgggcgaaacccagccttgggaaagcccagggcccgggaagccatgggggcggcacgggggaacgcacctgggtggaaggcctctgcccaacggccccccgggggggccctagggccg

SEQ ID NO: 681774 - DNA, 424 bp, Homo sapiens
  misc_feature (41)..(41): n is a, c, g, or t
  misc_feature (63)..(63): n is a, c, g, or t
  misc_feature (74)..(74): n is a, c, g, or t
ccctcctactagacttggcctttaaatcaaatagttgaacncttcagtgcccagatacggtanaattatttaanaaaagctattttgatttttactcagtttctcagtgggtaggaaagtgtcatatattaaaacttggggccaggtgtggtggctcatgcctgtaatgccagcactttgggaggccaagccagaaggatcacttgaggtcaggagttcgagaccagcctgggcaacacggtgaaaccctgtctccactaaaaagacaaaaagcttagccgggtatggtgacacacacctatagtcccacccacttgagaggctgaggtgggaggatcgcttgaacccaggaggctgaggttgcagtgagctgagatcgtgccactgcactccaccctgggcgacagagtgagacttcatcttg

SEQ ID NO: 681775 - DNA, 356 bp, Homo sapiens
ggaaatttgtttacgtattgaatctctgaatgctctatgaaaggaatagcatgaggtgctcgttcgaatcagatgttactgctaaaatttacatgtcgtgatttgaatagtgttgaagaccattaaatcattcaaaataataaactatttttattagagaatgtatacttttagaaagctgtctccttatttaaataaaatagtgtttgtctgtagttcagtgttggggcaatcttgggggggattcttctctaatctttcagaaactttgtctgcgaacactctttaatggaccagatcaggatttgagcggaagaacgaatgtaactttaaggcatgaaaggactggacatgaa

SEQ ID NO: 681776 - DNA, 1468 bp, Homo sapiens
aataaggctaggtagaggctgggtgtgaatcggccgaggcgtcgtccgcaaagcctgagtcctgtcctttctctctccccggacagcatgagcttcaccactcgctccaccttctccaccaactaccggtccctgggctctgtccaggcgcccagctacggcgcccggccggtcagcagcgcggccagcgtctatgcaggcgctgggggctctggttcccggatctccgtgtcccgctccaccagcttcaggggcggcatggggtccgggggcctggccaccgggatagccgggggtctggcaggaatgggaggcatccagaacgagaaggagaccatgcaaagcctgaacgaccgcctggcctcttacctggacagagtgaggagcctggagaccgagaaccggaggctggagagcaaaatccgggagcacttggagaagaagggaccccaggtcagagactggagccattacttcaagatcatcgaggacctgagggctcagatcttcgcaaatactgtggacaatgcccgcatcgttctgcagattgacaatgcccgtcttgctgctgatgactttagagtcaagtatgagacagagctggccatgcgccagtctgtggagaacgacatccatgggctccgcaaggtcattgatgacaccaatatcacacgactgcagctggagacagagatcgaggctctcaaggaggagctgctcttcatgaagaagaaccacgaagaggaagtaaaaggcctacaagcccagattgccagctctgggttgaccgtggaggtagatgcccccaaatctcaggacctcgccaagatcatggcagacatccgggcccaatatgacgagctggctcggaagaaccgagaggagctagacaagtactggtctcagcagattgaggagagcaccacagtggtcaccacacagtctgctgaggttggagctgctgagacgacgctcacagagctgagacgtacagtccagtccttggagatcgacctggactccatgagaaatctgaaggccagcttggagaacagcctgagggaggtggaggcccgctacgccctacagatggagcagctcaacgggatcctgctgcaccttgagtcagagctggcacagacccgggcagagggacagcgccaggcccaggagtatgaggccctgctgaacatcaaggtcaagctggaggctgagatcgccacctaccgccgcctgctggaagatggcgaggactttaatcttggtgatgccttggacagcagcaactccatgcaaaccatccaaaagaccaccacccgccggatagtggatggcaaagtggtgtctgagaccaatgacaccaaagttctgaggcattaagccagcagaagcagggtaccctttggggagcaggaggccaataaaaagttcagagttcaaaaacgatctcagcctccagcttgacctt

SEQ ID NO: 681777 - DNA, 1605 bp, Homo sapiens
  misc_feature (1590)..(1591): n is a, c, g, or t
aataaggctaggtagaggctgggtgtgaatcggccgaggcgtcgtccgcaaagcctgagtcctgtcctttctctctccccggacagcatgagcttcaccactcgctccaccttctccaccaactaccggtccctgggctctgtccaggcgcccagctacggcgcccggccggtcagcagcgcggccagcgtctatgcaggcgctgggggctctggttcccggatctccgtgtcccgctccaccagcttcaggggcggcatggggtccgggggcctggccaccgggatagccgggggtctggcaggaatgggaggcatccagaacgagaaggagaccatgcaaagcctgaacgaccgcctggcctcttacctggacagagtgaggagcctggagaccgagaaccggaggctggagagcaaaatccgggagcacttggagaagaagggaccccaggtcagagactggagccattacttcaagatcatcgaggacctgagggctcagatcttcgcaaatactgtggacaatgcccgcatcgttctgcagattgacaatgcccgtcttgctgctgatgactttagagtcaagtatgagacagagctggccatgcgccagtctgtggagaacgacatccatgggctccgcaaggtcattgatgacaccaatatcacacgactgcagctggagacagagatcgaggctctcaaggaggagctgctcttcatgaagaagaaccacgaagaggaagtaaaaggcctacaagcccagattgccagctctgggttgaccgtggaggtagatgcccccaaatctcaggacctcgccaagatcatggcagacatccgggcccaatatgacgagctggctcggaagaaccgagaggagctagacaagtactggtctcagcagattgaggagagcaccacagtggtcaccacacagtctgctgaggttggagctgctgagacgacgctcacagagctgagacgtacagtccagtccttggagatcgacctggactccatgagaaatctgaaggccagcttggagaacagcctgagggaggtggaggcccgctacgccctacagatggagcagctcaacgggatcctgctgcaccttgagtcagagctggcacagacccgggcagagggacagcgccaggcccaggagtatgaggccctgctgaacatcaaggtcaagctggaggctgagatcgccacctaccgccgcctgctggaagatggcgaggactttaatcttggtgatgccttggacagcagcaactccatgcaaaccatccaaaagaccaccacccgccggatagtggatggcaaagtggtgtctgagaccaatgacaccaaagttctgaggcattaagccagcagaagcaggtacctttgggacaggagccataacaagtcgcagtccaacaaaacaccacacacacaaaaagggggggccagaacccagggcaagcacaccactttggacggccacaaggctaaaaacgggcggggcaccgaggaacacgggtgggagcaccgggaagcaccaaacagaaaaggggcctccggcgcaaaaaaaaanngacaaacacacacc

SEQ ID NO: 681778 - DNA, 1106 bp, Homo sapiens
  misc_feature (190)..(190): n is a, c, g, or t
  misc_feature (197)..(197): n is a, c, g, or t
  misc_feature (227)..(227): n is a, c, g, or t
  misc_feature (237)..(237): n is a, c, g, or t
  misc_feature (239)..(239): n is a, c, g, or t
  misc_feature (264)..(264): n is a, c, g, or t
  misc_feature (335)..(335): n is a, c, g, or t
  misc_feature (618)..(618): n is a, c, g, or t
  misc_feature (1106)..(1106): n is a, c, g, or t
taaggcagtatgtcgaccgaggccgtctgcgagcctctccgcacgctcgcgcagtctccgccgcagtctcagctgcagctgcaggactgagccgtgcacccggaggagacccccggaggaggcgacaaacttcgcagtgccgcgaccaacccagccctgggtagcctgcagcatggccagctgttccttnccctgcntggcagccctggtcctggcccaggctcctncagctttagncngatgttctggaaggagacagctcangaggaccgcgcttttcgcgtgcgcatcgcgggcgacgcgccactgcagggcgtgctcggcgggccctcacnatcccttgccacgtccactaccttgctgggcaccggcgagccgcgggctgtgctgggcgtctccgcgggtcaaagtggactttccctgtcccggggcccgggaggcagaggtgcttggtggctgcggggagtgccgccgtccaagggttggaaccgagggctacacggttcccgcagtgtgcgactggcttgcgtacccagagtccggctcaccgacgtctccctggcgctgagcgaggctgggccccaacgtactcacgggtatctatcgctgtgagggtcnaggcacggggatcgcatgacagcgagcgaccgctgtggagggtccaggtccacaggggttcgtctttcgtctaacgagaagggcgtctgcgccggctatgcggtttctccgttttcctggggggccaagaaggcctgttgcccgcgattgaggaccacatctggcacccggagcaaggttctatgacggcgtaccttgggggggtattgaagcccacgtgttaaattgcttgggcatgagcttgagcgagaatccggaaacagcgggcagggtattaccccagatcgagaaaccccccagagaaagaggccgtcgtataccggagacacaatggaagtaggggttacacccccggggtggtcacggagacacatcgtgtagtaggtgggaggcccgcagcaagtatcgcaccacataataggagtcacggatataggctcgtagaagcgacaaatcagagtaaacatagtgtcctgggttaaccaccn

SEQ ID NO: 681779 - DNA, 1362 bp, Homo sapiens
agcgggctcccggctctcgcctcactagtgagcggctctcggtgcagcgtggacagtggcgaacactggcctgcgcccacgagagcgcgcgacgctgccctggaacgggacctgccatccttggccccctcagtctgcccactctggtgatttccatgcgtgctctcctggcgcgctgcacggatgccctctgtggcctaccaggccacggccggcgagctggcagctagtcgtccaggacctgccaccgtcgtcgggttccgtccagcgtgagttgactgctgggtgctgcggtgagcctgtgggttctgcctgctgcctggctttgcttcaggctagccccgcgcatactcggtaggcgacctgcgtggcttgtctcggactctgacgtgtccactgacacgccagcaattcctcggggggttgactcgaactcacagcacccacgtatctgcgttacaggccctgtgcaatgaacaccgaaataccctcgggctagacggcgtctgcacctgactttaccccatggcacatcgagacttgagccccacagctggtggcataacgagctctcaaggtccccagtgactccacgccctgttactggcgccggctgcttcctaaccgtagccccacgggaaggctcacgcaactgtacctttcctgcgcacgctttctgccacacccccagacactatacccagcgaaggcgcagcctctatccacctggggcacccatacaatggtcccaccgtcacgtacttccccgtacaaggcacgcgacgtaaatacgcaactagacatgcagccggattcggcgggaagccacggcagttactgcaggaagcatacgcacaccgcgctggcagacgccaatgagcacaggcggcttcttatataacaccaccttggttgacccttctgcaacggccttaaacgccacgacctactcgcctcaccctctgggcagcacaaacgccttttgctcggcaacgcactgtgcacttgcaaaccagtcggcccgcgcagcctttgacaccctttgcacactatacacaaggggctcattgcacacgttggtgcagcgtgtgcccccgcgttgacacttggctccccgacacgcacacgagacacacatatgggccaccatccggctgttgggaacctttgcacaccttctcctaacctaagacgtctggtaggtataacgaacgcccgctggtgacacccgtgggccacaccgctttggacagccggttgtcaaggccgacatgacaaccatgccacaccacaggcctactttgaaacgactgtggcgcctttcacaagtcttacagaccatggtgttgcgagacacccatg

SEQ ID NO: 681780 - DNA, 903 bp, Homo sapiens
accacacattatttacgaaactgtctttcctctctaaagcccttactaaacaaatctgtctctaaggtttcccaaataagtctcccgcaaattgagaataaccaatgctccggctaaatcaacctcgacccccctcggggttatacccccgccctcttggccctttaacccccccccctctcctgctagtaagatcgccgtcgcccacaggcctttgattccgccgtcgttttccggctcaccccagggccctttccttttcgggaaaaccgctgctttactataatctccggaaccccgcatattcttagtaaaacccgttgggcaacccgctccacacttcccgggcgttggaccccaatgagaagcattcaatacgggagtggataaagaccccctcttttcccccccccatgggctcgaaccccctaaacccgctgtgttccccctattagaggccccccctcgggccaacccgcataatatttgaaaatctgcggcacggccccttaggaaaactgggactattatcaccccgcgaatatctccgcggcggaaatctaagcccccaccaagacagccattgtcttactgcgggcaagagttttaacaatgcaaggaaagtttggggaacaccaatactaaaaagtgggacaacgcacttgtgtggacaccccgcgctgggaattgtccccacttgtgttgatgagatggaggagagggaagtgcttctctcaaacgttaggcctccttctttatttacgccctcaatagaaggggataacccgccttaatagtgtcatcagaagaagtgacaacaccgttctgcgttctcgactttctacccaccagtgtggaacaattttatccccaaaacaaattttacaaaacaaaaaacataac

SEQ ID NO: 681781 - DNA, 1422 bp, Homo sapiens
  misc_feature (1393)..(1393): n is a, c, g, or t
  misc_feature (1403)..(1403): n is a, c, g, or t
aataaggctaggtagaggctgggtgtgaatcggccgaggcgtcgtccgcaaagcctgagtcctgtcctttctctctccccggacagcatgagcttcaccactcgctccaccttctccaccaactaccggtccctgggctctgtccaggcgcccagctacggcgcccggccggtcagcagcgcggccagcgtctatgcaggcgctgggggctctggttcccggatctccgtgtcccgctccaccagcttcaggggcggcatggggtccgggggcctggccaccgggatagccgggggtctggcaggaatgggaggcatccagaacgagaaggagaccatgcaaagcctgaacgaccgcctggcctcttacctggacagagtgaggagcctggagaccgagaaccggaggctggagagcaaaatccgggagcacttggagaagaagggaccccaggtcagagactggagccattacttcaagatcatcgaggacctgagggctcagatcttcgcaaatactgtggacaatgcccgcatcgttctgcagattgacaatgcccgtcttgctgctgatgactttagagtcaagtatgagacagagctggccatgcgccagtctgtggagaacgacatccatgggctccgcaaggtcattgatgacaccaatatcacacgactgcagctggagacagagatcgaggctctcaaggaggagctgctcttcatgaagaagaaccacgaagaggaagtaaaaggcctacaagcccagattgccagctctgggttgaccgtggaggtagatgcccccaaatctcaggacctcgccaagatcatggcagacatccgggcccaatatgacgagctggctcggaagaaccgagaggagctagacaagtactggtctcagcagattgaggagagcaccacagtggtcaccacacagtctgctgaggttggagctgctgagacgacgctcacagagctgagacgtacagtccagtccttggagatcgacctggactccatgagaaatctgaaggccagcttggagaacagcctgagggaggtggaggcccgctacgccctacagatggagcagctcaacgggatcctgctgcaccttgagtcagagctggcacagacccgggcagagggacagcgccaggcccaggagtatgaggccctgctgaacatcaaggtcaagctggaggctgagatcgccacctaccgccgcctgctggaagatggcgaggactttaatcttggtgatgccttggacagcagcaactccatgcaaaccatccaaaagaccaccacccgccggatagtggatggcaaagtggtgtctgagaccaatgacaccaaagttctgaggcattaagccagcagaaganggtatcattnggagacgaggccacattcg

SEQ ID NO: 681782 - DNA, 470 bp, Homo sapiens
  misc_feature (75)..(75): n is a, c, g, or t
  misc_feature (422)..(422): n is a, c, g, or t
tgatggcgctgatgacaccaccatgcccggttccagcaccgtgtcgatgtcctcgcgcagctccagccccgcttngcggccatagtagtggctcaaggtgccgaacgagtggccatagccgaaggtgcggtactgcagcaggtcgtggcgcaggaagatctcgttcagttcccgagcgatatcgctgcagcgcatgccggggcgcaccagtttcagcccggcttcgtgcacttcgacgttggcctgccacaggcgtaggtactcgtccgggcagtggtcgaggaacagcgtgcgctccaacgcggtgtaatatgccggcgatcatcgggaagcaattgaggctgaggatctcgcttttcccacccggcggctggtcacccgggttatgcgccccatcggtgttgaacccggactggaaccangtccaaggtgttatcagcgccattcaggggatcctctagaagtgacct

SEQ ID NO: 681783 - DNA, 1475 bp, Homo sapiens
aataaggctaggtagaggctgggtgtgaatcggccgaggcgtcgtccgcaaagcctgagtcctgtcctttctctctccccggacagcatgagcttcaccactcgctccaccttctccaccaactaccggtccctgggctctgtccaggcgcccagctacggcgcccggccggtcagcagcgcggccagcgtctatgcaggcgctgggggctctggttcccggatctccgtgtcccgctccaccagcttcaggggcggcatggggtccgggggcctggccaccgggatagccgggggtctggcaggaatgggaggcatccagaacgagaaggagaccatgcaaagcctgaacgaccgcctggcctcttacctggacagagtgaggagcctggagaccgagaaccggaggctggagagcaaaatccgggagcacttggagaagaagggaccccaggtcagagactggagccattacttcaagatcatcgaggacctgagggctcagatcttcgcaaatactgtggacaatgcccgcatcgttctgcagattgacaatgcccgtcttgctgctgatgactttagagtcaagtatgagacagagctggccatgcgccagtctgtggagaacgacatccatgggctccgcaaggtcattgatgacaccaatatcacacgactgcagctggagacagagatcgaggctctcaaggaggagctgctcttcatgaagaagaaccacgaagaggaagtaaaaggcctacaagcccagattgccagctctgggttgaccgtggaggtagatgcccccaaatctcaggacctcgccaagatcatggcagacatccgggcccaatatgacgagctggctcggaagaaccgagaggagctagacaagtactggtctcagcagattgaggagagcaccacagtggtcaccacacagtctgctgaggttggagctgctgagacgacgctcacagagctgagacgtacagtccagtccttggagatcgacctggactccatgagaaatctgaaggccagcttggagaacagcctgagggaggtggaggcccgctacgccctacagatggagcagctcaacgggatcctgctgcaccttgagtcagagctggcacagacccgggcagagggacagcgccaggcccaggagtatgaggccctgctgaacatcaaggtcaagctggaggctgagatcgccacctaccgcgctgctggaagatggggagacttaatcttggtgatgcctggacagagaatcatgcaacatcaaagacacacccgcggtatggtggcatgtgttggacctgacccaagtctgaggcttagcaccagaacgtccttgggggcgggcctattccgtcaaaaaaaaaaactcggtcttgggggaaaggtaagcgtctttccccttaggattgcttgttagcctcatcacgcaaaaagaaagaaaaatca

SEQ ID NO: 681784 - DNA, 317 bp, Homo sapiens
cgctggtcacttattgttggcccaggtcaggtctcccaaaggagtgcccagcaatcgctttcagagtctcctgcagagtcaccatcaagcagacctcttcctcgggaggccgtgtcgccaccccaaccctgtgacttctggtatcaccatctgctgtcacgctgggctccagtctctgtgcgatggcctcaacgggacatcaaagcatagctaccagtttgaaggtgccctcaggcttggcaggaaccacgtggacaaaagtcttgtagagcacagcacccttgggcagcctggtgatcagatccacagcctccgtg

SEQ ID NO: 681785 - DNA, 1421 bp, Homo sapiens
aataaggctaggtagaggctgggtgtgaatcggccgaggcgtcgtccgcaaagcctgagtcctgtcctttctctctccccggacagcatgagcttcaccactcgctccaccttctccaccaactaccggtccctgggctctgtccaggcgcccagctacggcgcccggccggtcagcagcgcggccagcgtctatgcaggcgctgggggctctggttcccggatctccgtgtcccgctccaccagcttcaggggcggcatggggtccgggggcctggccaccgggatagccgggggtctggcaggaatgggaggcatccagaacgagaaggagaccatgcaaagcctgaacgaccgcctggcctcttacctggacagagtgaggagcctggagaccgagaaccggaggctggagagcaaaatccgggagcacttggagaagaagggaccccaggtcagagactggagccattacttcaagatcatcgaggacctgagggctcagatcttcgcaaatactgtggacaatgcccgcatcgttctgcagattgacaatgcccgtcttgctgctgatgactttagagtcaagtatgagacagagctggccatgcgccagtctgtggagaacgacatccatgggctccgcaaggtcattgatgacaccaatatcacacgactgcagctggagacagagatcgaggctctcaaggaggagctgctcttcatgaagaagaaccacgaagaggaagtaaaaggcctacaagcccagattgccagctctgggttgaccgtggaggtagatgcccccaaatctcaggacctcgccaagatcatggcagacatccgggcccaatatgacgagctggctcggaagaaccgagaggagctagacaagtactggtctcagcagattgaggagagcaccacagtggtcaccacacagtctgctgaggttggagctgctgagacgacgctcacagagctgagacgtacagtccagtccttggagatcgacctggactccatgagaaatctgaaggccagcttggagaacagcctgagggaggtggaggcccgctacgccctacagatggagcagctcaacgggatcctgctgcaccttgagtcagagctggcacagacccgggcagagggacagcgccaggcccaggagtatgaggccctgctgaacatcaaggtcaagctggaggctgagatcgccacctaccgcgctgctggaagatggggagacttaatcttggtgatgcctggacagagaatcatgcaacatcaaagacacacccggatagtggatggcaaagtggtgtctgagaccaatgacaccaaagttctgaggcattaagccagcagaagcagggtaccctttggggagcaggaggccaataaaaagttcagagttca

SEQ ID NO: 681786 - DNA, 334 bp, Homo sapiens
  misc_feature (1)..(1): n is a, c, g, or t
  misc_feature (230)..(230): n is a, c, g, or t
naaaagggataaagcaggctgctcgtagtagtgatgctcaggttctcttccacgctcacgctatgggagtatgtttttttgatctttgagtataacttgctgctgctcattctttgggtacacactgagtttatgagctgtaacactcttcgtgaagctctgcagcctcaatcctgaggccaccgagaccatgaacccatgggaggaatgagtaactccagacgcgctgncttaagaggtgtaatactcactgtgaaagtctgcagcttcactcctgaagccagtgagaccacaaattccaccaggaagggaagaaactccaaaaaagtctgaa

SEQ ID NO: 681787 - DNA, 103 bp, Homo sapiens
tgtcccagcttgtcagtctccaccatacactgaattggtagcttcctggatacctgtagcccacgggcactagctaagaagccagccacaccaccagaggcaa

SEQ ID NO: 681788 - DNA, 122 bp, Homo sapiens
gcgcgccatgtatcttggcatgcccgtatgtgtgtggacgcggtcaagatgtgagagaagttcaaaacatggtgccccataggcagcatacactctgtacgggggacatctcgtgctttttt

SEQ ID NO: 681789 - DNA, 390 bp, Homo sapiens
atttatctggtatcttagcttattcttagtctggctaaaggttgtcaattttgttgaacttttcaagaaaccagtggtttgtttcattgattgttcattttttaaagtttcaatttatttgttctctgatctttattagctctttccttcaactaattttgggtttggtttgcttctgcttttctcatttttttaagatgcatcattagaaggtttatttgaagttcttcctttttttgatgtagacagttatagctataaacttccctctttgtactgcttttgctgggtttcggtatgttgtgtttccttaatcatttatttcacgaaatttttcaatttccttctcaatttcttcattgacccactggtcgttcaggagcgtattgt

SEQ ID NO: 681790 - DNA, 409 bp, Homo sapiens
  misc_feature (1)..(1): n is a, c, g, or t
ncccctcacggtactcaagccggggggacagagactccgtctcaaaaaaaattattaagcaacttatacacatgtgttcatagcaacactttttacaatagctaaaaagtggaaatatcccaaatgtcttatcagctgatgaagggataaaatgtgatgtgtctgtataatgaaatatgattcagccataaaaaggaatgaagtattgctatatgctacaacttggacgaaccttgaataaatgagagaagccagtcacgaaagggcacacattatatgattccatttacagcatatgaaatatctggaataggaagatccgtagagacagaaagcagatgggtggttgccaggggctgggggagggagcaatgtgcgaattactgcttaattgatctagggtttcctt

SEQ ID NO: 681791 - DNA, 623 bp, Homo sapiens
gttgtggtttgttagagggtattgtggaaagtgtcatagggatgtcccgtgtgttgtcccatctgccctccctgtttctccacaacagcctggggttgtccccgctgggctcacgcgttcgtgggagctcaaggccaccttggaggaggatgccagcgcacttcctctctcggagtccctcagacatctccagatgtgccagacaaataggagtgagtgtatgtgtgtgtgtgtgtgtgtgcacactgtgtgtatgagtgcgcataatctggtgcctgggatcgtgcatccgaggggccagggacaggcttggtgtgcagagggagacggacctgcgtggaggcttatgaacgcttctcccttcttgggatctgccctgcccatactgagcctgtcaatagtgcctggtgatagcccatcgcagattctgaaacgggccctctgtggactgtctctattatctgggttccgggaggcgagagaggagtgaccgggctctggcactgagatcatggaagatgggacccctgatactcgttgcaaccatgggtggttagtgagagcctcatatggctgctgtggaacatctgtgaaagagcgttaatccactatgcgaaattacc

SEQ ID NO: 681792 - DNA, 238 bp, Homo sapiens
  misc_feature (26)..(26): n is a, c, g, or t
gtgtcatccccttcgtgccagctctnattccactcaaatagctgcttgtcaaggagggcaggagcactgtttgatagtaagaaatattccttctggaggttgtctcaaccagtaagacccctgtcctaacaagggacacactctgggtattcagtccacacggactagggaaaagggacaggctttcaacaagggggccaaaggatcaaggttctaaaggattctgattcttgacgaa

SEQ ID NO: 681793 - DNA, 109 bp, Homo sapiens
ttaaaggatagaagtatcacgtgcgcaaggcataggcaagtatcggggcatcaggcaagtatcggccctgcaatgtgtgtctgctgtgagaagcgtccacttgagccgc

SEQ ID NO: 681794 - DNA, 945 bp, Homo sapiens
  misc_feature (386)..(386): n is a, c, g, or t
  misc_feature (416)..(416): n is a, c, g, or t
  misc_feature (427)..(427): n is a, c, g, or t
  misc_feature (468)..(468): n is a, c, g, or t
  misc_feature (522)..(522): n is a, c, g, or t
  misc_feature (556)..(556): n is a, c, g, or t
  misc_feature (560)..(560): n is a, c, g, or t
  misc_feature (562)..(564): n is a, c, g, or t
  misc_feature (619)..(619): n is a, c, g, or t
  misc_feature (621)..(621): n is a, c, g, or t
  misc_feature (642)..(642): n is a, c, g, or t
  misc_feature (647)..(647): n is a, c, g, or t
  misc_feature (649)..(649): n is a, c, g, or t
  misc_feature (670)..(670): n is a, c, g, or t
  misc_feature (677)..(679): n is a, c, g, or t
  misc_feature (681)..(681): n is a, c, g, or t
  misc_feature (686)..(686): n is a, c, g, or t
  misc_feature (732)..(732): n is a, c, g, or t
  misc_feature (738)..(738): n is a, c, g, or t
  misc_feature (740)..(740): n is a, c, g, or t
  misc_feature (743)..(743): n is a, c, g, or t
  misc_feature (748)..(748): n is a, c, g, or t
  misc_feature (755)..(755): n is a, c, g, or t
  misc_feature (760)..(760): n is a, c, g, or t
  misc_feature (771)..(771): n is a, c, g, or t
  misc_feature (781)..(781): n is a, c, g, or t
  misc_feature (784)..(785): n is a, c, g, or t
  misc_feature (793)..(794): n is a, c, g, or t
  misc_feature (853)..(854): n is a, c, g, or t
tgcctcgggtacaagtccgggccatatgtccatctgtcaggggctcagggaatcttacccagccacctgtcctgggatggaggggtcagctatccacccccttggtcgtcatagagaccgccattcccagtcatggatgaagatatttgggccaccagggctccctggcccttcacgtaggaaatagacacgtgctttttaatgcaggacactttgagtgttacaaaatctgtagacctggcagtagggtcatgatgttgggaagggtgtagtgccctaggttggtgacagaagggacagacacttgtgcacaggtgtctttggtgatggggtttttttttttataacttagtaaaaaaaaaattgtttttggaattctgtctctnggaaagctcaaagccaggctagcctgaggntggcgcagggntctccttccggtcccttcgatctccttgagaattaagagcnggcagctgctgatggtgtttcccaacccccctcatttcccaagaaacccccagnttcaggtcctcatggggaggggagggcacgtctngatncnnngggaacttcgctcaggagggcctccctttcccttctccctcagagttttcactgncngtctcgtctttagaaagctgntttgnanttccccccgcccccagttggnaccggtnnntntaccngggatatacggattttcctcttggtgcaggcttcttatgccgtggntatacngngcnggaangagaggnctcangggagagaccngtgtggaacnccnngggggttnngcttggttccttaactaggtttgtgcgtgcccacctttcctgcctgggttgtgcccccnntctccttggcaatggcgggctcctggcctcctttccacaggtgtgccatcccgtgcttggccgttgtggtcttccccgtgccttggtctcg

SEQ ID NO: 681795 - DNA, 845 bp, Homo sapiens
ctgggtaacatggtgttggccccactcccagatccgggaccccaagcctggctgtagccccgtgagcccttgccctcagtccctgcggagccctcagcttgtgacaatccctacgtcccttccgcaaaccgtgtgggccctcgtgagaacccacatgaagcggctgttggtgccagtggggaagagtgggagttcgaggatgacgatgccttctaccgggtggccgccaatgtcttccagcagaccagtctcctgcccggagggcctgtggctggtgggtgtccgaagtgggagacaggactcctgcctggatggccagctcacactgcctagaccctgcgccatgtccctgacagacaggggagttgatgagctacgtgaggcattgtgcttgagctgcctgggtgggtggacttgggtctcttggcgggcctgggcagttggctctgggcccagcggactgtgtggcacttagcctaccactatacctgtggcagtgacgcgaggcagactagctcaccgcaacagcgagggacaatggggcctgactggtcgagggtccccaagagacagagcgaaagtgatggcgatgttatgaccttgggggtcgccttcaatttgtaggatctgattaccctttcaccggaagggaagcaggatcgctcatccactgcgtatgccctcttggttccttgatgtgggggaagtcattggccccaggaaccaggccagtggaaccaaagagggctcgtgattggtcaagggtttgtgcccacggtagcctcagggcccttggtagaaaatgggcccagggtaaggggggtgcctccctccccttggagact

SEQ ID NO: 681796 - DNA, 276 bp, Homo sapiens
accatcatcagtttgcagcgttgcatgtcagcaaaaatactccaggacattatcatagtctctgacagtcttgatgcagatagggggtgcccatcttctgtgctctgtggtacatatctagtgtcgccaaagtagcgtgcacggtacagcaagccttccttctgctgcttctccttccagaagttagtaccggaggtaggcgatataatcatactatccacattccgctcgactgttttgaggctggagcatgatagtactcttcggaaaaagtgt

SEQ ID NO: 681797 - DNA, 271 bp, Homo sapiens
cgggggggcccggggttttttgtcccccccctaagaatccccattgccccctttgttttttcccgtccccgggggccccgggggttttttaaacccggcgggggtttttgggggggggataaaccctgtttttggggcccccccccggttaaacctaaaaaggtcttttttttttttaaggggttggggttgggtcctttccaccccttgggcctgaaaaaatgaaaagggggactttgggatccttttttccattaaatttttttcccca

SEQ ID NO: 681798 - DNA, 307 bp, Homo sapiens
agtgtaggtagatgttaagcaggcaagcgtgatcctggtgtctcttactagagaaggtggcaggtttcctcagccttttaccgtggtgctggctttcccctctccccactgtcctcacagatcacagcctcaaactgaaggtgtctggcttcataactagcaccaccttcaatctctgcctgtggaaagtcacctgccatctttcgaggtccagctcaaacgcgacctggtctggcaggccttctttgatgtccagcccacgtctttctctcttctgaagtcccacgacccttgaaattgccccggg

SEQ ID NO: 681799 - DNA, 1722 bp, Homo sapiens
  misc_feature (264)..(264): n is a, c, g, or t
  misc_feature (515)..(515): n is a, c, g, or t
ggcaaagcttcgcaagttcagaagcacagttggacgcctgaatgggcgctcaggtagccgagacgagcgggtctgcctgaagaccaggacttcgtggataggatgccgaagatataccaggacataagaagttaggggcgcagaggcaggaccgccgggtaggacaggcgctagcgcgctacgcagggctctctagtctctctctccagtatccgtctgtcgaggcgcctcacaataggatggtcttcactcgttgatcagganatcggctatggcagtgaacgcgacggtagtaccggatgtgagctgcgagagagaacggacacgcaacagcgagcaagtaatggatttcacacgagattgtccgtacgtagtggttcgaatacctcttgcatgtggagagtagagcgaaatacaggaagtcatacatcgcccaggaacaatcaacgcacatatagaatatcagttttcacggttctctaggcgccggagtgcggcgatagctccttgaccgntggatcgggatcaactcacgtcacgccaagggggaaaccgagaggcacacagggcacttacaccaggtgccttaggatgttagaaacacgtgtgccagcaacggcaagcgattgcgccaggaggatgtcgaaccacgtaacgcgcctataagagtcactactccgcaacctcccactgtcacgtagcctggtaccgcgagttgaccggtccccttcgagcttgcgaggggcccaattcgaagcgcattcaacgcgaagacaacaaatgcatgaggaattagaacgaagctgttcggggaaaccttgggcggctcttcctatatctcattccatcgtggaactcccattcataccttgggacttttcttccaagggaaccgcaagagccccacccatggcaccatcacggagttccccttaagagggtccacccggtagtaatcccgttccacccgtgacggattgttctggggaagtagggagcaatcggacagcaaggcttacgacccaccaaggccaaccaattcgacatggcccacgggcttggcattagtttacacgcgttacacccacacatggggctttggcaccttggtcactattaaggaccaaggcacgatttcccacaacgcttacattttgacgcaaaggccaagtggcgaggcaagcgaggcgatcttgcgaggctcgacgccggatcgagttgacacaaacggtcacagcacgctcagttcaggaaacatatgtcgaacaggcgcaaagcacatctagtggacgagatacagaagaagcagacgaaatacattgctgagcacaatcacgatcggtacacaccaaacactctcggcgaaacacaaaaccacgcggcgacacaccatgatatctcaccaacacgtaggtacacagtcgggacaccatcaccacacccaccgacaccgagtagccaacgagggggtactcacaaaagagtctggggcgcacgcaccagccgaacaccaaagatggaggcaagggcacccatggttacggcacagcaagggcaggacgtggacagagttagccagtagtgtgcgagtgtacattgtgagtggggtatataagcgagcagacagacgaccacagtacacaccatgcgagcgaaaatcatagacagggcacacaaggagcaacggctacaacaagcgccacccacacagagagccagtag

SEQ ID NO: 681800 - DNA, 99 bp, Homo sapiens
ttaaacattacttttcatacttgaaataaacatttagttttttaaaaaataaatgtttatttcaagtatgaaaagtaatgtttattttttaaaaaacta

SEQ ID NO: 681801 - DNA, 1122 bp, Homo sapiens
agcggggagagagaggatccagcgctggagagtttttttgtttgtattttttttaatggagtccatggctcctgggccccgaaatgtctttatgctgacgaaggagtattcggcggcattctcacaacgtggcttcatggatgactagaacaccagttgattctcgaagagtcacctctgttgccgggagaatgattggggctggctgcatgtcaagaggaacgattcattcttctcccatgtcgtggtgaagcttcggggacaaggggggtgtgtaattcaggtgcaagggagaccttggggttcggggggacatttcccattccttatctgctcgatggggaatgggggggccgctgtgaggtttcctgtcatgggtgagctatctctcgaggagagggtggccctgtgggagacgttaacagtgtgtaagctcttagggctcagggacccttcttagagaacggttgtgtgtggaaacatcctagttgggtgtcaacacttacgtgagccagacaatagctagtagaactgtagccttggcgcgctaaaagtgtgtctgtcgcgttcccacaggggtgtgttctacagcagacagtgtctaggtgtgtaaaagtgaaacgcgggtttgctgtcccctattaacctaggatttctcgggggggatgaacgcggtggaattctaatacggtgagtggttgtgaccaaagacctattgggtagcgcggagcgaatagaacctcgtgggggtttgtgcggtaaaaagatatggccaataacacctttgggtggccggggtttgttgggggagaaacgattggtgatttgggccgatatacagctaagcgatatagaagggggagtggcccggtcttatagaacaagcgcgccctaagatattttgagccagcgaaagggatcgtactggaggcttgtggcaacagccctcagtgcgatgtgcctattggcaccccttttttgagcagggccgcgaaaatgtttaacccatgtgggggtctcacgtgccccagaaaggggggcgacaatttgaacataggttggcaattatccccccattcgctaggaaaacgagacaaaggttataggacggggggaacactt

SEQ ID NO: 681802 - DNA, 364 bp, Homo sapiens
agcggatgggcgcgggggcagccgcccggcctctccggcgcgccccctcgccgggggtgttgacgccccccagcccctcatttcccaaagctccggtggtctgcctccttgtcccgcgcgcgctgtcagaccgatagagcggacccgatagccggatctggagacccgatcggtccttccttttcaacatcccggagcccgagtagatgaaagaacgtgctgcatggagccccaggaagttattcggagtaacaatgtaattgtgaagatcctgaatatcatgatgatccaatcgcgtgacaaagaaagagaaaataaagatgtccaacaagaaagtgaactgaaagtataacaaaacccaaga

SEQ ID NO: 681803 - DNA, 851 bp, Homo sapiens
  misc_feature (17)..(17): n is a, c, g, or t
  misc_feature (20)..(21): n is a, c, g, or t
  misc_feature (609)..(609): n is a, c, g, or t
  misc_feature (666)..(666): n is a, c, g, or t
  misc_feature (723)..(723): n is a, c, g, or t
  misc_feature (733)..(733): n is a, c, g, or t
  misc_feature (740)..(740): n is a, c, g, or t
agcggaatgcgcgcggngcnngaggcaccggctagagctgggagcttgcggaagggcgcccctgcctggtcttgagaggtcgaaggtctccaggaggcctccgcctccctctttttcattcacacaccctagcctcacacgttaggaggacccccccaacagaccgtgagctggtgccgggagggtggaggtagatgtacctcacctccacgctaccacagaagagcgaaagctgctttctcagccaccggagagcacgaagaagaagaagatatactgggcaagttctagaaggattctaccattttcttctttaccatgaacaaacttgaaaattaatgggtaatagttgcatgaaaacttttgaacgttttttcttatctctgaggccttctatggagaattaataggaggttgaatgtgtgcatggataaaatggatcatcttaaaggattgaagttccaaaaatacatcagcaggactggacaggttttatataatgagatttctattttagcttgacttctacaactctgaataagctataaactgagctatacaaggtactaggaaggaagtttctcttctaaaatattctagttgcatatnatatttttcttcagatctttgaaaaagcatattttgtcatcaagttcctacaaaatnagactattagacaccaacttttagtgtataaagtaggatagaaagcagcaatctatnttatactggnaaacaantttaattaaagaaacagtcaccaggaagttaagaagagtaatctctacataagcactggctgagatggcagaagcttctgtggatgcctcaactctgcctgtaacagtgaa

SEQ ID NO: 681804 - DNA, 103 bp, Homo sapiens
  misc_feature (91)..(91): n is a, c, g, or t
tacaaaacatagctcatcatcccacatcatagccaccatcaccctccttaacctctacttctacctacgcctattgtacaccaaccccggncattcaacgcct

SEQ ID NO: 681805 - DNA, 845 bp, Homo sapiens
  misc_feature (17)..(17): n is a, c, g, or t
  misc_feature (20)..(21): n is a, c, g, or t
  misc_feature (644)..(644): n is a, c, g, or t
agcggaatgcgcgcggngcnngaggcaccggctagagctgggagcttgcggaagggcgcccctgcctggtcttgagaggtcgaaggtctccaggaggcctccgcctccctctttttcattcacacaccctagcctcacacgttaggaggacccccccaacagaccgtgagctggtgccgggagggtggaggtagatgtacctcacctccacgctaccacagaagagcgaaagctgctttctcagccaccggagagcacgaagaaggttattccagtcccggggggaaggtgggggtggtagggagaatgcgaagataaggcagcagacggaatgcgggcgctgcctcgcgctgcccccgtgcctggggagccctctcccttcagaaaggctagacctccgggcccggcatccctgagctcttacttgctctggatttgtgatcgctttttgctttttgctcgctctctcacagtagattccttgatacttttctttccggctcctctttctttttccggatgaccgagctctgctttctttgcttgccccattacttcttaaatagatcattgttctgtcacggaaactgctgaacaattcgctctctcagagcccttcgtagtttcctaaacggggccccaanctgcactactctccccatccccagagctcagtggtgcgaaagcgtggctcccccgtggcgctagatagacctgaagttcatttacacactgttaccatacagttggtccatcacagaatattccttcgaactgctggactgcttttccttttgacaggtttgaatgctccatttttactcccatttcacttgttgaaatgg

SEQ ID NO: 681806 - DNA, 300 bp, Homo sapiens
gtaaacttcctattatcattattttgagaagtctcactctgttacacatgctgaagtgcggggcacaatcttggtcactgtaacctccatctgtcaggttcaatcgattctcctacctcagcttcccgaacagctgagattacaggtgtacgccacccgcccggctaatttttgttttttcagtagagacaggtttcggcgatgtgggccagactggttttgaactcctgacctcaagtgatctgcccgcgttggtctctcaaagtgctgggattacaggtgtgagccattgcactccgg

SEQ ID NO: 681807 - DNA, 1411 bp, Homo sapiens
aggggccaccacaccttaagtccgtgtcatgcccggttggccaccccgtttctgggggcatgagcttcaccactcgctccaccttctccaccaactaccggtccctgggctctgtccaggcgcccagctacggcgcccggccggtcagcagcgcggccagcgtctatgcaggcgctgggggctctggttcccggatctccgtgtcccgctccaccagcttcaggggcggcatggggtccgggggcctggccaccgggatagccgggggtctggcaggaatgggaggcatccagaacgagaaggagaccatgcaaagcctgaacgaccgcctggcctcttacctggacagagtgaggagcctggagaccgagaaccggaggctggagagcaaaatccgggagcacttggagaagaagggaccccaggtcagagactggagccattacttcaagatcatcgaggacctgagggctcagatcttcgcaaatactgtggacaatgcccgcatcgttctgcagattgacaatgcccgtcttgctgctgatgactttagagtcaagtatgagacagagctggccatgcgccagtctgtggagaacgacatccatgggctccgcaaggtcattgatgacaccaatatcacacgactgcagctggagacagagatcgaggctctcaaggaggagctgctcttcatgaagaagaaccacgaagaggaagtaaaaggcctacaagcccagattgccagctctgggttgaccgtggaggtagatgcccccaaatctcaggacctcgccaagatcatggcagacatccgggcccaatatgacgagctggctcggaagaaccgagaggagctagacaagtactggtctcagcagattgaggagagcaccacagtggtcaccacacagtctgctgaggttggagctgctgagacgacgctcacagagctgagacgtacagtccagtccttggagatcgacctggactccatgagaaatctgaaggccagcttggagaacagcctgagggaggtggaggcccgctacgccctacagatggagcagctcaacgggatcctgctgcaccttgagtcagagctggcacagacccgggcagagggacagcgccaggcccaggagtatgaggccctgctgaacatcaaggtcaagctggaggctgagatcgccacctaccgccgcctgctggaagatggcgaggactttaatcttggtgatgccttggacagcagcaactccatgcaaaccatccaaaagaccaccacccgccggatagtggatggcaaagtggtgtctgagaccaatgacaccaaagttctgaggcattaagccagcagaagcagggtaccctttggggagcaggaggccaataaaaagttcagagttca

SEQ ID NO: 681808 - DNA, 1403 bp, Homo sapiens
cgcgtacaactaggctagtacgaggctggtgttaatcggccgaggggacgcatgagcttcaccactcgctccaccttctccaccaactaccggtccctgggctctgtccaggcgcccagctacggcgcccggccggtcagcagcgcggccagcgtctatgcaggcgctgggggctctggttcccggatctccgtgtcccgctccaccagcttcaggggcggcatggggtccgggggcctggccaccgggatagccgggggtctggcaggaatgggaggcatccagaacgagaaggagaccatgcaaagcctgaacgaccgcctggcctcttacctggacagagtgaggagcctggagaccgagaaccggaggctggagagcaaaatccgggagcacttggagaagaagggaccccaggtcagagactggagccattacttcaagatcatcgaggacctgagggctcagatcttcgcaaatactgtggacaatgcccgcatcgttctgcagattgacaatgcccgtcttgctgctgatgactttagagtcaagtatgagacagagctggccatgcgccagtctgtggagaacgacatccatgggctccgcaaggtcattgatgacaccaatatcacacgactgcagctggagacagagatcgaggctctcaaggaggagctgctcttcatgaagaagaaccacgaagaggaagtaaaaggcctacaagcccagattgccagctctgggttgaccgtggaggtagatgcccccaaatctcaggacctcgccaagatcatggcagacatccgggcccaatatgacgagctggctcggaagaaccgagaggagctagacaagtactggtctcagcagattgaggagagcaccacagtggtcaccacacagtctgctgaggttggagctgctgagacgacgctcacagagctgagacgtacagtccagtccttggagatcgacctggactccatgagaaatctgaaggccagcttggagaacagcctgagggaggtggaggcccgctacgccctacagatggagcagctcaacgggatcctgctgcaccttgagtcagagctggcacagacccgggcagagggacagcgccaggcccaggagtatgaggccctgctgaacatcaaggtcaagctggaggctgagatcgccacctaccgccgcctgctggaagatggcgaggactttaatcttggtgatgccttggacagcagcaactccatgcaaaccatccaaaagaccaccacccgccggatagtggatggcaaagtggtgtctgagaccaatgacaccaaagttctgaggcattaagccagcagaagcagggtaccctttggggagcaggaggccaataaaaagttcagagttca

SEQ ID NO: 681809 - DNA, 122 bp, Homo sapiens
aataacagaaaaactgttagtggttagaatttttaagctttaaaaaaccatgaatttgtattggttttaattgcacaactaaaataatgttgatatatacttaagcttaaattaattccaac

SEQ ID NO: 681810 - DNA, 1402 bp, Homo sapiens
  misc_feature (42)..(42): n is a, c, g, or t
atatgctagtagggctggtgttaatcggccgaggctctctcnccggacgcatgagcttcaccactcgctccaccttctccaccaactaccggtccctgggctctgtccaggcgcccagctacggcgcccggccggtcagcagcgcggccagcgtctatgcaggcgctgggggctctggttcccggatctccgtgtcccgctccaccagcttcaggggcggcatggggtccgggggcctggccaccgggatagccgggggtctggcaggaatgggaggcatccagaacgagaaggagaccatgcaaagcctgaacgaccgcctggcctcttacctggacagagtgaggagcctggagaccgagaaccggaggctggagagcaaaatccgggagcacttggagaagaagggaccccaggtcagagactggagccattacttcaagatcatcgaggacctgagggctcagatcttcgcaaatactgtggacaatgcccgcatcgttctgcagattgacaatgcccgtcttgctgctgatgactttagagtcaagtatgagacagagctggccatgcgccagtctgtggagaacgacatccatgggctccgcaaggtcattgatgacaccaatatcacacgactgcagctggagacagagatcgaggctctcaaggaggagctgctcttcatgaagaagaaccacgaagaggaagtaaaaggcctacaagcccagattgccagctctgggttgaccgtggaggtagatgcccccaaatctcaggacctcgccaagatcatggcagacatccgggcccaatatgacgagctggctcggaagaaccgagaggagctagacaagtactggtctcagcagattgaggagagcaccacagtggtcaccacacagtctgctgaggttggagctgctgagacgacgctcacagagctgagacgtacagtccagtccttggagatcgacctggactccatgagaaatctgaaggccagcttggagaacagcctgagggaggtggaggcccgctacgccctacagatggagcagctcaacgggatcctgctgcaccttgagtcagagctggcacagacccgggcagagggacagcgccaggcccaggagtatgaggccctgctgaacatcaaggtcaagctggaggctgagatcgccacctaccgccgcctgctggaagatggcgaggactttaatcttggtgatgccttggacagcagcaactccatgcaaaccatccaaaagaccaccacccgccggatagtggatggcaaagtggtgtctgagaccaatgacaccaaagttctgaggcattaagccagcagaagcagggtaccctttggggagcaggaggccaataaaaagttcagagttca

SEQ ID NO: 681811 - DNA, 148 bp, Homo sapiens
gaccctgagcactctaagctcctataacctttgaaacccgctctctacaatactgaccctctctgtgctccatgatgttctcaaatctctctgatttagtccttcatttaataaacattttcttttcttttttttttttttttttttt

SEQ ID NO: 681812 - DNA, 1226 bp, Homo sapiens
  misc_feature (1165)..(1165): n is a, c, g, or t
  misc_feature (1186)..(1186): n is a, c, g, or t
aataaggctaggtagaggctgggtgtgaatcggccgaggcgtcgtccgcaaagcctgagtcctgtcctttctctctccccggacagcatgagcttcaccactcgctccaccttctccaccaactaccggtccctgggctctgtccaggcgcccagctacggcgcccggccggtcagcagcgcggccagcgtctatgcaggcgctgggggctctggttcccggatctccgtgtcccgctccaccagcttcaggggcggcatggggtccgggggcctggccaccgggatagccgggggtctggcaggaatgggaggcatccagaacgagaaggagaccatgcaaagcctgaacgaccgcctggcctcttacctggacagagtgaggagcctggagaccgagaaccggaggctggagagcaaaatccgggagcacttggagaagaagggaccccaggtcagagactggagccattacttcaagatcatcgaggacctgagggctcagatcttcgcaaatactgtggacaatgcccgcatcgttctgcagattgacaatgcccgtcttgctgctgatgactttagagtcaagtatgagacagagctggccatgcgccagtctgtggagaacgacatccatgggctccgcaaggtcattgatgacaccaatatcacacgactgcagctggagacagagatcgaggctctcaaggaggagctgctcttcatgaagaagaaccacgaagaggaagtaaaaggcctacaagcccagattgccagctctgggttgaccgtggaggtagatgcccccaaatctcaggacctcgccaagatcatggcagacatccgggcccaatatgacgagctggctcggaagaaccgagaggagctagacaagtactggtctcagcagattgaggagagcaccacagtggtcaccacacagtctgctgaggttggagctgctgagacgacgctcacagagctgagacgtacagtccagtccttggagatcgacctggactccatgagaaatctgaaggccagcttggagaacagcctgagggaggtggaggcccgctacgccctacagatggagcagctcaacgggatcctgctgcaccttgagtcagagctggcacagacccgggcagagggctaggagcctnctaacccttttaccatctatnccacagataggcactatgattaatagggaagatgaaactt

SEQ ID NO: 681813 - DNA, 1177 bp, Homo sapiens
aataaggctaggtagaggctgggtgtgaatcggccgaggcgtcgtccgcaaagcctgagtcctgtcctttctctctccccggacagcatgagcttcaccactcgctccaccttctccaccaactaccggtccctgggctctgtccaggcgcccagctacggcgcccggccggtcagcagcgcggccagcgtctatgcaggcgctgggggctctggttcccggatctccgtgtcccgctccaccagcttcaggggcggcatggggtccgggggcctggccaccgggatagccgggggtctggcaggaatgggaggcatccagaacgagaaggagaccatgcaaagcctgaacgaccgcctggcctcttacctggacagagtgaggagcctggagaccgagaaccggaggctggagagcaaaatccgggagcacttggagaagaagggaccccaggtcagagactggagccattacttcaagatcatcgaggacctgagggctcagatcttcgcaaatactgtggacaatgcccgcatcgttctgcagattgacaatgcccgtcttgctgctgatgactttagagtcaagtatgagacagagctggccatgcgccagtctgtggagaacgacatccatgggctccgcaaggtcattgatgacaccaatatcacacgactgcagctggagacagagatcgaggctctcaaggaggagctgctcttcatgaagaagaaccacgaagaggaagtaaaaggcctacaagcccagattgccagctctgggttgaccgtggaggtagatgcccccaaatctcaggacctcgccaagatcatggcagacatccgggcccaatatgacgagctggctcggaagaaccgagaggagctagacaagtactggtctcagcagattgaggagagcaccacagtggtcaccacacagtctgctgaggttggagctgctgagacgacgctcacagagctgagacgtacagtccagtccttggagatcgacctggactccatgagaaatctgaaggccagcttggagaacagcctgagggaggtggaggcccgctacgccctacagatggagcagctcaacgggatcctgctgcaccttgagtcagagctggcacagacccgggcagagggaccgacgtcgacgcggccgcgaa

SEQ ID NO: 681814 - DNA, 1389 bp, Homo sapiens
aatttggctaggtacgaggctgggtgttaatcggccgaagctgagtcctgtcctttctctctccccggacaactaccggtccctgggctctgtccaggcgcccagctacggcgcccggccggtcagcagcgcggccagcgtctatgcaggcgctgggggctctggttcccggatctccgtgtcccgctccaccagcttcaggggcggcatggggtccgggggcctggccaccgggatagccgggggtctggcaggaatgggaggcatccagaacgagaaggagaccatgcaaagcctgaacgaccgcctggcctcttacctggacagagtgaggagcctggagaccgagaaccggaggctggagagcaaaatccgggagcacttggagaagaagggaccccaggtcagagactggagccattacttcaagatcatcgaggacctgagggctcagatcttcgcaaatactgtggacaatgcccgcatcgttctgcagattgacaatgcccgtcttgctgctgatgactttagagtcaagtatgagacagagctggccatgcgccagtctgtggagaacgacatccatgggctccgcaaggtcattgatgacaccaatatcacacgactgcagctggagacagagatcgaggctctcaaggaggagctgctcttcatgaagaagaaccacgaagaggaagtaaaaggcctacaagcccagattgccagctctgggttgaccgtggaggtagatgcccccaaatctcaggacctcgccaagatcatggcagacatccgggcccaatatgacgagctggctcggaagaaccgagaggagctagacaagtactggtctcagcagattgaggagagcaccacagtggtcaccacacagtctgctgaggttggagctgctgagacgacgctcacagagctgagacgtacagtccagtccttggagatcgacctggactccatgagaaatctgaaggccagcttggagaacagcctgagggaggtggaggcccgctacgccctacagatggagcagctcaacgggatcctgctgcaccttgagtcagagctggcacagacccgggcagagggacagcgccaggcccaggagtatgaggccctgctgaacatcaaggtcaagctggaggctgagatcgccacctaccgccgcctgctggaagatggcgaggactttaatcttggtgatgccttggacagcagcaactccatgcaaaccatccaaaagaccaccacccgccggatagtggatggcaaagtggtgtctgagaccaatgacaccaaagttctgaggcattaagccagcagaagcagggtaccctttggggagcaggaggccaataaaaagttcagagttca

SEQ ID NO: 681815 - DNA, 339 bp, Homo sapiens
gaagtgttcgttcaagtggtcaatgttatgtatattttacatttaaaaaaaaaaaaagtctaggcgcagtggctcacacttggaatcccagcactttgggaggccaaggcaggcggatcacctaaggtcgggagtttgaaaccagcctgatcaatatggaaaaacgccgtctctactgaaaatgcaaaattagccgggtgtggtggcacgtgtctgtaatctcagctgcttgggaggctggggcgggacaattgtttgaccccaggaggtgaagatcgcagtgagctgaaaatgcaccattgtactccagcctgggcaacaaaagcgaaactctatttc

SEQ ID NO: 681816 - DNA, 940 bp, Homo sapiens
gcacaaggtgctggcttggagcgggtcctcgagtggcaggagaagcgcataccctactctgactccactgcaatgctgaaggggaccctgcgctgccaatgcctgagggtgaccccctggtctgcagagctgtgcgatgcgatccagtgtgccgttagcacgctgttcatgcagctgatccctcaggagctggtgctctatgccttgggccccgcctgttccggaactcctctaggttgtgcactggtttccactttccatcaacagagcagtgcgactcgctgcaggagggcttcttgctcgctttcatgggccatcgggcattctgcgggtggctgctatgctgttccccccgcttcatccccctggtgggtgtgggctcggctgcacttgcttccttgtgctcgtcccgggacagcaccgatccttgcgtgggccttcatttgcccgtacggagccgtacgcggacttcccgcctggtgccatccgggcgggtcctcctactctcgcgtataggcagggcagtgggaccttggtggttgtcaatttcatggcccggtgcgcaggatccgtcatggagtaaggttgtcttggcactgtatttggtcgtcatgggctgtgccaggagccccgggcctgtgcccgtgcgttcggttcccaataggtggcttggcgtttcccacgtctcgttgccatcagggggaggagcctgaggtccggcaccttgcggccacggaagctgtacatgttgcttcattccggggggagctggttgactacctggtgctcggttcctggagtctgcgctggtccggtcacttcccagggcccggagccttgaaagcgtgccgtctggcactggttccaagacacctgttgggctttccccaggccagggcttttaggggcggggtttgcacagcgccgggcgctctgggga

SEQ ID NO: 681817 - DNA, 1376 bp, Homo sapiens
aataaggctaggtagaggctgggtgtgaatcggccgaggcgtcgtccgcaaagcctgagtcctgtcctttctctctccccggacagcatgagcttcaccactcgctccaccttctccaccaactaccggtccctgggctctgtccaggcgcccagctacggcgcccggccggtcagcagcgcggccagcgtctatgcaggcgctgggggctctggttcccggatctccgtgtcccgctccaccagcttcaggggcggcatggggtccgggggcctggccaccgggatagccgggggtctggcaggaatgggaggcatccagaacgagaaggagaccatgcaaagcctgaacgaccgcctggcctcttacctggacagagtgaggagcctggagaccgagaaccggaggctggagagcaaaatccgggagcacttggagaagaagggaccccaggtcagagactggagccattacttcaagatcatcgaggacctgagggctcagatcttcgcaaatactgtggacaatgcccgcatcgttctgcagattgacaatgcccgtcttgctgctgatgactttagagtcaagtatgagacagagctggccatgcgccagtctgtggagaacgacatccatgggctccgcaaggtcattgatgacaccaatatcacacgactgcagctggagacagagatcgaggctctcaaggaggagctgctcttcatgaagaagaaccacgaagaggaatctcaggacctcgccaagatcatggcagacatccgggcccaatatgacgagctggctcggaagaaccgagaggagctagacaagtactggtctcagcagattgaggagagcaccacagtggtcaccacacagtctgctgaggttggagctgctgagacgacgctcacagagctgagacgtacagtccagtccttggagatcgacctggactccatgagaaatctgaaggccagcttggagaacagcctgagggaggtggaggcccgctacgccctacagatggagcagctcaacgggatcctgctgcaccttgagtcagagctggcacagacccgggcagagggacagcgccaggcccaggagtatgaggccctgctgaacatcaaggtcaagctggaggctgagatcgccacctaccgccgcctgctggaagatggcgaggactttaatcttggtgatgccttggacagcagcaactccatgcaaaccatccaaaagaccaccacccgccggatagtggatggcaaagtggtgtctgagaccaatgacaccaaagttctgaggcattaagccagcagaagcagggtaccctttggggagcaggaggccaataaaaagttcagagttca

SEQ ID NO: 681818 - DNA, 1314 bp, Homo sapiens
  misc_feature (18)..(18): n is a, c, g, or t
  misc_feature (63)..(63): n is a, c, g, or t
  misc_feature (113)..(113): n is a, c, g, or t
  misc_feature (125)..(125): n is a, c, g, or t
  misc_feature (131)..(131): n is a, c, g, or t
  misc_feature (154)..(154): n is a, c, g, or t
  misc_feature (157)..(157): n is a, c, g, or t
  misc_feature (192)..(192): n is a, c, g, or t
  misc_feature (221)..(221): n is a, c, g, or t
  misc_feature (238)..(238): n is a, c, g, or t
  misc_feature (252)..(252): n is a, c, g, or t
  misc_feature (267)..(267): n is a, c, g, or t
  misc_feature (274)..(274): n is a, c, g, or t
  misc_feature (277)..(277): n is a, c, g, or t
  misc_feature (311)..(311): n is a, c, g, or t
  misc_feature (316)..(316): n is a, c, g, or t
  misc_feature (326)..(326): n is a, c, g, or t
  misc_feature (328)..(328): n is a, c, g, or t
  misc_feature (349)..(349): n is a, c, g, or t
  misc_feature (360)..(360): n is a, c, g, or t
  misc_feature (366)..(366): n is a, c, g, or t
caagcacaccctgatgcncaaggccatccgagggcacctggaaaacaacccagttctggaganactgctccctcatatccgggggaatgtgggctttgtgttcaccaaggagnacctcactgagntcaggnacatgttgctggccaataaggtnccngctgctgcccgtgctggtgccattgccccatgtgnagtcactgtgccagcccagaacactggtntagggaaagagaagaantactttttacaggntttaggtatcacaantaaaatntcnaggggcaccattgaaatcctgagtgatgtgcagntgatnaagactggananaaagtgggagccagcgaagcnacgctgtgaanatgctnaaacatctcccccttctcctttgggctggtcatccagcaggtgttcgacaatggcagacatctacaaccctgaagtgcttgatatcacagaggaaactctgcattctcgcttcctggagggtgtccgcaaatgttgccagtgtctgtctgcagattggctaccccaaactgttgcatcagtaccccacattctatcatcaacgggtacaaacgagtcctggccttgtctgtggagacggattacacctttcccacttgctgaaaaggtcaaggccttcttggctgatccatctgcctttgtggctgctgcccctgtggctgctgccacccacagctgctcctgctgctgctgcagccccagctaaggttgaagccaaggaagagtcggaggagtcggacgaggatatgggatttggtctctttgactaatcaccaaaaagcaaccaacttagccagttttatttgcaaaacaaggaaataaaggcttacttcttttaaaaaaaaaaaaaacaaaaaaaaaaaaacacatgtgtgtggcggcgcgcgcgcgcggggcccctccgagaaagactttccgaaacacccattgcgcggtgggggcgcgcgggggccccaggagggtaaggtgaacacgagggggccaaagagcgggttctcccatgaggggaaaacgcgggggcaagagagaaaagaggggcggggaattctctcccacacaaaataaaagaagcccgccggggggaaaccggagagcggttctgcggaacaacaaactcccgagagagggagaattcgcgagagaggcacaataagaggggagctttatataaaagacgggagagccacacagggagagaacctgagaatatacacaatattaagcccccgggattggtggtgggggataaaaagaaaagataataatataaaataataaaaatataaatt

SEQ ID NO: 681819 - DNA, 457 bp, Homo sapiens
  misc_feature (220)..(220): n is a, c, g, or t
  misc_feature (294)..(294): n is a, c, g, or t
  misc_feature (313)..(313): n is a, c, g, or t
  misc_feature (370)..(370): n is a, c, g, or t
taaggaatggagttattttctaagagtttctatctgtgctgagctcaaaagaatgcccactctccataaataaaaagtaaacaaaggaaatgcatcagaaagttggaaaatagtttcatcatgcttctgaagaaatttcttgatttcttggtcatcatgacctatacttgaagtgttgccttcttcggtttccttttgaagaagctgctccagaacccanacaggtagaaaatgttttcatagcgtgacactcataaatggcttggtccccacaaaaaaacaacaaatcccttnaaaaaatgggtaaaatatnatccaaaaaaaatcctataaaaaaataccaaatttccggccaaaccaaaaaatttgnaaatatttaacaccttctgtcatcctgtcactggtgaacaagggggaaataaaaaactttcctttattcaaagaactttaaaaaaaa

SEQ ID NO: 681820 - DNA, 1045 bp, Homo sapiens
  misc_feature (880)..(880): n is a, c, g, or t
  misc_feature (900)..(900): n is a, c, g, or t
aataaggctaggtagaggctgggtgtgaatcggccgaggcgtcgtccgcaaagcctgagtcctgtcctttctctctccccggacagcatgagcttcaccactcgctccaccttctccaccaactaccggtccctgggctctgtccaggcgcccagctacggcgcccggccggtcagcagcgcggccagcgtctatgcaggcgctgggggctctggttcccggatctccgtgtcccgctccaccagcttcaggggcggcatggggtccgggggcctggccaccgggatagccgggggtctggcaggaatgggaggcatccagaacgagaaggagaccatgcaaagcctgaacgaccgcctggcctcttacctggacagagtgaggagcctggagaccgagaaccggaggctggagagcaaaatccgggagcacttggagaagaagggaccccaggtcagagactggagccattacttcaagatcatcgaggacctgagggctcagatcttcgcaaatactgtggacaatgcccgcatcgttctgcagattgacaatgcccgtcttgctgctgatgactttagagtcaagtatgagacagagctggccatgcgccagtctgtggagaacgacatccatgggctccgcaaggtcattgatgacaccaatatcacacgactgcagctggagacagagatcgaggctctcaaggaggagctgctcttcatgaagaagaaccacgaagaggaagtaaaaggcctacaagcccagattgccagctctgggttgaccgtggaggtagatgcccccaatctcaggacctcgccaagatcatggcagacatccgggccaatatgacgagtggtcggaaaacgagagggtnacaagtggtctccgatgggngcccacggtccccccactcgggagggtcgggaaagcacaggagaacacatggaacggaccaaataggctgaaccagggggggccaagaaagagacaacgaccgagaccaaacagaaaaacaccaggaagacacacagaagtagac

SEQ ID NO: 681821 - DNA, 997 bp, Homo sapiens
  misc_feature (926)..(926): n is a, c, g, or t
aatttggctaggtacgaggctgggtgttaatcggccgaagctgagtcctgtcctttctctctccccggacagcatgagcttcaccactcgctccaccttctccaccaactaccggtccctgggctctgtccaggcgcccagctacggcgcccggccggtcagcagcgcggccagcgtctatgcaggcgctgggggctctggttcccggatctccgtgtcccgctccaccagcttcaggggcggcatggggtccgggggcctggccaccgggatagccgggggtctggcaggaatgggaggcatccagaacgagaaggagaccatgcaaagcctgaacgaccgcctggcctcttacctggacagagtgaggagcctggagaccgagaaccggaggctggagagcaaaatccgggagcacttggagaagaagggaccccaggtcagagactggagccattacttcaagatcatcgaggacctgagggctcagatcttcgcaaatactgtggacaatgcccgcatcgttctgcagattgacaatgcccgtcttgctgctgatgactttagagtcaagtatgagacagagctggccatgcgccagtctgtggagaacgacatccatgggctccgcaaggtcattgatgacaccaatatcacacgactgcagctggagacagagatcgaggctctcaaggaggagctgctcttcatgaagaagaaccacgaagaggaagtaaaaggcctacaagcccagattgccagctctgggttgaccgtggaggtagatgcccccaatctcaggacctcgccaagatcatggcagacatccgggcccatatgacgagctggtcggaagaaccgagaggagctagaccagtactggtctcgcgattgggggagccccggggtccccacggtgtggggtnggctggaaaacccaagggagacccggggaaccggccaaataggcgggaacggggggccgccccaagggcag

SEQ ID NO: 681822 - DNA, 650 bp, Homo sapiens
agcggagtgtctcctccagtcgcaacggccagacctgacctgccagctccgggcgtggggtgaaatctcttgattaacctagtctctcgatgatggcacctccgtcgagtctttgccgaggttccgcaggcccaggcgtggtacctggatcgttcaagctcactgccgacgtatcagggaggatccggtacccccggcgaaggtcaacctgggagtgggagcatatcgcacggatgaactgccatccctgggttttgcactagtagtgaagaaagtggagcagaagtattgctaatgacaatagcctaaatcacgagtatctgccaatcctgggcctggctgagttccggagctgtgctactcgtcttgcccttggggatgacagtccagtcactcaaggacgaagcgggtaggaggtgtgcaagtctttggggtggaacaggtgcacttcgaattggtagctgatttcttgagcgcgttggtacaatggaacgaaacaacgaagagacacacctgtctatgtgtcctcagcaatccgtgggagaatcagaagtgctgtgtttaccgctgctggtttgacagacgttcggtcctatcgctactgggatgcacgacgaagagaggattggacctccagggcttcctgaatg

SEQ ID NO: 681823 - DNA, 1339 bp, Homo sapiens
  misc_feature (42)..(42): n is a, c, g, or t
atatgctagtagggctggtgttaatcggccgaggctctctcnccggacgcatgagcttcaccactcgctccaccttctccaccaactaccggtccctgggctctgtccaggcgcccagctacggcgcccggccggtcagcagcgcggccagcgtctatgcaggcgctgggggctctggttcccggatctccgtgtcccgctccaccagcttcaggggcggcatggggtccgggggcctggccaccgggatagccgggggtctggcaggaatgggaggcatccagaacgagaaggagaccatgcaaagcctgaacgaccgcctggcctcttacctggacagagtgaggagcctggagaccgagaaccggaggctggagagcaaaatccgggagcacttggagaagaagggaccccaggtcagagactggagccattacttcaagatcatcgaggacctgagggctcagatcttcgcaaatactgtggacaatgcccgcatcgttctgcagattgacaatgcccgtcttgctgctgatgactttagagtcaagtatgagacagagctggccatgcgccagtctgtggagaacgacatccatgggctccgcaaggtcattgatgacaccaatatcacacgactgcagctggagacagagatcgaggctctcaaggaggagctgctcttcatgaagaagaaccacgaagaggaatctcaggacctcgccaagatcatggcagacatccgggcccaatatgacgagctggctcggaagaaccgagaggagctagacaagtactggtctcagcagattgaggagagcaccacagtggtcaccacacagtctgctgaggttggagctgctgagacgacgctcacagagctgagacgtacagtccagtccttggagatcgacctggactccatgagaaatctgaaggccagcttggagaacagcctgagggaggtggaggcccgctacgccctacagatggagcagctcaacgggatcctgctgcaccttgagtcagagctggcacagacccgggcagagggacagcgccaggcccaggagtatgaggccctgctgaacatcaaggtcaagctggaggctgagatcgccacctaccgccgcctgctggaagatggcgaggactttaatcttggtgatgccttggacagcagcaactccatgcaaaccatccaaaagaccaccacccgccggatagtggatggcaaagtggtgtctgagaccaatgacaccaaagttctgaggcattaagccagcagaagcagggtaccctttggggagcaggaggccaataaaaagttcagagttca

SEQ ID NO: 681824 - DNA, 225 bp, Homo sapiens
atttacacttccgcttctggcaagcctaaataatttgcctgtgatttttaataaaaaccggatccttccctcatctctcatccaaagcttcatcctcttattaattctaaggacacttttttgaaatggaaaacagcacagaggtggagcagaatacaggttttgggttatttctcttaacagtcctaacccattaaattgtccttgggaccaaggaagttttgg

SEQ ID NO: 681825 - DNA, 245 bp, Homo sapiens
gacgtagtatttgtctgtgtctggcttatttcagttaacatagtctcttccaggttcatccattttgttgcaaatgataggattttattcatttttatggctgaatagtattccattgtgtatatacactatatttcctttatccattaatggacatttgttgattccatatcttggctgttgtaaatagtgctgcaataaacatgtgagtgcaaataaaaaaaaggaaagaaaaagtcgacgcg

SEQ ID NO: 681826 - DNA, 259 bp, Homo sapiens
cccggggcccccccccccaaaggggtttggggatgggggagatttaaaaatggccttttttttttccggggggttttttaaaaaaatttggcccgttcccgggttttggggagggcccctttttccccgcattttaaaaccctaggtaaagggtccccctggggggtcccggtttttaaactttttgggtggggccccccccccccccggggccggggccccgggggggggggggtcccaaaaagtttttgggtgggga

SEQ ID NO: 681827 - DNA, 1705 bp, Homo sapiens
tgggcttgactcaggattaaaaaacgggaacggtgaaggtgacagcagtcggtgggagcgagcttcccccaaagttacacaagtggggccgaggacattgtgatggcccattgtggtggcttttcttaaaatagctcattctccaaattattgaaagtgcattgtgttacagggaagctccctttgccattccataaaagccaccccactttctcctcataagggagaaagtgtgcccagattccttcttccacaagtctccaccaacaggggaagtggtagaatagcattgtgctttccggtgtataaaatatagtgttaagtgcacaacatttctcttttaaactcctctcgcccttaatatatactttttcttcatatattgtgtgtgttataaatatctgtgtgcaatgtgagattggagactcttctcgtgggggccccccctacatttccccccctatatatttgtgtctccccccccaacctcttgcagaaattgtatatgtataaaagagacatatatggagactcactccccgtgtgcagaagtgtggggtagtgtgatggggcaacgcccacaggggggctataaaacctgtgtctacccacccgtgacaatgtgatggagaaaacccccacgtagtgtagcaaactatactacaaacggtgttgtcacacaaccaccgccttttttaatacagaatacacacgagacaagcacaatcataaaacacagaaactataaaaataaaacaatatatcatactaacaaaaacatataaatattacctacacaataataacaatagatcactagaacatatataaatcataaataaacatgaatatatacaataatatactcttaatcttatatctatccgctgacgaagcgcgacgcaaaccaaatacacaagacaatcacaatatatattaacaatactacaactcaacacgctacacataatcatatctcaaatactaactcttcttacttcctactccatcctcactccatacaacactacccaacaaactatatcatacgtcttttcctccatacactcacacacatacagctaaacatcaacaaatcaatcccattcgcacgacagtacatcaccactataactacaaatactttgcatacctgcatactcacatataatataaataacttaatccactgccactactataataaccactagactataatataaatcaacaacactcatctatctattatactcgcacgcacacacatcagaccaataccaataacaacgcataccaacaacaacatcctgtctttcttctataataatatacattacactatagatactgtacatgcacaaacatatatcatattcgagtataccaaatatcagtacacaatactcacctctacacatgaatatcactaatatacttatcattaacaactatcttataacacatgtcaacatctctagacaccatcatataaaaaatagaaaaatactactacacatccacacaatctacaaatacaaaactcgatctaaatcaatagtacacttcacaaagaaaataacaaaaacaccacacaatatatacaataacatcaatacaacaagaacacacacaaacataacacaaacaacataatacactacacacacaacatcaatacacaaaaaaacaaataaacaaaaag

SEQ ID NO: 681828 - DNA, 401 bp, Homo sapiens
cgagctttagtgcggacaccgcgatcggcatagcgcacgtacagaccaaaactccatgggctcaagcgatccgtcccaactcgagcctcccgagtagctgggattacaggcgcccacgggcacaccccgctaatttttgtattttgagtaaagatggagttgcaccgatgttggccaggctggtctcaaactcctgacctcaggtgatccacccggctcagcctcccatagtgctgggattacaggcatgagccaccatgcccggcccaatttttgtatttttagtagagacacggtttcaccatattggccaggctggtctcgaacttctgacctcggatccaaccgactcagcctcccaaagtgctgggattacaggtttgagccactgcgcctggacc

SEQ ID NO: 681829 - DNA, 395 bp, Homo sapiens
gcctgccagagtgtggtctctggacactatgggcacacgactcctgacaactctgttacttgtcctcctggaattgggatttgaggtccaggggacccaacagccccatcatgatgacatgcctagtccgacctttctaacccaggtgcaggaatctatctccagatactgggagtcagcaaagacagccggccagaacctgttcgagatgacatacctgcccgctgtacatgtgaaactcagggacttgtacagcggcacaccagccatgagcacttacacaggcatttttactgaccaagttctttctgtgctgaagggagatgagtaacagtctgaccctccatcagtggacggagagagaccactactcccctgatcacccatgttcatct

SEQ ID NO: 681830 - DNA, 106 bp, Homo sapiens
tctgaaggttatttcgaaagagatttctgatacacagaataatggtgactttcttcaaaaaggatattaatttgcttcccccagtttaacagggcacggaagatca

SEQ ID NO: 681831 - DNA, 129 bp, Homo sapiens
atggccggtgaagagtgagcccagcagaaccacgccggcacagtcatgccgtcaggaaccagctacaacaaagtgttcctggccaagggtaacatccccgccgagagctacaccttcttcaccggccat

SEQ ID NO: 681832 - DNA, 409 bp, Homo sapiens
gacctctctctgtggggcacctggcctggcttcctccaggactcttcgccttcagtggctggaacttcctcaactatttcaccgaggagatggtcgaagcgcgaaagaacctacctcgcgccatcttcatctccatcccactggtgaccttcgtgtacacgttcaccaacattgcctacttcacggccatgtccccccaggatgctgctctcctccaatgcggtggctgtgaccttcggggagaagctgctgggctacttttcttgggtcatgcctgtctccgtggctctgtcaaccttcggagggatcaatggttacctgttcacctactccaggctgtgcttctctggagcccgcgaggggcacctgcccagcctgctggccatgatccacgtcagacactgcaccc

SEQ ID NO: 681833 - DNA, 257 bp, Homo sapiens
  misc_feature (3)..(3): n is a, c, g, or t
ccnggtcagccttatattgcaccagctctttgggccttcaaccttcttctttccttgcttgttcccagaaccgggtggcttgagttccacacggagttggagcggcttgccttgccaaggacatacagaccaattgtcttacatcaagcacccagtgttccctggagcaattaccttgattggagggcagctacaacaaagtgttcctggccaagggtaacatccccgccgagagctacaccttcttcaccggccat

SEQ ID NO: 681834 - DNA, 115 bp, Homo sapiens
  misc_feature (21)..(21): n is a, c, g, or t
  misc_feature (36)..(37): n is a, c, g, or t
  misc_feature (39)..(39): n is a, c, g, or t
ggtctgatctagaggatcccngcgctgcgcaatacnnanggagggcagctacaacaaagtgttcctggccaagggtaacatccccgccgagagctacaccttcttcaccggccat

SEQ ID NO: 681835 - DNA, 313 bp, Homo sapiens
tgtcacaaccttgttccacaactaagcttggtgcctttctgaatcagctcttgaacgcttcagtcccataatggaatgcagatgtttcaccaaattatccaattatggaataagtagtgacttgggacagtcttcactaaagttaatgagggcagcagctgcgtggtgctgcacacgttgattgccttggtcttccatggtctgcagcacagctgagatcagcttctcatgacatgtctttgggaaaccaggtgccaatatctgtagccatcttgtcccaatggtataacaggctgcataccttactcttgga

SEQ ID NO: 681836 - DNA, 861 bp, Homo sapiens
caatatgtcggacccacggacgccgaacaaagtggtgaggtacatgcccccgaccgagtcgaatgtaacccggccttggaccgaccgactgccggactacatgagacctgctggagcatgatctctcaggatgtgcggcctcatgcttaagctgacctggtgtgctctgggtcgctgtctacgtgcgtccttcatcagtctttgccaaaatctcgcgagctcggaggacactgaaccaaatgatcgcagtagcttcatgctgtccatctctgccagtggcgactgtcctatcgtgcgagaatcctcagcccatgacgcccccattggggatcccagccatataagggtcgccgtgtgggaccctgttctatccagcataggcctgggctgttggctgctggacctgctgtcttcacctgtcatcctgggaccttccctgcaatgatggtcgtctcggctgcccccacgctggtacgacgggcacctggccgtttccctaggcgacacctacgcgtagccctcctgccctccttccctgcctgatgcctgccgggaacacccccgccactcttcctaccgcgtatcatccgctccacgtgaaccctggcggtcactaaaagttcgccactcctgcgcaaccccacgcccaaccctcaccaacactccgcgcccgcccgccaccaacacattcgtaaccacccgcgacgaccccgcccacgcgtccggaaccgacccccactcccaaaacgcacccacccatgcgcgccccccacacgcagcccacgaccgcctgaccacattcgcacggcacccccccacccagccgtctaaccgacacgcacccctcccacacctcctgcc

SEQ ID NO: 681837 - DNA, 373 bp, Homo sapiens
ggcagagtttcatcatagaaaaagaagccagtggctgtcatgcgcagtcgaggccatgtgtgtgtgtgggtctccagagagagagatttcctataagagttacagtacttgctgtgcgaatctggctgattaaaaggccagttgaatatcctggcatttaggcgagtaacatgtgctcgtcacaacgtacaatgtctgagacaatgaatacgagtagatcagctgcatatcttcatggtctcaagtacctccagtttaatgtaatacaatgtagtgcatagcagtatctcattcacagtgcgacttctgtccaaatacttgtgcaacagcacgttccgaccatggagacgaactccaggtgacattgtcatta

SEQ ID NO: 681838 - DNA, 129 bp, Homo sapiens
cctctcagctgatcttttgccgtaagatctatttcaagataaccttattctatcatattgttttacttaatattggtcataatcgtatcattcaagattaagtctgggtatatttgcttatgataaaga

SEQ ID NO: 681839 - DNA, 1196 bp, Homo sapiens
  misc_feature (320)..(320): n is a, c, g, or t
  misc_feature (818)..(818): n is a, c, g, or t
cgtttgcgtcacgtctgtggtgtgctcttctttctcattgtcgtactttccctgctgcttcacaattgtgctctctttctttcggcggcccttgttctcctgagccgatcagcaacacttttctttcacgcgcttgcgttccctcttgtgggtctcccccgtccggtccccgttttatttggccctcttctgtccaccttcccttgctaccgattggaagttttccccgacctgcgcattttgcccctctcttatatcacaggctctgcccgggtatcacgatttgaggattgacattgaaggattgaaatggggtgtanaaatgcggtaccccacccggaggtccacgttgtttaaaaaggatggataatttggaccgaaggaattggcgccagcccccaattgagaagatggtaagccaagtgttataagagagactttttagaatgaactccctaagcccataatatctttagaaacccagtgggaacgcccggtgtcttgtgttacccctggagatggtgtaaagatgcccttggacccagcttctgaggccccggtgatgattggtttcacccccattggggtttcccccccgttatgatccccaatccgcgccatggaggtttggaacaatataaggagagacatttgtccgggacaccacacagcgccaagggcctccaacacgtccatattaaaagaggcgcacaagagaggcgcgcccaccgcttttgtgtgtgtgtggcgccaccccccctagggagagtctctgagagagaagataccgagagagagccttttcccaagagcttacncgtgtggtgggaaagatattgatatataacacccccaatatttatccgccccaagattcacgcccaaggggacaccgggaggctccacgcccgaggagccctatttaattagccacgctgagggaccacgaagcccgcctgaatgctgtatctattcaccacgaagacccaagagggaggtctccagagattggaagaaaatgatgatgatgcctatttaaactcacccactgggcggagtaacacctgctttgaaaagacacttttcactggagtgaaaagaacacataaaagtggagacccaagatgaagttcacccacgctgatgacacttcccaagagattagctcaccttttctcctaggccattataattta

SEQ ID NO: 681840 - DNA, 1161 bp, Homo sapiens
  misc_feature (76)..(76): n is a, c, g, or t
  misc_feature (100)..(100): n is a, c, g, or t
  misc_feature (108)..(108): n is a, c, g, or t
  misc_feature (217)..(217): n is a, c, g, or t
tcaaccagaaatcttcatgatacgaccacatctacaacgtgatcgtcacagcccatgcatttgtaataatcttctncatagtaatacccagtcataatcnggaggctntggcgaagctgactagttcccctaataatcggtgcccccgcatatgggcgtttccccgcataaacgacataagcttctgactcttacctcccgtctctcctactcctgnctcggcatctgcatataggtggaggccggagcgaggaacagggttgaacaggtcgtactccttccctttagcagggcaactaggtcccagcctggtagcctccggtaggacctaaccagtcttctaccttagcacctagcagggtgtactcctcgtatctttaggaggaccgattacaacttatcattcacacacgaaattatcaagtataaacaacccccctggccattaacccaaataccaagaagcccctacttacggtctggctccggtcctaagtcacagacagatcctactatctacctatctactacccagtacctagactggctggcatcactaatgactactaacaggacccgacaaacctcaaggaccagcattcctatcgaacccgcccggagggaccgagaccccaatacatattaccaaaaaaactatatcttgataataatcggtcaacactgaaagttatcattcttatcctaacagagactacgcgaacaaaaactccccataatcgtaagcctcactcactccgcgaccaaaaaagaaccaatttgagataccctaccgcaaaggacccgagccaagacaacaccaccgcgcctcccaagcggacagcgcagtgaccaacccacgaataaatacagcaggagaataacgaacaacagacacaattaacaagcggaacagaaacacacaaaccccacgggaccagaaaatacaagaaccgcaaacaccagaagaaacaaaagcaaacgaggaaatgaaaccaagaaatctatactccatgaaggcaccaagactaggaaaaaagatataaaagcgtaaaaaaatgacagtacaaacacgaaatcacgcgtgacaacggccaaagcgcgacaccaccttcaaactaatcaaatcaaatgcaacaacagaaacacgactagaaaaccaat

SEQ ID NO: 681841 - DNA, 351 bp, Homo sapiens
ggtcgtggcgcccgtccgtgatgactaccgcacacacacgtgacttatggcgccggttctccttgatgaggcgctcgcaggcaaacttgagggctgagaggtgccaggtgccacctgcaatccactcgaggttctcgacagcctccttgaagctcgacagggagtcgatatgttcgtcgtccagctggatggactcaaaggtgcccttgtggctgtactgcaccacgcccacacgcgtccctgtctcggacttgtggtccttagcgatggcacccagtctgtcgaccactttgatgacgaaggtcttctccagtgagaacttggtgcacccaatgctctagaagctgtcga

SEQ ID NO: 681842 - DNA, 293 bp, Homo sapiens
gtcgactaacctaaccacttctctccttcaataaggcctgcccgccacccaataccctactctccttcacaatttctctgcacatctatcactccagtgtttaattgctacattttaattatttcgccactatggcctatttattgcctacctcccttatcttacctcatttgcacacactatatagactttttctctattgtgttaatgactatgtgtgtgttaatcccatgtgtacctctgtgttgttgtttgttttgcactgctttgctttgctttatcttggtcgacgc

SEQ ID NO: 681843 - DNA, 173 bp, Homo sapiens
ttaaaaggggcttcaaagctactgccaaatgtttgaacaattgtgggccccttcaaaacgggggttttttaaaaaatttttatttttaaactggtaggttcccccaatttaaaaaaaaccccttgaaagggaaaaaaaccatttttgtttttttgaataaataaaccccccca

SEQ ID NO: 681844 - DNA, 807 bp, Homo sapiens
ggtttcagcccctagctggattccagccatggctgcagctgctccacagcccttttcaggacccagaacaaccgcagccgcatgttcccaggattggttgatccgttgtatatattgcatctgtcctctggctcgtacagcgagtataagaagaaacaacaagatgtgcgttggttgtcctagaagccaagcaaaataggatgttgaagaaagaagactattgcaggccaatgaacgagaatcggaagtggatgacgagaaaatgtagcctgaaaatagtcgaccaagccacaggttggacctcccgtgccactctcagattttcaatgaaagccagtgatcgcggggactatgatgccttcgtttgaagccagagaagatagtaatgcgagtgtagtgccattcgttaggctatgacagtgcccacctggattcagataggaagcagaagtgtcatagcaagagcagcaagcgagtgaagccttgaagcactgtgcttttaagcatcctgaaaagatgagtctccatgtgctgttataaaatagcagaattgagctctgcttcgagacaaggaaataggcattaagtgtggaacataatagatcagtggggttaacacgtgcaaacagtgcatgaatgaagtacaaagattcaaaattgtgagcattatggtgagtaatggtgagggagaactggggatattaccataagatctatgttaatagagtagatatcgtagaaatagtgtggttggctggcaagccttctggtattcacaatggattgtacaagaaaagaccttccttc

SEQ ID NO: 681845 - DNA, 181 bp, Homo sapiens
  misc_feature (1)..(1): n is a, c, g, or t
  misc_feature (45)..(45): n is a, c, g, or t
  misc_feature (62)..(62): n is a, c, g, or t
  misc_feature (75)..(75): n is a, c, g, or t
naatttgggaacagaaaaaggacattagtggaaaaagtggtgaanatctcccaccgtgaaangggttctctcctnttttgtttaagcgcaatatgttcattttaaattagttaaattatttaaatatatttaaacattatttaaatgtattaaattaataaaattggttattttgtgaaat

SEQ ID NO: 681846 - DNA, 624 bp, Homo sapiens
attctacaggcttcccttggagtgcctgaccttgatgtttctggtctcttcaaggaaatagcccaaggggactcaatttcctatgaggaatttaaaagttttgccttaaagcatccagaatatgctaagatatttacaacatacctagacctccagacgtgccatgtgttttcattaccaaaagaagtccagacaaccccctccaccgccagtaataaagtcagccctgaaaagcatgaagagagtacctcagacaaaaaagatgactgaaagcagtatttccaataaggaaaacacagtagcttttgcttgaaattgtaaaggcacttattgataatacttttaatgtgttggtaatgatgtttaaaattgaaagatttttaaaataaaaatgatagattttcttactaaaaatgtttttattaaccttgcttttattggaaaaaatcaagcaatatttcgttttcttttgtgttatattgtactttactgattcatttactggtgatacatatgtttttatggattttccagtttaatttgcatatacaaatgaatgcaatggtctattggtgagcattgagcaacactgtataaagttttaaaaatgtaaacactttttaa

SEQ ID NO: 681847 - DNA, 120 bp, Homo sapiens
tcatgtcttacgtctattcggattcgttaaccactgcgcacgacgggaactccgcagctgcatcttagattcagctccctggtcctggaaatttccacgtgtctgtgccgcgcagcaact

SEQ ID NO: 681848 - DNA, 343 bp, Homo sapiens
atttctgtatttagcaaagaagaaaaaataccttatctcatccaggcttgggtagatccatttaataaagaggataaaagcaaagcgccgtttaccgttattccgccagtatcacgattagaaccttcgcaagaaaaaatattacgcattattcacaccaaaggtgtgtcattgcctgatgatcgcgagtcagtcttctggctgaatattaaaaatattccgccatcagcgagcaacaaagcgacgaactcgctggaaatagcagtaaaaacgcgtatcaagctgttctggcgaccagcaaatatccgccttattcccgaagatgctgcgccgaaagtgaaat

SEQ ID NO: 681849 - DNA, 752 bp, Homo sapiens
gaggatcccccacatctcatctgcaccatcacctcatctgcgaaatcacacgaagaggaagtaaaaggcctacaagcccagattgccagctctgggttgaccgtggaggtagatgcccccaaatctcaggacctcgccaagatcatggcagacatccgggcccaatatgacgagctggctcggaagaaccgagaggagctagacaagtactggtctcagcagattgaggagagcaccacagtggtcaccacacagtctgctgaggttggagctgctgagacgacgctcacagagctgagacgtacagtccagtccttggagatcgacctggactccatgagaaatctgaaggccagcttggagaacagcctgagggaggtggaggcccgctacgccctacagatggagcagctcaacgggatcctgctgcaccttgagtcagagctggcacagacccgggcagagggacagcgccaggcccaggagtatgaggccctgctgaacatcaaggtcaagctggaggctgagatcgccacctaccgccgcctgctggaagatggcgaggactttaatcttggtgatgccttggacagcagcaactccatgcaaaccatccaaaagaccaccacccgccggatagtggatggcaaagtggtgtctgagaccaatgacaccaaagttctgaggcattaagccagcagaagcagggtaccctttggggagcaggaggccaataaaaagttcagagttca

SEQ ID NO: 681850 - DNA, 170 bp, Homo sapiens
gccttaggtttgctggtacgggacgggactcgttgccctcgtctgttactgtacaggactgcgtgggctgggcgggcgctgcggactcggctgatggcgggcaggatagttcagacggtttccatttcctgagcgtctgagctgttagtattcgttcgttttgttcgtcc

SEQ ID NO: 681851 - DNA, 291 bp, Homo sapiens
cctcaagactcagtacatgagtcacctccccatagacgcttcccctgacctctgtgttggtctgctctagctctcataagaaaataccagagactgagtggcttaaacaaaagacatttattctctcacagtgctagaggctggatgtcaagaccaaggtgttcgcaggattggattcttctaaggctctctcttggcttggagatggccctggttggtctctgagtgcaggtgtcctgcgtctcttgtgtgtcagatttctctatagacactgtagatcgatgagggccc

SEQ ID NO: 681852 - DNA, 1065 bp, Homo sapiens
tgggacaccaaggtttttcccccaaaaaggggacccgttttttggaaaaaaaatttgggcccctttaaaaaaccccccctggggatacccgggcccccttggggggttccggggtttaaaaaaaaaaaaaaaaaacgacacacacgagagaaaattactccccaacgtggctgttggcggcgcccacacctcaaaagcggtgggggggggacccttgcaactataataatagtcgctatcaccgctacaaaaacgataaaaccaggggatagtgttgccctgtgtcgccctcgtgagttcttcttttgagacgccatgtccccccctagggctgggttccccccctactacacacactctctgtctgtattctctctctaacagtccggagtcttctgcagatccccttaaacaaacctcatcctggtgcgtctcgttccaaaaacagaagagggtcgccccccagaagagattgccgctgttgtcgatcaagacaacaacccacgtcatccagagtttgtgtgagatatatataaacgctgctgcgccgcgccataatgggtggtgcttcttcatcacatctccctctgataggaccaccctccctcatatataaaccaggctttattcttcaccaccgcaacaacaaagaaccctcctctaaaataattagagaagtacgacccctgaagaatgggtgggaggaaaaacaagcgcccccccacttgttgggtggggaggtgaaaaaaaaaagggggcctcttttaacaaacgggggaaatataccaccccagagttgggggggtggcagcgcacaatctgtgtgcgcccaccaaccggtgggctcccctggtataagaggaaggtcttcccacggacgagttcacttagtggtgcacgaccaacaagaagagacgtgttgttgttgaaaaaaaaccctccgtggtggccccaggagggggcaaacacatgatgtggggtgcaacaacaagaagagggcgtcctctagaaagaagaggggcgctctttaaatcttggtctcgccacaagcgggtcccataatag

SEQ ID NO: 681853 - DNA, 116 bp, Homo sapiens
gcactcatctccttggatctgggccagttgcttgcagtagcgacctttggtctcctccaggctgttctccagtgatgctttcattgctgagctggggactgcacgctcattctcca

SEQ ID NO: 681854 - DNA, 179 bp, Homo sapiens
  misc_feature (54)..(54): n is a, c, g, or t
  misc_feature (95)..(95): n is a, c, g, or t
  misc_feature (146)..(146): n is a, c, g, or t
  misc_feature (152)..(152): n is a, c, g, or t
cagacccgacggccggcccagttccacgaacccagcgagcccaagcgacttctncgcaccagggaagccccacccaccagaaagccaagtatgcncagcaagcgggccaaagccaagaccaccaagaagcggccacagcgggccanatccantgttttcgaaatgtttgaccagtccca

SEQ ID NO: 681855 - DNA, 86 bp, Homo sapiens
atggcgctgtcgccgtgacccggaaatcctcgcggcccgcgagctgcggcgcggcaccatgcagttgctggtgtcatcagcgccat

SEQ ID NO: 681856 - DNA, 372 bp, Homo sapiens
cgactatgacttagttgcgtccaccctttatagacaaacctaacttgcgcagaaaacaagatgagattggcatggctttatttgtttttttcgttttgtttggttttttttttttttgggctggacccaggtttaaaaaccggaacgggtaaaggtaacagcagccgttggaagcgagcttcccccaaggttcacattgtgcccgagacacttgagatggcccttagtggttttttaaaatagtctatcccaatttatgagatgcttttgtgccgggaatgtcccttgcaatcttaaaagcaacccaatttctctctagggagatgggcaagtcttctccaagttccaggtccagagggaatcctctagagt

SEQ ID NO: 681857 - DNA, 223 bp, Homo sapiens
tgtacaatgcacaggaagtaattcagcagttcattgatgtcccgagtgtcgcagtcaagaaacgtgtcttgtgtttaactagggatgaaaacctgatcgcaactgaagtttggaacacgtgtgatcggacagcaaatgtcgcaatcctgttttctgggggcattgcttccatggttcatagcccacccttgctgaccgtcatcattcctttcacatgcaacca

SEQ ID NO: 681858 - DNA, 343 bp, Homo sapiens
  misc_feature (247)..(247): n is a, c, g, or t
tctggcaaacttgatccctcccccccgaccctagaggaaaaccctctgtcaaacaggcagtagtatcttccacacagcgccgctatgaaaaagagcagagctcatgagggcttagcagggcgcctcgccctcgcagtgctggaggccactgatctcccctgaatgcggagccgcagtgcctcctggtgaataacaggtcatcccagtgccctggtcaggcatctgacactggctggcactcaagtgnggagtgaaattaatcctgttacccggaaatggcttttgataaattaaatacagggcagagatgttccctctggtggacagatagcaggaacctgtt

SEQ ID NO: 681859 - DNA, 123 bp, Homo sapiens
tctataccttctgtaatgagattttctccaggttttctgtgtcaaagatggctgcaatgggcagtggtgtcagcgatgatgtttttagcagctcccgacatgaatcagtaagtaagatttcca

SEQ ID NO: 681860 - DNA, 170 bp, Homo sapiens
atggacgaacagatagagatagacgttaacggacgagataaagagggtacccaaaaggcaccgcgaattaaaattccctagaggcgccagacaacagaactgaggaggtggaaatgtatttttctttttctttcttttttttttttaaatttgttcgttccatattcggg

SEQ ID NO: 681861 - DNA, 391 bp, Homo sapiens
tcttcggcacatgcgtggtttggtgtggtgctgcaggtgtgcggatgggcatcggacagtcccatgtccttccttttcaaattggagatactcggtttggaggctcttgactcctttggggtccgcgtggactctggtcgtctttctcgtactctcgttcgctctcttcctctgggaggtcccgcatcctctgtaattccatgctcctcttctttcaactccagctctacttccagtttagttcaccttcttgctgccttctcttcttttaccttccctgtttttcgccgggactttgaggtttcccgtttctaagtggggttggtcggtctcatctctaggatcatctgtgaatggtatctcgtcttcacggatgaagatttcttcttcc

SEQ ID NO: 681862 - DNA, 231 bp, Homo sapiens
acaagggtgaccagactcgaattacagcactatgaagtggtagaccagcattagctctagaaagcaggcaactaacttacagacagaatacagcgtacacagatctcataatctacaagatctcctctcctcccaagcagtaagctcccttcctccttccaggattcaattactccatgccctctttataaaaaatcccaaattcagtcttaccagaagtgcgcctgggtg

SEQ ID NO: 681863 - DNA, 558 bp, Homo sapiens
  misc_feature (191)..(191): n is a, c, g, or t
  misc_feature (223)..(223): n is a, c, g, or t
  misc_feature (280)..(280): n is a, c, g, or t
  misc_feature (309)..(309): n is a, c, g, or t
  misc_feature (350)..(350): n is a, c, g, or t
  misc_feature (377)..(377): n is a, c, g, or t
  misc_feature (380)..(380): n is a, c, g, or t
  misc_feature (386)..(386): n is a, c, g, or t
  misc_feature (407)..(407): n is a, c, g, or t
  misc_feature (428)..(428): n is a, c, g, or t
  misc_feature (439)..(439): n is a, c, g, or t
  misc_feature (497)..(497): n is a, c, g, or t
  misc_feature (510)..(510): n is a, c, g, or t
  misc_feature (546)..(546): n is a, c, g, or t
ttagtgggcactgtgcagctattcacatttaatttcttatgcctaataacaataaattattaattctctaaaaaataagtaaataagtaaaagccacttggaagcaaagacagccatatatccctgtttgttgagacggttgattttacacatatttagcagagtttctagcagcgcccccttgcacactnacaagtgtcttagtgaggatgataaactgtanagtcatcctcttcatagaggaggtagcatctgagcttgtatctaaaaaagaaagtangaatttgccagcttgagaatgggtggctnaaggaagaaagaggctgcttcaggcacagggaatacaaagnacaaaggcaaggaaatagagtgccgtncantaaggnagaacctgggcgcttgagcanaatggctgtgggcagaacttnagctaccactnactagctgcaaatatgtctatacccaagcccgagtgaggtttttccataagtaggaancggcccgttcttntgatgaaatcccatgggtggctttccaatggttttnaaatgcctgtcc

SEQ ID NO: 681864 - DNA, 115 bp, Homo sapiens
gtaccgtagtcaatatgcagtttttttaatcgtactccttcctgacatctccccgttccgagtctccaaagttcattgcatctctctgtatgcctttgggcactcaaggcttagt

SEQ ID NO: 681865 - DNA, 522 bp, Homo sapiens
  misc_feature (4)..(4): n is a, c, g, or t
  misc_feature (7)..(7): n is a, c, g, or t
  misc_feature (20)..(20): n is a, c, g, or t
  misc_feature (31)..(31): n is a, c, g, or t
  misc_feature (35)..(35): n is a, c, g, or t
  misc_feature (42)..(42): n is a, c, g, or t
  misc_feature (44)..(45): n is a, c, g, or t
  misc_feature (55)..(56): n is a, c, g, or t
  misc_feature (60)..(60): n is a, c, g, or t
  misc_feature (65)..(65): n is a, c, g, or t
  misc_feature (69)..(69): n is a, c, g, or t
  misc_feature (73)..(74): n is a, c, g, or t
  misc_feature (82)..(82): n is a, c, g, or t
  misc_feature (92)..(92): n is a, c, g, or t
  misc_feature (112)..(112): n is a, c, g, or t
  misc_feature (126)..(126): n is a, c, g, or t
  misc_feature (128)..(128): n is a, c, g, or t
  misc_feature (131)..(131): n is a, c, g, or t
  misc_feature (135)..(135): n is a, c, g, or t
  misc_feature (140)..(140): n is a, c, g, or t
  misc_feature (166)..(166): n is a, c, g, or t
  misc_feature (171)..(171): n is a, c, g, or t
  misc_feature (175)..(175): n is a, c, g, or t
  misc_feature (181)..(181): n is a, c, g, or t
  misc_feature (187)..(187): n is a, c, g, or t
  misc_feature (194)..(194): n is a, c, g, or t
  misc_feature (197)..(197): n is a, c, g, or t
  misc_feature (210)..(210): n is a, c, g, or t
  misc_feature (212)..(213): n is a, c, g, or t
  misc_feature (223)..(223): n is a, c, g, or t
  misc_feature (228)..(228): n is a, c, g, or t
  misc_feature (230)..(230): n is a, c, g, or t
  misc_feature (232)..(232): n is a, c, g, or t
  misc_feature (236)..(236): n is a, c, g, or t
  misc_feature (243)..(243): n is a, c, g, or t
  misc_feature (247)..(247): n is a, c, g, or t
  misc_feature (254)..(254): n is a, c, g, or t
  misc_feature (257)..(258): n is a, c, g, or t
  misc_feature (260)..(260): n is a, c, g, or t
  misc_feature (265)..(265): n is a, c, g, or t
  misc_feature (270)..(270): n is a, c, g, or t
  misc_feature (273)..(273): n is a, c, g, or t
  misc_feature (284)..(284): n is a, c, g, or t
  misc_feature (289)..(289): n is a, c, g, or t
  misc_feature (291)..(291): n is a, c, g, or t
  misc_feature (293)..(294): n is a, c, g, or t
  misc_feature (298)..(298): n is a, c, g, or t
  misc_feature (301)..(301): n is a, c, g, or t
  misc_feature (304)..(304): n is a, c, g, or t
  misc_feature (310)..(310): n is a, c, g, or t
  misc_feature (312)..(312): n is a, c, g, or t
  misc_feature (327)..(327): n is a, c, g, or t
  misc_feature (330)..(330): n is a, c, g, or t
  misc_feature (333)..(333): n is a, c, g, or t
  misc_feature (335)..(335): n is a, c, g, or t
  misc_feature (340)..(341): n is a, c, g, or t
  misc_feature (349)..(349): n is a, c, g, or t
  misc_feature (352)..(352): n is a, c, g, or t
  misc_feature (356)..(356): n is a, c, g, or t
  misc_feature (359)..(359): n is a, c, g, or t
  misc_feature (368)..(368): n is a, c, g, or t
  misc_feature (372)..(372): n is a, c, g, or t
  misc_feature (377)..(377): n is a, c, g, or t
  misc_feature (385)..(385): n is a, c, g, or t
  misc_feature (389)..(389): n is a, c, g, or t
  misc_feature (391)..(391): n is a, c, g, or t
  misc_feature (408)..(408): n is a, c, g, or t
  misc_feature (420)..(420): n is a, c, g, or t
  misc_feature (444)..(444): n is a, c, g, or t
  misc_feature (460)..(460): n is a, c, g, or t
  misc_feature (499)..(499): n is a, c, g, or t
tgcnagngcggggttttatnggctacaaaanagangcaaaangnngggaatctgnnggcngcggngggnaagnngagctttncccccataancccgccctttgattagaaangggcaatatattangngcnttangggangtctggggggactgttacagaaaaanaaaanaaangtttcngggtcngataatnccngggggatcttttngnncccccccccnggggncngngccngggcttncctnggggggnaanngnttttncaacnggngggaactttcnttggncncnngcgngcnttngggttncnttcccttggcaaagnacnaancncccgnnggggggcnccngggntanggccttggncttnggggnggccgacncttncntgcccgcctttgattcnccccggggcccncccccccccccccccgggggccgncgggacggggggattnccttccccaggggggttttgatgcccagcagcccttggnattcattgttctgccgccccagt

SEQ ID NO: 681866 - DNA, 193 bp, Homo sapiens
ctaattggttcttcgatgacgctggaacaaaactgtagttgaacatctggaggttactgctaatcagacacccaggttaatgattgtagtgcttgcctgtgtatggacaggtgcaagagtctgggctcgttgagacgattcctttgataagccgtctttattatctggggcccgtcatcgaagaaccaattag

SEQ ID NO: 681867 - DNA, 306 bp, Homo sapiens
gaaacgacttgttaggatgattgtagatattgggctgttaagttgtcagttcagtgtatttatctagacgcaggcttaatgcggaggagaatgttttcatgttacttatactaacattagttcttctatagggtgatagataggtccaattgggtgtgaggagttcagttatatgttggggataaattaggtagtgggtgttgagctagaacgcttacttaattggtggctgctcttaggcctactatgggtgtaaaattttttactctctctacaaggtttgttcctagtgtccaaagagctgtt

SEQ ID NO: 681868 - DNA, 510 bp, Homo sapiens
atggttgttatatgtgagtatgttgtcgccttctcttgtgtgattctgtgccagtcatggtggctcaccacggtgggagatgggatggtgggggctgtcaggtggtaagaggggctgtgtgtggagtttctgtgcatgtgtttctgctatggttcctacagccctgaatctctatcacctgaaatgtgttgtgattcaactacagataagcaatatttccgtgttcattagacgcagagtgctggatttgaatcccagccttactactttctggcctcaggacctttggcaaatggactaactactgtgcatgcttaacacagtcaccagtccccagacattaatttgaagaagttttatcacagtgttttgggttttatataaatgtcatcatgtgtaatgatttgatttttaatcaaatcatttaattttaatcaaatcatttaaatcaaatcacgtgcatgtttttattcccactggatgcaaaatgagaagaaagtaaatttaaag

SEQ ID NO: 681869 - DNA, 170 bp, Homo sapiens
ccagtgatttgtaacctatcgcgccttcaatccatgtttccttgatgacgttttctgcaactgttacgccgttgggtaagtccattcatgttcaccgtccacggtggtaaggcttggttaactgggtaattctaacgggcaccaccgcaattggccaaaattggtttggt

SEQ ID NO: 681870 - DNA, 284 bp, Homo sapiens
aaggactctgtggcgccatgggttaatgggcagaagaggaactggaagagcccaagcctgtgtaaagttggattctaggtatgctggatatgagtcgaatcactttcaccttggatcttataagagataattcaaagactttattgaatcagtctctagtccccgaattttatgtttgtaccatgttcgtggctcatgctttcttgattcctggcatcctgtctgatttctgagtttgggctagctagagtcttgtttgtctatcttcttgattccccataaga

SEQ ID NO: 681871 - DNA, 137 bp, Homo sapiens
caggtgttctcgtgtgaatagggtttatgttgttatgtggtgggtgagtacctcattgtgttgtggtacatatgtagagggagtatagggctgtgactagtatgttgcgtcctgtacagtaggagagtgatatttga

SEQ ID NO: 681872 - DNA, 1235 bp, Homo sapiens
aacttagaaatgaacttttagaatatacgatactgaacgtattacagggtaaataagttacaagtagtctgggagttggtgtcaaatatcatctgagcagaagtgtggtaacaattagtggaggtatagatgaaataaaatgatttgcttgtgagtttcgtggttatgtagctggatgatgggtacatgtgggttatattatgactcagttgtctgttaatgttggttgtatgtcatagtggagcattttgtccctataatggatacaaggtttatggaatgagatgacaggatgttgttagttcagggtgcataggaaatcaaggaacttctgattgcatttgaattcgtattgaggaaccatgcattatgtcctgtggtttcgttgcggtttgaaattgagaacgcgaagaacattggcttgggtgggtatggtgggtcaagaacggcagcaattgtgaatgatgcgagattcgtgtttaaccaagttgtcatttggggtccgtcaggatgctctccttggacgtggctatgcaatttcaacttaattcccaccaagggtgaagcatctcataggatgtctccaaatagagggacatttggggcccccataagtgcagtgcaacacaaaacacggggtctccaccttcccgcaattgaagatggctatgcacataggggtccggggggcttctacaccggtgtaatttctgccaaagagactttgtgtaatggaccaattttggttgactaggtgggacaagggcttttacaggaacgatggcgacgtttgtagcgagaattggtatagggggggaacttgaatattaggggaaaacaatttgtgggtagaccaatgtgggagttgggattcggttaagcagtaatactataggttacagcacatcttacttgggggggaaatggaaagccccctttattcggttccattacactatcgcatctataaggcgcccattgggaacccctttaaaggaccttgggtagaaggggctactccaaccggttggggccgcgcatttagtgtaatagggtggggcctgtcgtagggacatgtcttgccacaacatccttttctcacaccccccagaccacaaacacctagtggggagacacgtcctactgactgacctgttacaaccatacatggagcccgctgggaaacaggagacaaacgtgtgtgggggcacatatgggggcaagctatatcttca

SEQ ID NO: 681873 - DNA, 552 bp, Homo sapiens
agccacatgcaacatgtcacttgcctcaatttcctaccaataccggttttaggcacgaatgcacagtaagataagggaagaaaacatggtaggaatgaagtcctaattactatacatgcatcttttctccttgacagtagggagaaaccttttacagatcagttacaaacaaagaataggcaaataaacaattttgtacaagaaatttaacacattctgtacaaggtcttcactttgctgtcatcatttgtacaaactcttcatagtttacttgaccatcaccatcaatatctgcttccctgatcatttcatcaacttcttcatctgttaacttctctccaaggtttgtcatcacatggcgaagttctgcagcactaatatagccattgccatccttatcaaacacacggaatgcttctctaatttcttcttcactgtctgtgtctttcatttttcttgccatcattgtcagaaattcagggaagtcaattgtgccattaccatcagcatctacttcattaatcatgtcctgtaactctgcttctgtgggat

SEQ ID NO: 681874 - DNA, 1545 bp, Homo sapiens
cagcgctgccggcttgcatgagggctgtgagaaggggcctggtgccggtttgtcctaggaaacgggctgcgcagtttctcttttgcatcgtcttttccatatccagggaaggactatgtaaggactcactgaaacgctgttgtgcatacgtcgatcggggatacagtacatacaccgtcatacacaggtaatgccgcttgaagggttaacgtgtgagctacgattcttgttatgtgcctgatttttgttacttgtaccagctttaggcatgcttggagaagagacgtcttgatggctgtggcgcatcggccttttagtagtaatgttcgaaggacgccatatagtgctcagttccaaggaagcaacttggacttctttgagaagagtttacaactcactgatgggtggggcaccaagcctagagagacgacttgagtatgcgtctattgggcttgtgccgccaaaataaagttggctgatttgactagaatgatttggacctttgtcagaagtcatttacagttaccatttgggaccaataggtagtgacaccgaagcaagagtcatttcggggaaaatttgaatgggtggcctaaccaaaatgtgggcccatcgaatgtgtgaccttcctacaaggtggtaaggataaacctccaaagaggagtggcggaaaactccctttgcatgggaggtggtgccatcagttgaaccatgtcaaggagaattttctaccccgtctaaccgggggggccctttctccacacagggaattcgagactcccccaaggcaacaaagacaagggccagagtttctcatgccgatggtgggacgcgcgagtgtgttgacatcgaagggtgaccgcatataaaaccgggtggtgaaacacatgatgacaggggtttttcctaacaaatcgagtctccgggcaatttatttcaagagcccccctatttttgggacacctacagcagtgttgcacaaatgtggaacgaaatgtggccacggacaagcgaagaatcccccccccggtggataatagccggcagaacctcatcgagatgaatccccgccatattatggactgcgccgaccgtacatgggtgtgagaacacaccacaacataaatgaagatgcgtagtgacacacgggacgaagtagcacatcgcgtttgattgaagaacacaatcaccaattataccagacagaagtaccattttatgggtacgccattggtagagcgaaagatgcccccgatctaagcgcacagatttggtggcagcaagaaaaacaacgagcgtcgtggcatattgactgaagagcagggagatccagctacgcacggggccagctcttacggctcacgacagctggatagttgggacaccccagtagttggtgaggaagctcgtcagaagcgcaagtaaaccgggggctccctctacgaagagatactcactgtgatgtcatccgtaagatagggtggaccacacgaataaaggtgtagagacacactaactgcgaaagatcgcccacactgttgagga

SEQ ID NO: 681875 - DNA, 1096 bp, Homo sapiens
actacgcctacaactgggcaggcctgcgctgcggcgctgacgagggcttgaccctgacgaacgtaacctgtcgctgcacgttcgccgactggagccgaaggtcgcctcagttccgttcggtccgcggacggccggtggccggtcgcgcgggctgcgctgctgtgctgtgctccgcgcaagtgctcctgcgattctagtcagcgccgcgtagcctgatggcccggacggagacacgccaggctaggaataacatctgatggcggacataccaagctttggtaatggcgataacgactgatggtcttgagatgagacacgctgtgcgagattgccacagaacctagtagccgcgatgagctggaagagggcacatggatgaacagcaccaagatgctgacttcgactctggcttgggaagacaaccctcggtactctcccttcctacggaggggcaatgtaatgacccgaacggaggaacgaacattcgcaattagcagaacgttagtgagaccacttgagtaccacaaaaagatggtcatgtgggggctccccctcaacgaattatacttggaaagaattggtcaatttgtcctaaatccaattattccagggttccccaaagtgtactggggctttacatccttagaacggagtggagtcgactatcgttagcttgcgtaaccgcttaaaatggttgggaggaaagtgtcccccatgtgctagccgaacgtagccaccaggggcaatccttccgcaaccatggaacaaaatagggccccccggggagggcccccatcctgtagttgcctcaagtagccacgtaaacgggcacgcaaaaaactatgaggagaaacggactttgaggttcctgagaaagtgggctttgaccattgtttccggagtggaaattcacccgggaaatagtagtaggaatggttataacggttgtacttggggatatgtggggatcccgaggaatcatttaagcaggttgggacttggaatttgttgagtacgaacaattaattgttcccgaaggtatgtgggccatttggtttcttggaggaggaattcttctagagacaggagcggaatg

SEQ ID NO: 681876 - DNA, 181 bp, Homo sapiens
cccttgcactccggccgccgagtgcatggctcacagcctataatcccagcactttgggaggccaaggcgggcggatcacttgtagcctcaggagttcgagaccacgcctggccaccatggtgaaaccctgtctctattaacaatacaaaaattagggtgcgatggctcacgcctgttatcc

SEQ ID NO: 681877 - DNA, 809 bp, Homo sapiens
gaggctgtatcccgtgctgttaccctgggagatacttaggcgctcactagtctttccttgcgagattgtggggcggtgactgccagaatccagactcggggtcccaggctaggcaatggtaatcgtggcttcatcatgctcatagcaagattccctcatatcgtgcgctccgttcaccattcgcaccatggtaacccatacggcatttggcagtactgcatgacatgaaatgctgcctcaggtgcgtgaaagctggcaagaggcgctgtggttcaaagactactactgactggtacctgactcgtagtagtgcacatacggaattcatgaatccaaatagggttttgattctaccgttgtactcgaacggcatttattttcgtaatatctatcgctcggatcctcttgatgttccttatgcatagtaaacgatagtctttgatggaagtacggaagttaaaccgagatttgaccactgaaaggtgagtttatgctatacttcattcttccttaccataattccgctttccaacctgaaagtgggaaggttcttaagaaaggggaattcatggtgctagattagtaaaacatgacttttaatgagtagggtcttctttatcgtgtgggatttttactaccttttttcaagaagaaaaattgatgagttttgtataagctggtcagatacaaataataggtgacttcacagtttagtaattattaatgggtactgtgtaaacatttgggtacctaaattatgtttgtgaaaagtaatttaaaattagtatctaaaagctagtttctgggtg

SEQ ID NO: 681878 - DNA, 643 bp, Homo sapiens
  misc_feature (504)..(504): n is a, c, g, or t
  misc_feature (590)..(591): n is a, c, g, or t
cagcacccaagtcacctcttgaatgctttgctgcttaaaaatttattctgaacagatatcctaaaacatctctctccagttcaaaattccacaaatctcaagtggaggagcaatatgccacctgtctctttgctaaaacttaacaagagtcacctttgctccagttcccaacaagttgctcatttccatctgggaccacctcaccctggactttattgtccataatgctatcagcgttttgggcaaagccattcaacaagtctatagaaagttccaaacgttcccacattttcatgtattcttttgagtcttccaaactattccaacccctgcctgttacccagttccaaagttgcctcaacatttttgtgtatctatagcagctctccactcctggtaccaatttgctgtattattctgttttcatgttgctgataaagacacacccgagactgggcaatttacgaaagaagtttaatggacttacaggttcacgtggctggnggagcttcagagtcatcgcggaaggtgaaaggcatgtcttacatggtggcagataagagaagagagcttgttgcaggaaactgctnntataaaccatcagatctcatgagacttattcactatcataagaacagtacaa

SEQ ID NO: 681879 - DNA, 196 bp, Homo sapiens
ggaggttacagtgagccaagatcatgccattgcactccagcctgggcaacaggagcaaaactctgtctcaaaaaaccaaaccaaaacaacaccaaacaaggttttctcactctggaacgtgattacatgcttcattgtggacctacagggacatgtggacagtggacaggggaacatcatccacaggtttatcatt

SEQ ID NO: 681880 - DNA, 245 bp, Homo sapiens
agattcaaaaacgatcccaaaatacatctacaaaagtcatgtccacaaggagcatatacaccaggatctacaaaatacagaaatactgcacatacaaatgtcacacaaactggtgtctaaatccccaggagataagctgatttcatctggggaggtgacagaagagcgtgtagtccttggagttcttggagatgggagcgtgtcccaggcattatacccacttggtggtggagttggcatttgcc

SEQ ID NO: 681881 - DNA, 596 bp, Homo sapiens
cccaaaaagtaggaaagaggataacactgaaaatttggatttctcatgaatagataggtgcatcttctggggtcaattaaaaggagaaaaaatccaatttctccctttgcatttagtcaaaagaaaaaatgctttatagcaaaatgaaagagaacatgaaatgcttctttctcagtttattggttgaatgtgtatctatttgagtctggaaataactaatgtgtttgataattagtttagtttgtggcttcatggaaactccctgtaaactaaaagcttcagggttatgtctatgttcattctatagaagaaatgcaaactatcccggtattttaatatttgttattttttcatgaatagaaatttatgtagaagccaacaaaatacttttccccccttaaaaagagaatataacattttaggtcacaataatcttttggtttttaaagtaagggaaaattttgtggggattatctttttggggggggaataaatcttttattttgaatgtaataagaatttgggggggtcaattgcttatttgttttcccccggttgtccagcaattaataaaacatacccttttttacggccta

SEQ ID NO: 681882 - DNA, 428 bp, Homo sapiens
gcatgcatgtggatcgagaggtaaacaacatcagagacaggaagcaggtgtggtgtttcatctccatagatcactgctggctttgcaaaaaaaattatatgaccgtggtgatggactgcagtcaacttgaagaggcagcagggccagtgagagctgccacgccgcgagtggtctttttgccgcagccgaccaacatagcctctgtacttggtgtgtgactagcatcttggcaaattttttcttctcaatatcctcgctcgggagggtcagaagcagttcatcttcaccggcagacagcagcactccttccctgcctcgtcttggggctgtggctgctcctggctttactggtgggcggaataatgtcccccaaagatgtccacctcctgccccctggaacttgtgaatacttgacgtgattcagcaaa

SEQ ID NO: 681883 - DNA, 1148 bp, Homo sapiens
  misc_feature (310)..(310): n is a, c, g, or t
ggcgtggaggagagcgtgcgggaccgggtgcgagaaggaatacaggagacctagatgatacgtaggatgtgaggatccgagagccaacagatctgtgcacgaaggctcgggcaatcgcgccgctgtcgtgggactatcgagatgacctacagccgagccgcggtctacttcgctgcaccgtccaagggacgggcgacaaggacgtgatgatctagcggcgagctggacatccccgtagcacgcgggggccgggtggtggagcaggacgcgtctagcagttactccaaacgtggctgcagaccaggcaagntcgttttctcatgcactcgaaatgtgtacatccagcagccgcgtgggagaatcagcgggagtgtctcggcgcgcgcgctcagaggtctactgtcgcagtcccatggctgacggtggcgctgacgggaaactggagtactacacggacatcgatgcacgagcagcttcttcctggagctcctggagcagctacggtggtggccaagaaccccaagactggtgcatgcgcaggtctgagacatgttggtggaggaggatgatgtgcaacgtgagatgtccatctgcgctgtgcacagtactctcaaggcacgagtagccgcgggagcccactgatagaagctctagcaaggtcatcaagacatcaggtggaaaccgggccggcggatgcggtgacagaagaaggcgaagtaccacgctcaaagaaccggggcagccgggggacgagggtgtgggaacaggcaccaccatgaaggccgaacgttgaacctggcaagacgaaggaaatgaaagcaacaacccgaggaacgaacaccaaagtgggaacacagggccagaaaaggcgcacaagaacagagacgtgaacacggaaacgaccaaaggggcacgagcaagagcacaagacagagaagaggacagcgcaaacaggaaacgggaacgagaagagagagaaccacaaaagccgcgaataccataacgaaagaagaaaatcggagacccgtaagaaaggggacgcacaaaaaacaaagcaaagaagaaaacacagaaagcgcctctcgcaggagaaaaagaaagaaaagaacagcagaaaacagacggtggacccacccacaggcgtcagc

SEQ ID NO: 681884 - DNA, 116 bp, Homo sapiens
gggcctgtggaagtccccagaagttaattgatgggtttctaaaacatgaaggacctcctgcagagaaacccctggaaggaactctctgcttctacttcaggcgttccagggcgttc

SEQ ID NO: 681885 - DNA, 255 bp, Homo sapiens
ggggccccccccccccccccccccccccaagttccttgggcccacaggggccccccttttcctttttttttcccccccccgtttcccccccccgcccggtattccccccccctccccccccccccggagggggcgtgttcggctgccccccccccccctagaaagaagagaaagtcgacattatatataaaccacaaccaaacactcattttttttttgttggggggggaggggggaaaaatcaccgaagaaaaa

SEQ ID NO: 681886 - DNA, 132 bp, Homo sapiens
gagcattccagtctgcttctttaagttattcatgagaaaaataaaactatgttctttgatactttaccctaactcaccttttttttttttccccatctaggggtaacaaccccgtgcgggggaccctctcta

SEQ ID NO: 681887 - DNA, 319 bp, Homo sapiens
  misc_feature (10)..(10): n is a, c, g, or t
  misc_feature (282)..(282): n is a, c, g, or t
aagcttggcncgaggagtttattaaaaaagtgttagagcaggaacgaaaggaaataaagtacacttggaggagggccaggtgggcatcttgagagagcaagtacacggttttgacctttgacttggggtttatatcttggcatacttctcgggggtgcgtcccttctcccctgattcttcccttggggtgggctgtccgcatgcgcagtgggctgccgacacttgggagggccgcgtgcacagagtgcttactggagttgtgcggggccctcttgagggagncttcccttaccaccttcctaggggaaggtcacacact

SEQ ID NO: 681888 - DNA, 111 bp, Homo sapiens
tggccagggcctcccaaattagggggattacggccaaggagccacctggcccagccccctaaatttataatataaccttcagaaggtacccagacagggtacgacgccggg

SEQ ID NO: 681889 - DNA, 713 bp, Homo sapiens
tgagccccccccccccccccccgtaaaaggataactcacacgtcattatcaaaacgcactccttcttaaaagacattacccgacccctgaaaatacaatatacggccagcttctcatcctacggtcggaggaggcacataggacaataaaaaaaaaaaaaacagaaaaaaacaagaaagcggcctttcccactgaggaagattatagggcgtcgcagggtagtatacgcgtcgggtattaggtagctagcgtattaggaagaagaagtatattattgagacggttacgtcggcgagaagtcctagtggggaacgaatgcctttgaggccgcgaaaggcgtccactctgccgcttcctggagccgttcgtcgatcgcccttaggtgtactacttatacttagactacaggttagcctcgtaaggaagtggagtcgacctcctatccccactaccttactattagagttcttaacgtatctactcctactactattgtagctcttatccctaaatttccttctacttaggcccccacttagaatctcattcccgggtacagatacggcctctaggagtcggccaacgcgtcctagcccgctaacaacccgatcgattatcggtctagggtttcctacccctagtctacggagaccgaatcggccccctaccctaccttccgtcggtcccgggtcgaatccccttataaagctccg

SEQ ID NO: 681890 - DNA, 1034 bp, Homo sapiens
  misc_feature (450)..(450): n is a, c, g, or t
  misc_feature (464)..(464): n is a, c, g, or t
agaagctgatgagatgcacacattgtttacagctagaggtgtgaaagatacaaatcctgtccttgctggtacgcccgataggaattttacagaagctacagagaagtgttgagcgagaagaaaataaatggaaagttgaaggtctcgatgaatcacacacagtactattaatacagatgcgagtcatcgatttacatcttcagagacatcgagctagatgctggatttaagagaatgcgaaaataaggatattgaaaatcgtgagaagtagaactgagaactatttggtaatatgtgaacgtagaataaggcgaagagagtggaacgatctaccttatgttacagaagtcacgagagttgaaggcactatgttaaaatgaaactacatctacaaagacattatgaactgaatcgaaataagtgacaagacaggaagggagctggtgattngcataaggctcaanagtcactggagcttatccagtcaaaaatagtaaaagctgctggagacactactgttattgaaaatagtgatgtttccccagaaaacggagtcttccgtgaggaaggagacaactgtctgtaagtctaaatcagactgtagcacaggttacagcagttgcttccgggcggtaaacctaacaggtcacaaaggagaaagagcactaccaggtgtcagagtgaagtaatggggaagctgtcatttgggatcaaacgaggctgtattatatttgcgaattaaagcttatgtatgtgtcgccctttctatttgtcagaacctggacagaggttggcttgcctaatcctgttgactatgatttaggatggacagcaagcccgtttttacacctcgggttgggtatgtcacaccggcggaaagtagacgtcatccggaaaaaaggtacatgtctattgggcgcacagtcagacacaggcgcccacgcagcggccacgaggaggcggacaaaggagggacgcgtgcccaaatgtggtgcgctggtgggagagacgtacaaagcggggcgcagatgcag

SEQ ID NO: 681891 - DNA, 657 bp, Homo sapiens
  misc_feature (73)..(73): n is a, c, g, or t
  misc_feature (87)..(87): n is a, c, g, or t
tttccagccccatttttgaacactcacaaacttacaactgacaaaatgaagtacagtaagtagctggtgattngcataaggctcaanagtcactggagcttatccagtcaaaaatagtaaaagctgctggagacactactgttattgaaaatagtgatgtttccccagaaaacggagtcttccgtgaggaaggagacaactgtctgtaagtctaaatcagactgtagcacaggttacagcagttgcttccgggcggtaaacctaacaggtcacaaaggagaaagagcactaccaggtgtcagagtgaagtaatggggaagctgtcatttgggatcaaacgaggctgtattatatttgcgaattaaagcttatgtatgtgtcgccctttctatttgtcagaacctggacagaggttggcttgcctaatcctgttgactatgatttaggatggacagcaagcccgtttttacacctcgggttgggtatgtcacaccggcggaaagtagacgtcatccggaaaaaaggtacatgtctattgggcgcacagtcagacacaggcgcccacgcagcggccacgaggaggcggacaaaggagggacgcgtgcccaaatgtggtgcgctggtgggagagacgtacaaagcggggcgcagatgcag

SEQ ID NO: 681892 - DNA, 933 bp, Homo sapiens
attttctcaaaatttaaagagtaaagaaatgaatatttttgggccaggaagtgtggcttatgactataatcccagcactttcagaggctgaggcagtcagatcacttgaagtcagaagttcgggaccagcctagccaatatggtgaaacctcgttgtatcgaaaatacagaaattagccgggcatggttgtgcgcgtctgtagtgtcagctgctccggaggctgagacaggaaaatcggttcaacccgggaggcggaggctgcagtgagcccagatctcgccaccgcattccagcctggccaaaaaagaaaactctgcctcaaaaaaaaaaaaaaaaaaggaaaaaaaaaggaaaaactaattttttaaaagaaaataagccgggcgcgggggctcacaccggtaatcccagcacttggggaggccgagaggggggggaataactggaggtccggaaattggagaccaacctgaccaacatgggagaaatcccatctctactaaaattcacaacatttagcacgggcatgggtgggcacatccctgttgatcccagctactggggagataagaggcctgagattcgatggacccgggagacagagatcgcgcattgcactcagcctgtcactagagcaaaatcctctcagaaccacaaccggaactgttgatctcttacacaaatagccggggacacctaacgggttcccggcgggaaagaaaacgggggtcgcgaggtaaacttcgtcacaattctcttcccaagcaaccgcgagagacaccgcgaggggcccggcgggggggtacgatggggccagggggtacgcgggggaaccccacgacggaaaggggacggccaccgcaaccaggtaggcggtgccaccccgcgggaccgccaggggcgacaggacagctcgagaaagggaacagaga

SEQ ID NO: 681893 - DNA, 134 bp, Homo sapiens
cccttcccacagggagtgaagccgaattgagatatcatgaagcgaaacagagcaatttccagcagtgcatttccaaagcagtatctggagccagtgcaggggattacagtgacgcaattgagacgctgctcaca

SEQ ID NO: 681894 - DNA, 821 bp, Homo sapiens
  misc_feature (26)..(26): n is a, c, g, or t
  misc_feature (61)..(61): n is a, c, g, or t
  misc_feature (102)..(102): n is a, c, g, or t
  misc_feature (113)..(113): n is a, c, g, or t
  misc_feature (126)..(126): n is a, c, g, or t
  misc_feature (160)..(160): n is a, c, g, or t
  misc_feature (197)..(197): n is a, c, g, or t
  misc_feature (226)..(226): n is a, c, g, or t
  misc_feature (229)..(229): n is a, c, g, or t
  misc_feature (241)..(241): n is a, c, g, or t
  misc_feature (246)..(246): n is a, c, g, or t
  misc_feature (275)..(275): n is a, c, g, or t
  misc_feature (278)..(278): n is a, c, g, or t
  misc_feature (292)..(293): n is a, c, g, or t
  misc_feature (303)..(303): n is a, c, g, or t
  misc_feature (310)..(310): n is a, c, g, or t
  misc_feature (314)..(314): n is a, c, g, or t
  misc_feature (341)..(341): n is a, c, g, or t
  misc_feature (346)..(346): n is a, c, g, or t
  misc_feature (357)..(359): n is a, c, g, or t
  misc_feature (366)..(366): n is a, c, g, or t
  misc_feature (377)..(377): n is a, c, g, or t
  misc_feature (394)..(395): n is a, c, g, or t
  misc_feature (398)..(398): n is a, c, g, or t
  misc_feature (407)..(408): n is a, c, g, or t
  misc_feature (421)..(421): n is a, c, g, or t
  misc_feature (459)..(459): n is a, c, g, or t
  misc_feature (468)..(468): n is a, c, g, or t
  misc_feature (485)..(485): n is a, c, g, or t
  misc_feature (508)..(508): n is a, c, g, or t
  misc_feature (589)..(589): n is a, c, g, or t
  misc_feature (641)..(641): n is a, c, g, or t
  misc_feature (653)..(653): n is a, c, g, or t
  misc_feature (662)..(662): n is a, c, g, or t
  misc_feature (669)..(669): n is a, c, g, or t
  misc_feature (689)..(689): n is a, c, g, or t
  misc_feature (753)..(753): n is a, c, g, or t
  misc_feature (821)..(821): n is a, c, g, or t
tttttttcttaatttctccccctcanttctcccctccccccacctcaaacctctctccaantacctttcacccctccccacaccctaacccttccaaaaccncctcctccaangctggcccatggngtccccaccttcccacccactcacgttaccatcnttaccactccacatctttccaactccttctctccacnctcatctatccatctctctatatccaaanctncacatgacaatntcatnccactccagagttagatgtacctatgcanttnccctcaacccaacnntcatatttcnaaacaangatngctctaaacatctaaccctccatctcnccatntatgtatctcnnncctaacnacctccccaantccctcttcccctaacnnctncccttcagnncatttgcacaacnaccactccctcccaccgcaaacgctccccagagcagcncaaggactnaaagccagccaggaaantggaagaacaggagaagctcatntaatggattaccctccacaggattatgttccttgattcctgagagttttttctcttgattttaccccctcagtctatcacngcaagagaaagaggtagaaaagacaaacagaccacaaaagacaagaacccanacatatagacanacgcacctnttgcatntgcatgagccagagcctggnagagaagagagagcgtgcaacaaagagctcagagcaggcaggcagcccaccccctgcagcagtnctgggcttcactggagcccctgcaggaagtccagcagccctgtaatccactcctctggtttgtcaggn

SEQ ID NO: 681895 - DNA, 1142 bp, Homo sapiens
gctgaatgcaggcgctcttggctcggcgcggcctgctgcaatcctgtggatgtgaactgcgccgccgagccaccatcatgcctggtgcacttacagtgacaggcttcggctgcgtggtcaccaaccgattcgaccagttatttgactgacgaatcgtgaccccttcgaggtgctgaatggcagcagagaacaagaacaaaagaagccggctgtgggtgcggcgttgcggtggccctgggtgccaatgagcgcacgctcagtgccgcggcccagacacacactccaactgcggcaggcaacacagctgcgcaaggaagtcccatgaaagacctgcaacgaacccgctgcccgcccacgcgttggcgtggttgcacacagacaagaggagcactgcagccgccctgtggcggcttaacaacagcaaggcatacagcacgagtttggcacgcaagacctgatcaacaacttcagtggttgcatgtgcgacccactcctttgactacgacagacccaggaacaagggcgaccacaccttcgtgcacctgacacgatctctgaatcatgccccactttgcacactgaaacaactctgcggttgaatgcgcagcggtcgaattcctcccgtctgcacttatcatctgcgcttctctgcgctgagcctactctcgacaggtccgtgtcgtgccattcattgcgacaacacgtgtctggagtgtcgggcccggcgcgactgatgacaccttgggcccgctgcgcagaagtgccactatagcattcatccgaggcacacaccctcacctttggcccgggcctatcatgtcactcctgacatgaaatcatacatttaccacgactcacccctgcggccttacacgccccgctactgagcgacgcgttggtatcggcagaggaacctctcagctcctggtggcgaccgtttctcaatgcaggattaacactaatttgtctcgctacgacttcggaacactcccacactcgtagaacgacctgtgaaacttccgaccacgcctatctgctcccgcacccgtcgcagtagccgcacatatccatcgcgacgtccgtgccaccgctcagccgcccgcgccgcccgtgggcccgcgtgcaggtgtgagggcgctacc

SEQ ID NO: 681896 - DNA, 173 bp, Homo sapiens
atgtaccttttacagtggatggacacggagaatttggtgctgcccgatgatgagggccgtgggcatccagcaactttatgggggcgagtcaggtttccccaaccaagaatgcccccttcctcccaggggttaatgggctcccggggggataccgagcttcgaatttctgtaag

SEQ ID NO: 681897 - DNA, 204 bp, Homo sapiens
gggggttttttttcccccaggggggggtccccgggcttgggattaaaaagtttttaaaaccgggggcccttttctttttggccccggttcccccccgaaaaaggttggggtttttttttttttttcccccccccctggggtttttgggttttccgggggggatgtttttccccggggataaaacccggggtcccttttttttta

SEQ ID NO: 681898 - DNA, 482 bp, Homo sapiens
ctttctcgaatcacctagagcttctgcaaacaaaattgtaccagcaaactgtgaaatccacgttatgctcaaattcgtccccttaatatgtcaatcattgttgaaagcaaatacggagtatacaaagcaagtgttatacaggaactgagtgtatcaggtgatgattgccgtgaaaacacagcagcaggataaggacaaccagaatagggattcttgttttatttctaacatatgttcattctataccactgtattcattctataccactgttagtaaaaaacccacgtatcagttgcatttatgtgagcagcctgcaatcatttctctttcttgttctcatgtcattcttcttccaccttcagaagtgtgtactgttgacacatggtgcttcgacactattctcactgcacacagcccctctatggggctccaggtacttctactattgtgcactataataaggcaaggtgctcgaagcatt

SEQ ID NO: 681899 - DNA, 162 bp, Homo sapiens
cgttaatagagaagtttctctgaacgtgtggaacactgtaataagataaataaatttttaaaaagaaaaagtaagcatatatacaaaatgtatgtaatttcatttgtcttcacttatttaatatttataaccatacattaaatgaaaaccaaatcctacaag

SEQ ID NO: 681900 - DNA, 326 bp, Homo sapiens
gttcggcagcgaggtgaactcaggctgagccccggtgcatggctgggaaggtttgagggaagcattctgaggaactcctggctgggcttctgtcccctctggccgtggctctccaaggtgaactcgttcacccttctgccggcgccctgttgacagagcttggacgccaccggggaacttggcagctggcgagggcgtggtcaggctgggcctgcaattctgcctgggctcttgtggcctttgggctttcttttcagaattcccttctcccgtggaggcctaagtggcgcgcggtcccaataaggcaccaggggggttacccggag

SEQ ID NO: 681901 - DNA, 129 bp, Homo sapiens
tctgaggatcccccatacaataaataaataaaaataagcacaaggtcacgtaggcatctcacttaaaaaatcaaaaatctggcagtaagaatgtgccatatagtaaagtcataaagagtcatagctgag

SEQ ID NO: 681902 - DNA, 232 bp, Homo sapiens
gtcgaccataagccagggcttaacttgagggagaagggtgggaggggggtgaggatcgaaaagttacctattaggtattatgcttattaccggggtgacaacataaattgtataccaagcccccatgacacagagtttacccgtataaaacctgcacatgtcatatgtactccctgaacctaaaataaaagttgggaagaaagaaaataaattgaaaaaaagtcgacgcggc

SEQ ID NO: 681903 - DNA, 121 bp, Homo sapiens
agacattggctgtggatcatgcattctaaaataatagttactattcttaggatctgtgtcttgtgttacaccggattctataaatagcaatgccctttgataggttacttgatatgcgtat

SEQ ID NO: 681904 - DNA, 480 bp, Homo sapiens
  misc_feature (8)..(8): n is a, c, g, or t
  misc_feature (31)..(32): n is a, c, g, or t
  misc_feature (73)..(73): n is a, c, g, or t
  misc_feature (110)..(110): n is a, c, g, or t
aactttanatatgagttcaggcttacccccnntctatataatataatataatataatatagaggagttaaaanatattttaagtccagtggtgcccctgatcttaatganatcccatgagagttaataatatttaaaaaatataatatagagaacacattcctgtctgacagctttgaggagagtagtggttctcccagcacagagtttgagatctgagagcgcacagactgcctcctcaagtgggtccccgaccccagagtagcctatctgggaggcacctcacagtaggggccgactgacacctcaaacagcggggtgcccctgtgggacagagcttccggaggaaggatcaggcagcaacattcgccattctgcaatacttgctgttctgcagcctccgctggtgatacccaggcaaacagggtctggagtggacctccagcaaactccaacagacctgcagctgacggccctgact

SEQ ID NO: 681905 - DNA, 145 bp, Homo sapiens
acctggccagcagctgatgagaatggtgggcatcagaagaatgctggaaagaatacttgtcatccaattgtccaatacatccaatggatcatcctttcatttcgtatcaacatacctccagatcatgagctcaggctgcccgagg

SEQ ID NO: 681906 - DNA, 203 bp, Homo sapiens
cgggaagcttattggattggtctaagtgagattttaggggtctgaactaggaggaaactttttataggaatgaagaggagactgaagattccaaaaatatataggacatcaagtgggtaggactcagtggttgattgactgtggagacaatgagagagtgaagagtcaaagatgatggctcaggtttcttgcagaagaaaaaa

SEQ ID NO: 681907 - DNA, 547 bp, Homo sapiens
tttatttttatgtttttggagagaaccccctttatggtgcacccctggtagtaaggcattatgacacccaggcgttccctgtggcccctcgaggcaaaaggtcaccccctttccagggcaaagccaaacccccaactcagctctgggcagggtcccgtctccgaggttgacgggatcagctccatccggggacaaggaaagaggactgacccacaagaccaaagcacctcaaatctaccggctgcagggccacaacggtgggcagcacggtaaagagcgggccagggtgcagggcaaaatgggtccgagtccaaggtccacatcccaggtgtgctgcctggccctaagctgtcctcaaggccagaaccaaataacgaaagaacaaaacaagacacacagaaagacgaagaagagaaagaagaaaagcagacagaccacaaaaacaaaaggaagaaaaagcaagcaaaagaagaaaaagacacaggacatacagacatgccaaaaacaaacaataacaaacagacgaaagaccccgcagacacaggac

SEQ ID NO: 681908 - DNA, 449 bp, Homo sapiens
cctgacttataacaatgctgaatagttcagatctgaaaagcatgcacacgcacacacagctgtgttggccaaagcacactgaggcctgaatcagcagtggtaccggagagtgacctctgaactacactatactggtgccagataaagaagctggtgtgaccttcaaagcttagcaagcggacccacctgaaagaaaaaccatccctgtctgcgtaaggtatgtcagagctgagggcgtggccaggctatttccggaaccatgctcaatccccaaagaggaacaggcgagagaaaaaaaggccagctgccccgggtggggaccaagccatccccctcccccaatcaggcggtgggctcctccccaggtcccatcacagtgatgcagcacttgagaagcaggcacacacagacttgggcccagcggtgagctacctgcccccaacaagttc

SEQ ID NO: 681909 - DNA, 601 bp, Homo sapiens
agggcccaaaaattgtttattacaaaagaaatccaaccaaaatgcttaataatttacaccgggacccgggccccggccataagggcccaattcccgggaaccaacacaatggggcgcttcccgagaaaaaaaaaaaaccccccccaaatctcggagcttggggtaaccagggccatagctgtttcctgggcgaaaatgttgtcccatcacaatcgctaaagccctattcattttttgccgcccggttccacccaaaataccccttgaaattcccaacgagataacccgggtaaaccccctcaccgggggatctgctcaaaaaaacccccaccgactttctcggcttatgccgcccccccttgcgatgtaaatgcacgcgccagcttgagtattttattgggtcacccaaatacgctgggcataatcatcggacaacggtgttcctcgggggaaaatggtttccgttcaaaaatccacaaaaataccacgccggaactataagggataaaccgggggggccaaaaggggggccaactccactaaatgggggtgggatcacaggcccttttcaaggcgaaaaacattcgagcaacctgaaatt

SEQ ID NO: 681910 - DNA, 974 bp, Homo sapiens
ccgtgctccatggggcaacctgtttctccaacgttaaccccccacattgtccaccgggggcacacacaaattttgccaggctggccctccactttttttggggaaaaaaatagcggaagatcttgaaggaatttttaaacctccaagccccctgtgttagccacggatacttcccgcgcaaggtccatccccccaattccgggacaagattgagaaaatcggagacaagatggtgtaacatttctgccacttagagccggatgttcaaagagatgccccatccagaagcgcccggtccattcccgccaaccggctctctggagaaagggaaagagcctggtccagagcccgagaggagctggttcccgcacccaagagagagaggaagaaggagaaaaattgccccagctctgccgggatttgacttggccctaagaggaaaagcaagacaaaggagagaagtttatgaaggatgcccaacaaaagggggagatgacaccacgaggaaaggtctccgtctgtgaaatcctcccaggcgccagatgtttgctgaacggtctagcgaatgaggaatctgccagagcccagccgggccacgaagcctatgcccgcaggtaggagacccggtgacgagcgtctctgccctagaaagccaaaagccaggggatagaaatctgctatttgatgtaagaactccacccaccaccagcctagtaaggcccctgcacaccagtattcgtagctgtgcccttctctttggaaggatacaggaataccgattgggcttgccccccccgagacgtaggaggataacttttaatttaaatcccagataccagaggaaggaagttaactgtccgtggcctgaagaaaatcatgggggccagcccctttaatcccctccctgtgggaagtcatcctggctggtctgtcttttctcccatttgttttaaaacaaaaataaaaaattatac

SEQ ID NO: 681911 - DNA, 271 bp, Homo sapiens
agacgaccttcacccctgaaacaacaagaccaacctctcctctttctcctcctcctcagcctgctcaatgtgaagagacaaggatgaagaccttgatgatgatccacttccccttaatgaatagtaaatatagttcctcttccttatgactttttaaataacatttccttttctgtagcttactttaagaatacaatatataacacataacatgttatgacatacataacatatattacatgtaaaatatgtgttaattgactgtatcagt

SEQ ID NO: 681912 - DNA, 1181 bp, Homo sapiens
  misc_feature (208)..(208): n is a, c, g, or t
  misc_feature (398)..(398): n is a, c, g, or t
  misc_feature (1022)..(1022): n is a, c, g, or t
gctggtactctggtgttggtgccaaaaccgtgagcgagccggcgcatgggcggagcgtactcattctgagcgtgaatgaggagcgaggtgtcgcacgtgctgccgagtgcctagcgcatgtctgacgaggcgtaccgtgctcccgtgccagtcgacccttgatgccgctgaacattcctctgtggcgatctttggagacagtccatgncggatcggcaacatatcttgcgaggagatgttgcgtccacaagtagctagggtggctgcacatgtgaatgcatggagagtaagcattgcatgtaggctgcagggatgcagggccgtgcaggtgggctagtcgccacggggcatgggagcacactttgcgtatcatgctagaatagcgtcctagctactcngttgtcgcaccgactagcagattttgcttcgacaggttggtggcaggagttcgcaggagcaggactgtgtgggtgcgagagcgacctgctatggatcctgctggaacctgggacaacgtagacgagctatgagagtggatctcgggacgactccataggctccttgatggggacgacggtgccgcgcaaggacgcgtgcgtggatccctgagaacctgatgcgtcctgttggggaaactgtatccgtgtctcgtggaagagatggcaggcaccgtggtgctgcgcccatggtactaagggtccagagaccaatcgcactggagcggtcaggctttcgccatagcagggttccttcacattgcctgacctacgtggtccccttggtctagcgcggctgtcttaaagtggccccttgtggcggctccccacacaaaggcccctcctgttacataggtacttacgacgccttggcattttccctaagacgttttcgaaacgagggaaaagggccaccaggagtcacctggatctcatttggcttgggccgaacgtagggcattttttcggggaggcgaacctttcacttacttccacgtttacaccaccggctaaccatttctcttntcgggcccggggggagaaaactgcgcggttgtcgaatggaaaacccccaaagtaattctaacaccgattttcccgggaggtttcaccatccccacaccgtccttcgccccgaaaggtcccagccagggccgtagagacccccaaaaacacaaggcgcag

SEQ ID NO: 681913 - DNA, 658 bp, Homo sapiens
tggaaacggggtctcggctccatcaccccaggtctggattgcttggtgcgatctcagctcgtgaggttgacctcccgggcccaagtgatcctcctgcctggacctcccaaaagtgttgggattccggcttgaccattgatccagtggttctaatttcctacccaggttgttttaaacctagtttctccagctaagttaaaagtgtgcccaatgggaaaacatctaaatcttcctgcgagcccattcttccgggtgtcttggtgtggacaaacctctaatcttccagtgtcttgggtgtggacaaacctaaccttccagtgtctttctggtggacaaacctcttaaccttccagtgtcttgggtgtggacaacacctctccagtggggggggtgcatctgaccctatcccaaaatgccttaggacgctcatctccttgactggtctggccatcccctcccaaaactaagtggaggctcggtctttccctccaagttggaggtatctcattctcccagtgtctaaaagtgatcaatatgcctagagtaaatgctgctgacaaggcaacagtagtaatccgtgccaccggggaagcaaaggctgtgggtttgacaggggaaaccgggatgtaagaggctgatagataagcctaagaggcca

SEQ ID NO: 681914 - DNA, 354 bp, Homo sapiens
  misc_feature (46)..(46): n is a, c, g, or t
  misc_feature (52)..(52): n is a, c, g, or t
  misc_feature (88)..(88): n is a, c, g, or t
  misc_feature (149)..(149): n is a, c, g, or t
  misc_feature (177)..(178): n is a, c, g, or t
cttaagggacaacccttccttagtcaaaagagagaagaggcaccancttaanagatcgccagttgcctggtgcagtggcttcacaccnctgtaatcccaacattttgggaacccaaggtgggtagatcacggagatcaaggagatcaangaccatagtgaccaacatagtgaaaccnnccatttctactgaaagtgcaaaaattagctgggtgtgttggcacatgcctgtagtcccagctacttgagaggctgaggcaggagaatcgtttgaacccgggaggcagaggttgcagtgtggtgagatcatgccactacactccagcctggcgacagagcgagacttggtttcaaaa

SEQ ID NO: 681915 - DNA, 860 bp, Homo sapiens
accaatggctcttctctcgtttacaggatgtgcgatgacgtcgagcgcctaggttccgtttcagacctggaagagaactttggagaacaatagtcttctccttccaagtatgtggacgtagtcctgtaaccacgaccccagacgttccgccgggatctacctgtgcttatgtcaccaactcagagctatcaggaacgcaccttccagacgcctgatgtaatatgcgaacagtcaatttccggtgaggtcttgtgatgaagctggatgagctgacccgtctggcagcagcctttccctcaagtcctttctgattctgtccttccaatgcatcacccggcctcgatactgctgctccgtgaacattctgaatagaacacagcctggctcctcggaggaggcaggaggccagcgaaggctacgaccaagccctggtagcagctgatccgggactgcaatacacaatgtccagagtatgcgacggacagaggagctaatctagctgagccagacagattgagtttgagtgcaaaatattcccgctcatttctcagtcgactgctggctgggtgaaaagtgcggagcgtgacatgccttggagttcatgtgcgttccccagggcatacgaaggaagctgagcacgcgtcagtccagctgcatctcttcaatgactgtctggctgctgtctcggcgcgagagggtagccgattcctggtatttgaccatgctcccttctcctccagtcggggggcaaacgtgtgcacatgaagctcacatggacctcacaaaaagctgttccgactctttctgcggagaacatcaggcgccaggccgagtcctctccggacggagattcactgaag

SEQ ID NO: 681916 - DNA, 964 bp, Homo sapiens
tttattcagtcgcgcgggacgtgagctgtaagtatgtaaggctggtgggacttcggcccgtcgatctacagagagagattggaatctgcaaatcgccgcctggcaagcgatgacacagtgaggcccaggccggcagtcagtgacatggtggccaagctgcttgctcagagctacgaacatgcagcaggagcaagagaagctggagctgagagatgtgcactgctgctgctggcgccatctgaggaccagctgtgcggctgtgccgagctgctggatgcaggctctggtgcaatgctgcagggccgggcagctcgatgccgaagatggagctgcgcaagaagcatggcctatgtggagaaatgtggagcggctgcagcaggcgctcgggcagctgcaggcagcctgtgagaagcgggagcagctggatgctgcgtctgcggactcgcctggagcaggaactcaaggccctgcgtgcacatgcagagacatgtgcaggtgccccaggtggtagcagtggcagtggtgggtctccagagctcagcgccctgcgactgtcagaacaactgcgagagaaggaggagcagatcctggcgctggaggccgacattgaacccaaaaggttgggggcaagcccagtgacacacggtatctgggaggaacgtgccatgaggcagtttgccatggatgcggctgccacggctgctgctcagcgtgaaaccactctcatccgagattcccccaggcctcacccagcagcagcttcaatgaggggtctgctcactggtggacacaggcatcaggagatggaaagcacggttaaccgggtggctccccatttgtggcacccccacgggacaattccccctttggggcggacagagaaaaacgcggggcacatttagccgatagagcctggaacattcccaaaagggggcaccctttaagtcaaggggtcccaggagac

SEQ ID NO: 681917 - DNA, 504 bp, Homo sapiens
  misc_feature (84)..(84): n is a, c, g, or t
  misc_feature (149)..(149): n is a, c, g, or t
tcaagacggaacaatgtagttttaaaaggtttggcttagcccaccccccggggaaacagcagtgattaccctttagcaataaangaaagtttaattaagctatacaaccccagggttggtcaattttgtgccagccaccgcggtcacangattaacccaagtcaatagaagccggggtaaagagtgttttagatcaccccctccccaataaagttaaaattcccctgagttgtaaaaaactccagttgacccaaaatagactacgaaagtggttttaacatatttgaacacccaatagttaagacccaaattgggattaaatacccccctatggtttagccctaaccctcaacagttaaatcaacaaaattgttggccagaacactacgagccccagtttaaaactcaaaggaccggggggggtttaatatccctttaaaggagcctgttttgtaatggataaaccccgatcaccctcccccctttttggtcagcctatataca

SEQ ID NO: 681918 - DNA, 838 bp, Homo sapiens
atcaaccagtggagtgcaagcatagtggaacaatccttaacacacttggttaaggttgggaaaagctgataaatattttcgtgacctgtgcagtggtccatgaagagcgcatatgggtttcagacaggcagttcctgtttggtgggataccacatctgatggtagacctgtaccgtcaagcatgggatgaaccggaccatgaactgtatgtgtcaactgtttgttgccgatagctatcgttctttaagctgactaataaattgttgggcgtagaagccatgaagcttaaggaatttgtcagtgtatcctgttccatagatagagagtaagtaggtagttgactaggtgtgctagagtgaaaagcgtgcaatatgctttaaaggtatcaacaaaaactgagtatttataagcgagcaatgatcatgagtaacttgggcagattcagctcatattctatacgaggatgcgtttgaaataggagcaaagttgaatgctagcatgaaatatacatttcagaaaatatggcatgacttgacgaattgcaatcgtatatttacaccagtttgttcactgaatatcttaggtacctaaggtgatggggacactccattcagatgatcaaagttctctttcaggtagagaagttcaacaggaagtaacttatcttgaccggaaggaagctggcatggcttacctgttggcacacaatgtggggcacttcagcactaacgcttgttgtaagtcatttagaactttcttgccctcagttgtcctgacatgtccggggaacgtctacattttttcaattgccttacaatagaagtataggagccaccag

SEQ ID NO: 681919 - DNA, 763 bp, Homo sapiens
  misc_feature (481)..(481): n is a, c, g, or t
ccacgcgttcgaagagacagtgccttttcagcagcagatactggtgagatgggggtggctcaggctgttcttcctcctcctagatatgtctggtagctgtattctacattcagcataactgggtcccctatcacaaggtctactggctaataggaattccctcctggtggccaccatcgtggccatgtacctttcctaagtcttcgctcaaagttaagcaggtctgtgagccagctggcttgagtgaagtgtctgaggcctgtgggggctgacgtctcgtgacaaatgtctaaggaagactcatgagtagcaccaagatatggttagtacctccttgaccccgtctgctcccgtactatggttcctggggcatgtgctgggcggcaacgagcactctgaggagaacagacgctgtgtgctaggagggaagaagacccagacatgtgtggtcgatagaattggcgtcgatgcaaatgcaacngatgcgagcgtcttgcgcacgactatgggggaaaccgctaggggccataatacgaacgacaggtatccgatccgagggggtcacagctgtcctcgtgcgaaccttccgtattgttcttgtctcaagttgcgtcgagggatctaatgttacgttggagcacgcgacgccgtcgtggctacaggggtcggtgattgtgtcctcttcccgagctggtccgccgtcacgctagaggggcgttacgttttccatgtgggggattgccatctacctttgggtttccag

SEQ ID NO: 681920 - DNA, 749 bp, Homo sapiens
ccgctttaagactcttttggcaagctatcaaatccctgggtcccccaaacccgtgtacctctgcttcttgccccccccactttgtcaaactaacccatataatggagaattaatacgctaagcttttccacctgaatataaccaggtctcgcaactttcaaatatctgggggcaaaataaaaggaagtactcccagattgaattggtaaaatgccacctacagtccataattacttgattattctcaacatctacagatctcagaatagcactgccaccgaccgttacaggaccataaagactactcctatctgcggtacaactagctttctatttagttctagatgttgaaactgacgatgcctgacattagaagtcacatgtgaccaaaacgtgtctcccaatgcttgactagggcaaaaacccctttccatagaggagcaatgtgccaccatttccacatatatcggcttatcccacggggcacggcacattgatatggaatttttggttttcgtgcaagttaaggaaaaaaaacaaaacaaaacaacattgttttcggggagaaagatgaggagacaaagattagatcttccacaagaatataaaagtataccatatagaattagtaataagaacaatagtagaacccacaatattagaaagggagacttgaaaaacatattaaagcaaatcatagagtagggattacaataataaaaataaaaaacaggacaaagacatgacgc

SEQ ID NO: 681921 - DNA, 182 bp, Homo sapiens
cccagttcaagttacgtgggaggctgaggtaggagaatttccttgaaccctgggaggcagaggttgcagttaagccaagatttgcgtcactgtacctccagcctgggtgacagaaacagaattagtgctcatatacccacacaaaattgctgagattacagatgtgagctatgaatgcccgg

SEQ ID NO: 681922 - DNA, 892 bp, Homo sapiens
gagcggtgtcgccggctgacaggactctcgcattctgtatgtccggcgctccgtcagtcacgttactctgacggatacgcgaagtaggaagaagagatcgccgagctggtcattgacaatggctccgtgcatgtgtgaagctggtttatgctggggacaggacacctctctgagaccgggtgtgtattccgttacgcatccgtcgcgagcgcctcaacagaagcaccgaggtggccgtcagtggctggtgcagtggcgccatgtaaggactcctagcgtgcgcgcacgaggcacagagtgaagcgttggtcgaagtcgctgacccgtggaaagtaacaccctattgaagctagtggcacttcgatcggtcgatagctgggaccgagcggatgcgtaggacatcatcgtggcgacatcaccgtttctacagagcagaatctgctggcgtgggccccggacgggagcacgcagtcgctggtggaaccgaggacccctccatggaacctctgagaggtccgacaagtagaaggaacgatgaacatcagaaatctagtgtgtgtgagccactcgttcataactaccccacggaagcaatgttaagcgttgggcccagtctgagtggggccgtggcttggttcacatctaaggcgcgtactggggctgcaacacaatccgtgggcaattttgggtctataggcacagatcttggtagaactggcgggatccaagcgcgacaacggcgctgtctcatacgtacataaagtgatctagaagcaccgcatccggctggatagcccaatcgcttggcggtctggacccttgggtgggccgtgcgaaccctgagacacggatttatcatcctttgacaagactccggtcatttgaagacgga

SEQ ID NO: 681923 - DNA, 400 bp, Homo sapiens
atccacctcctatgactgcacgaaacgggatcaaaacgaccccactaggaatcacctcccattccgataaaatcaacttccacccgttactaacacaatcaaagacgccactcggatatactaactctagccttcgtctcctataatgacatttaactctattctcacgcagacctccataggcgaccccagacaaattcataccctcagccaaaccacttataccacccctcccccacattaagcccgcacatgatatatacctatgacggctacacaattctccagatccgtcacctaacaaaactaggaggcgtccttgccctaattactcatcccatccgtcatccctagcaatcaatccccgatcctccgatatatccacaacaaccaaagcata

SEQ ID NO: 681924 - DNA, 964 bp, Homo sapiens
  misc_feature (9)..(9): n is a, c, g, or t
  misc_feature (37)..(37): n is a, c, g, or t
  misc_feature (234)..(234): n is a, c, g, or t
  misc_feature (537)..(537): n is a, c, g, or t
  misc_feature (635)..(635): n is a, c, g, or t
  misc_feature (637)..(637): n is a, c, g, or t
  misc_feature (681)..(681): n is a, c, g, or t
  misc_feature (694)..(694): n is a, c, g, or t
  misc_feature (701)..(701): n is a, c, g, or t
  misc_feature (740)..(740): n is a, c, g, or t
  misc_feature (772)..(772): n is a, c, g, or t
  misc_feature (798)..(798): n is a, c, g, or t
  misc_feature (837)..(837): n is a, c, g, or t
  misc_feature (847)..(847): n is a, c, g, or t
  misc_feature (849)..(849): n is a, c, g, or t
  misc_feature (861)..(861): n is a, c, g, or t
  misc_feature (956)..(956): n is a, c, g, or t
gtgggtgcngcgtgactggagaccgtgtggaggccangtgtgccccgtgcagggatcaggagcggcgcggggagcggcaccgagcagccctcttgcccggtcgggtcagccctagtggctgcctgcacactgtagacgtcccagggcctgtgctgtgatcacctgcctttggaccacatttgtgtttgctcttagagatcgagctcctcagtggtacctgaagcctttgcttcnggaaagcgcggtagggttcgtaggtagggctagtaggtagggttagtaggtagggctagtaggtagggctagtaggtagggttagtaggtagggttcgtaggtagggctggtaggtagggttagtaggtagggctagtaggtagggttagtaggtagggttcgtaggtagggttcgtaggtagggttcgtaggtagggctagtaggtagggttagtaggtagggttcgtaggtagggttcgtaggtagggttcgtaggtagggctagtaggtagggttagtaggtagggttcgtaggtagggntcgtaggtagggttaggtagggtcgtaggtagggttagtaggtagggctagtaggtagggttcgtagtagggttcgtagtagggctagtaggtagggntnagtaggtagggctagtaggtagggctagtaggtagggttagtangtagggctagtangtagggntcgtatgtagggttagtaggtagggctagtatgtagggnttcgtagtagggttcgtaggtagggctagtangtagggtagtagtaggctagtagtangctatagtaggtcctagtaggtcctagtaggtatagtangtcctagtangntatagtaggtcnagtaggctatagtagcatagagcatatagtatatagcatatagcatatagcatatagcatatagtctcatagtctatacgtctatagtatacctntccctccc

SEQ ID NO: 681925 - DNA, 359 bp, Homo sapiens
gtactacaaacctggcttgctgctgatgtgcttcatcctgcccacgctcgtgccctggtatttctggggtgaaacttttcaaaacagagtgtgcgctgccactttcttgcgatatgctgtggggcttaatgccacctggctggtgaacaatgctgtccacctcttctgatatatgtccttatgacaagaacattaacccccgggagaatattctgggttcacttggagctgtgggtgagggctttcacaactaccaccactccttttcctatgactactctgctactctggaaagagcacttttcagagtagcacttttcacagtagacttttcagagtgtcatatatttgaaattgta

SEQ ID NO: 681926 - DNA, 143 bp, Homo sapiens
taaaatctgtttttccaaaaaaatttcactgccttaatgtgtccgggaaagggtgcccccccaagttctatggacttgtcccaaagctaatatttttatggcctatggtcttgtttggcccttaataaaataattgtgttctt

SEQ ID NO: 681927 - DNA, 111 bp, Homo sapiens
ggagtcagagctggccaacatagcgagaccccccaactctttttctaaacacaaagagaaaaaaaatcccaacctgagctgacagagcttaattttttggattcctttcgc

SEQ ID NO: 681928 - DNA, 101 bp, Homo sapiens
ccgccggggtcatcggagtgtctcgcaaataagtggaaactaatcaacatacttcaaaaataaccagtacgggccgggcgacactccgatggctcaggatg

SEQ ID NO: 681929 - DNA, 145 bp, Homo sapiens
  misc_feature (69)..(69): n is a, c, g, or t
ttcttcataaacagtgcgatctcacggtagtgccatcattctggtcactgccgtggagatcccaactgnttatgaagacaggcggagctaagagggaatccagagagcagctgcaggagggaaagctgtcattggccttcagatg

SEQ ID NO: 681930 - DNA, 259 bp, Homo sapiens
tttttttttccaaaaaagcccccccccccccccccaatggcaaaaatggccccagggcccctttacttttttttttgtttaaaaacccccttcctttgccctttaggagaattcccttttggcccccaaaataaaccccaaataaacccctttgggggttggggtttcccttttgggttgtttttatttttttacctttggggccccggttttttttttaaaaaaaagttcctttttataaaggggctgaaaatggcca

SEQ ID NO: 681931 - DNA, 103 bp, Homo sapiens
atcgagtgattatacattcctagtcgccaagcatgcctctagtctatgagatctcccccgcactagtggttgaactaagatattcctaccagaagaacataca

SEQ ID NO: 681932 - DNA, 639 bp, Homo sapiens
  misc_feature (50)..(50): n is a, c, g, or t
acgaagcgcccaaacctccagaggagccaacccttaaacactcagtaganccgacgagctagctaatgcaggaataaggacgcatgctttgcgccaacgccctcgcataaggagaactctggatagaaacgatcgatcaagcgcctgctcacagtcgcacccgggatagctgatctggtcacacgcacggctcaaatactatgaggataacatcatcgcgggagtcatttgtccgtaaaatttggaattgtatagtagaggagcttcaactgaccttgcctcgagactgaaggctgttatccagtatatacatcaagtgcactagaagtaggacaagaagattgcatacagtcactgagttattcttatagttgattatgaatgccataggaactccaaaaggaacctgtttgtataatgacacccaggtacaaagtatgtgattccaggaagtgagccaggcgccgatgtgtgtctatgacccctcttgaacctcctatgatcacagtctttgaagtaggactgagaactggtcattctctaagtgacacaagtaaagtaatagctagaacagaagaaaaaggggtcccgaaaatgtaacctttaaatttgacgcttggaacgtactgatagtaagca

SEQ ID NO: 681933 - DNA, 104 bp, Homo sapiens
cttccccggaatctgcgcgatatcaatactggctatatctcttctcgcgtagtgccgttgtttacacatgattgcactttgtgggtcgcaagcgtgactacata

SEQ ID NO: 681934 - DNA, 484 bp, Homo sapiens
  misc_feature (250)..(250): n is a, c, g, or t
gagacgggggtctcagctctaacatactcttatccttaactggattaggacttcaccaactcaccagcggctccttctccggctacacggagcacatataccagaaacccacttatttaattatttagaacatctgagcaagtagtcagttaattttaaaaataagtgcaagcatagaatcatgaaaaagttttaaacacattaacggttttacctttttacaaataagtctacattcatgcaccagggntcttttccttatttatagcacgaatctgtggacccagagcggggtgtcatctttcttaaataaaccacatcaataatatacatgcggtgatttacagtttcagtttcttccaagggggaccaagaagcttagagctttggtgaaaccaatcggcagtgcagaagaaatcattctagaatttagtgaaattttcccaagtctttcttagtggggtccagtctactagcaagccaa

SEQ ID NO: 681935 - DNA, 1027 bp, Homo sapiens
ggtcgcggcgcctgtactgactctaggaagtggctggagttgtttttgactgggcgcccgtaagagagtgtgggcacagtactgtgttacatgacgtgacacgccgccctttagtgcggtcaacggtgtggtgcgatgcagactgttctgccccccgtgcagtctgtgcctgtgtgtcactacccaatgatgccttatggagtgctgtgaagcatggaacggtctgcaaactgttccctgagctgtggcctctgcgtgctcatggctgtggctgtttcgaacttgtggcgccggtgcacactgcccagtcccgagatgcgctgagggttcccttagcgtcgccctcaccccgtgcaacccagcggggcgccagagtcctggccctttaaactgccgcgctgtgcctcaggcgtcttcgtttcgcgcgccctgccctgcggcgcacggcggagcgaacatggacccaggctgcgcgggtggtgctgggcgctgtggcctggtgggatgcgccttgggctggacggctgggagtgccgccccaagccgctgctacccactgcagagcctgggctggcttcgctgggggcgtgcgggcggcccgagaccccagagggctgcacgctcgtaacggggaagcccgcaggatgctgggagctgccggcgctgggcctgggtggggagccctggggctgtaccacacggggacggtggcaaccatgcgcgcccaggagcatccatgcagaagcggctcaagacggcgcaagtcttccctggtccaggccggcctgcaggttgaaccctgttaaccgagtacaaggaacgtgtcccttctggaggaaggttccgagcccttcctcgaactttccatggcctgccctaccagggtggtggaggtgaaccctggtccgagggctgagatcaaggtcgtctcctagagaagcggtgcccatccttgttggccgtggacgagaaactcgcgaagataatgagtctgtggttaccaagggcgtagaactaccagggtcgg

SEQ ID NO: 681936 - DNA, 135 bp, Homo sapiens
actgtgggttcttaccactgtgcctgcttctggcttctcactgcaggacgatggccgcacttgccgcccagagggtcaccctccacagcctggaagccccacaggagcctgcactgaagtcagaattttcccagg

SEQ ID NO: 681937 - DNA, 142 bp, Homo sapiens
gggggcgcaatagatatagtcccgcaggggaaagatgaaaaattttaaccaagcttaatatagcagggactaacccctataccttttgcataatgaattaactagaaataactttgcagggagagccaaagttaaaaccccc

SEQ ID NO: 681938 - DNA, 146 bp, Homo sapiens
cgatggatgagacggcttcagttacttcctcttgacccacactgcctcgtgcacactgtggctgctgctgtcacatgctgccgatgcactgtcaccggctcagtccctgggccccctctaccctcaggcataccccggccacgttc

SEQ ID NO: 681939 - DNA, 838 bp, Homo sapiens
gccagcgccgcggctgccgcctctgctggggtctagtgctgtttctctcgcgccatcactggccgccggccgcagctccaggtgtcctagccgcccagcctcgacgccgtcccgggacccctgtgctctgcgcgaagccctgtgccccgggggccgtgggtgcatggtgccacgtgggctgcgtgggtgaagctggcttccctgctgggtgcctgtgactggtgcgggcttcgagctcatgacagacccgtcataggccgcctactccgtgtggtcctgcgccggctgagcgtcagggccgaggtctgaccggagaccatgcgctctcacggaggacctgcgcatgtcgcgcgaggaggtctgggagatggggcactggatccagtcatcctctctcgccctccagtgacctcttctctgtcgacctgagctcaataggtccaaggtggacaaagcagcttacaggtcatctcagtgcatccaagtgggtcctgtccttccttgtactagcgagatggcctgaaagttgccatcctcatgtacgatattctagcagctgatttgctggcttcatcgcctgtgcctctacattcactttggctggatgttagacttggaacacacccaagaaaggtggccacggacggtcacagagggtccgaaactgggctgtgtgacgctacttcgagactacattagccaatccagcttggtgaagacgccacaaactggctgaaccaacagggaactatatcttgagatacaagacccatgggtacaatggactgggtgcctctgcaagtttaaggaacagaggcacaccaatgagcagaagtcc

SEQ ID NO: 681940 - DNA, 200 bp, Homo sapiens
gataaaacatcggcataaagcgatccccaaaatgtccacgatgtgtgttatcagcagtcacgtatttgagagcagctatcaaaactatagtcatggggtgacagaaaaaagattctcatcctgaatgattacatgtggaatctccgcagagaaatgcacattcttataaagaaccagatagaaggataatgacatttaaa

SEQ ID NO: 681941 - DNA, 282 bp, Homo sapiens
taaggatccgtgtgcagtgtatcagttacttgggaggctgaggaagtgaagactgttgagcctagcggttggaggctatctaagcaaagagtgaaatgtgtcttaaaacattaaatccaatggacacagagagagacacaaaggagatgatgtcaacatcggatgggccatccgtctgcaaatgttgggagaagaacagctggggaatggtgcctggagcaagacgggacactacctcagcctcagaagcaaccagccctgcaatacctgggtctcacatgg

SEQ ID NO: 681942 - DNA, 171 bp, Homo sapiens
ggcacctggagctagatggacagcaagaatttcgatgactacatgaagtcactcggtgtgggtttactaccaggcaggtagccagcatgaccaagcctaccacaatcatcgaaaagaatggggcattctcaccctaatagcacacagcaccttcaagacacagagatcagc

SEQ ID NO: 681943 - DNA, 80 bp, Homo sapiens
ttgtccttaaacgttatgctgaatagttgttgaaacagttctcattttgtagtatttaataatcagggaaggaggctttg

SEQ ID NO: 681944 - DNA, 167 bp, Homo sapiens
gagatgcttttccatagtatttcacagtcacatcatgttcagccatatctgctagataagcagcactctcttgtgatggctgcgccatacaaacaacatcaagatctgtaaaagcccctgcttcaattaaatcaattttgccaccaccatcttcttctgcagccgtt

SEQ ID NO: 681945 - DNA, 679 bp, Homo sapiens
acttcctttgtcgggtagaaaatgaagggttcttggagcgtaggggcgctgcttgtctaagtcagtgttctggtagctgagtacacggttgatgctcttcacacacagcgggggtccacttttatagaggtctggaggagtgatctcgcggtgcggagaaattggtaggtttattcctggaagatcatgtgggtacacacaactagtgtcttaggaagaacgaggcttgtctttcctcccccgccaccacgccaggccccccggatgtgtcaaggtgtggagatcgcttgaaagagtagctcccccacgtttgttgaatatccacgccccttcgaatctaggtaagtgtgtctcttcacgcaacaaacaactctctgctggagtcttttcgtggacgcgcctaaagagatgacgccctctccctcctcgagatggccgtctctatagatgacagatagatatctagtgttaaaacatatcttcctataggcgcgctagaaaaagacatgttgtggatgaaatacactatttcgccccactttcatcgctgtattgtgcgtgcgcccgctgcctcctaaggcttaggtcatcttgccactctgggcgcgcccttctgtgggtaccacccctccgaattagaaaatcaaccatgggagggccgatcaatagacgagaaaat

SEQ ID NO: 681946 - DNA, 146 bp, Homo sapiens
cgctatgttgaagagatatacccatttgaaggcctcgcgactggttaaaaagctcgaaggcaacaaacaccgcggccagcaggtggtcatcaatcacctggtcccgtaccccgccataactcagcagacgcccacaggcgttgttg

SEQ ID NO: 681947 - DNA, 260 bp, Homo sapiens
gagcaggtgagaggaccagttaagaccagttaggaggctgctgctgtaacccagctgggatagctgtgtcctagggcaagataacaacaatgaggatagagagagtggacacgttggataaagtttagaatcacggaacttgctgactggagaagagggcaaaagcagagttagcacaacacatgagttatgaccagcttgagcagctcagcagggggtggtggccatttacagaacagacatggcacgcgacatcgcca

SEQ ID NO: 681948 - DNA, 121 bp, Homo sapiens
accccccattttttttttccttggtttgtttttgggaggggggggaattcccccttaccctttcccccccaaaggcttttggttttttttttttcaaaaaaaagctttccatggggggcca

SEQ ID NO: 681949 - DNA, 1168 bp, Homo sapiens
  misc_feature (342)..(342): n is a, c, g, or t
tgtcggggacggtaagccgggaccacggtgtcgtgctcctgtcgccttcgccatcctaagtcccatagcctacttactgcgtgagtgcagtcttctcgatcgctagcgtgggccaggctggtgtccaagtatgagcaaatgcctgcatgagcgagctcttactgcgcgtggaacacgggcatccagtccgcgattggccagactgccaagtgtacaggtactcatagggtggaggaggatgacctcctttcaaacatcgcattcttctaggtgatgacagggcgcttgggcaagtcgactgttgctcgccaggagtcgtgctgtgtggctagactttgggcnatcgcacaatcagtctattgtgatggaatggttctgctacatggcggacgcataaccgatcgaggtttcttctcgagcccatgaagacatgcgtcaagtcaccagggctatagggcagacgtatgcgttgcgcaatagtacacctaatgtcaccccgaagtggggcatcatcactagcccattcttgtgccagatggcatggatcaattggaaccttatgttagtttggaccccggacatatctgccaaaagtctcgggctagaacccatgcttgtcatcccgtgctacttaccacggagctttcttctggggtctatatccaccgagccttgagcggttggcggggcaaccttggattcatggcgcggttcaaggcttccccctagccatctatggagaaagcaggtactcctagcaggttcgaattaatcgcgccgactgaacggtgcccaacggcctgggggacggttcctgcccaatttttacaccccaggggcaatcggcccaagggttttatcccaaatggcttggtacggttggaagggccttaacgaaagttccccaataccgttcaaagccaatggccaagaatgcaaagcccctgggaatgtcacgctccttgagttgggttgcgccctttcacagtggggctcccagaccacgtgggatggggcccacgatccttattctgcacctttgttgggctcgggtcgaccaagagcccgtcggagtatatccggaggccggccccaaagctttagagttagtcgcttttagaccgggcgtaatataagacgcagcattgatgggcccccccataacgtg

SEQ ID NO: 681950 - DNA, 728 bp, Homo sapiens
gagagtctcgatctgtctcccaggcttgagtgcagtggagagatctcggctcactgaaagctctgtctcctgggttcatgccgttgactccgtgccttcatggcttcccgagctaagtctccacggatgtaagctagggacatacaggagtgtccagtcactcagcaaaccctatgtgtaaacatttttctgaggtattttcaagtagtacgaatgtgcgcgcttaaacactgcttttcatgacagcgataggttctagatactaacactgagcctgctgtgactcccgacgacgacttgtgactcgcgcaaaacttgcgtgggacttataaaagccagtagaagtaactagacgactctcgcggggcaagacattctgtcagtggattttgatacgataaaagacctggggtttccaccgattttttggccaaggaattggtcatgcctaatctcgcaatccttgttcgcatgctggtgccactgctcagctctgcgcaaaggtgcttgaaccgaattgctagggtgattgtacgtccacacaattcgcgtagtggcttttaaatggtgttattcgtaataacttattatcaaatgagtgctgatcttgttgattgaaacatttggtcttggggcgtcctaatttaactatacattttaaagaattgagaaaactaggtggtcgttaaaggggagttcacgtattgaatcccacgatttgaaaccca

SEQ ID NO: 681951 - DNA, 106 bp, Homo sapiens
ttagtcatactgcatgtgctgggaaggtgcagaaagaacctggacccatgttctctgtgggtggtgcacaaagctcagcatggtcccgagccccaagagtaccctg

SEQ ID NO: 681952 - DNA, 189 bp, Homo sapiens
gcattttcagaatcgcagatgatgctcacccaagagtagcacttgttaacggaggccatcaccaacatacatgtacaaaacgttttaatgtggacgatcaagactcagaggaaatttgacacgaccatctgtgtaaggtgttgccgcttaatggtagctgcagcaaagtccacttccatctgccttacc

SEQ ID NO: 681953 - DNA, 408 bp, Homo sapiens
  misc_feature (4)..(4): n is a, c, g, or t
  misc_feature (66)..(66): n is a, c, g, or t
  misc_feature (112)..(112): n is a, c, g, or t
  misc_feature (139)..(139): n is a, c, g, or t
  misc_feature (403)..(403): n is a, c, g, or t
attnaaaaacaaaacccgtgtgtgaaagaaccaaggagcctgaaaacctgcacctgccccatgaancccaagttccctcaacatcctactctgtgaccctatggcaggaggncccccggaaaaggacatgtgcctcccncccaaggcagagggctcccccccttttcagtttgtgcttttgtatgggtattagccggggttctctagagggacagaactaataggatatataatgggatatatatatatgattgtggaagtcaatacttaataacacaatcacaatcttgtgatcgtgaatgttaatacttaataaactcccgtgtgtgtgtgtgtgtgtgtgtgtgtgtgtgtgtgtgtgtgtatataaatgcttgtaaacagtaatctgccaaaactgatntaagt

SEQ ID NO: 681954 - DNA, 187 bp, Homo sapiens
ccatcactaaccattacggaaagacaaaccaaaactgcaatgaggcgcaacactttggtggatcactgaggtcaagagttggagaccagcctggccgacatgtgtgaaaccccgtctctactaaaaatacaaaaattagctgggcgtgatggtacgtgcgtatagtcccagctacttggtaggcccg

SEQ ID NO: 681955 - DNA, 699 bp, Homo sapiens
agtttgaggcttaagaagctggatctcctgccgggcgtggtggctcatgcctgtaatcccaccactttttttttaaggcaggcggatcacctgaggtcaggagtttaagaccagcctgaccaacattggagaaaccgtcgtctctactaaaaaaaaaaaaaaaaaaaaaaaaaaaaaactgggtggggcgcggccccgcggcccccgcgaagaagacctttcaagacacaacgccgggttggggcgcgcgcggggcgccccaaagaggagaacagggaacacaatggggcgcaaaagcgcgggtctccctataagagaaaccctcggggaccagagagacaaagggcgcgaggaggatcttccacccacaataaaaaaaagacgccgcgggcggggggcaaacacacgagaggcgtaattgcgagagaaaacaatccccccgagagaggggaccactctcgagggagagactataatagagggggagagaatatatctaacacaaagagggaagctctcccacgagaggagaggccacgagaatcaaataagaaaattctagccccccgggagagacggggggggaaaaacacagtgacaagcagaagcagaggaaaacacacgaacaagaaacgaaacgacgagggaataaacaccacaggaagcaaaagcagcgaagagagacgacgaaaagaacac

SEQ ID NO: 681956 - DNA, 518 bp, Homo sapiens
tgaggggagtcccggaaccaatcccctacgaagaaaggaacaactgtatatatttccattttttcagattctgcttttatatctttaaagttttacaattttcttcatacagatcttatgtctttcttacaatatttaagtattgtataatttttctctttttcccaaatatattccaggaaatattttataatttttaacacttttataaataaaatatttttctcctcaccaatgcagttaattcccattcttcccctgccaatatcccagtgacatcaaataatgcttttacttaccacctatccaccacattaccctgtccaacatctgagttctgctgaaatcactgggaatgtttctttcagacgactaggttttctcttgcaatatgtttcttctggattcttacttagcatttatatcacacattccttgatattctcaatatatactatgtatatacaagcaggacctgaagtaaccttattttactcaatgttatgttataaagaggc

SEQ ID NO: 681957 - DNA, 169 bp, Homo sapiens
  misc_feature (25)..(25): n is a, c, g, or t
  misc_feature (75)..(75): n is a, c, g, or t
  misc_feature (108)..(108): n is a, c, g, or t
  misc_feature (147)..(147): n is a, c, g, or t
aatgcacttccctaagcctctgttnccgccaaaaaacatttcatttaataaacatttcttaagtgtctgctaggngccagcactgttccagggcctgaagataaacgnaggtgaaaacacaggaaaaagccctgccctcttgtagtnacagcaaaaaccgagattaaaa

SEQ ID NO: 681958 - DNA, 135 bp, Homo sapiens
tagacctcagatgaggaatggttagtaagttggtctaatctctctgagctgcttgtaaggaagttatgaggtagaagattctgctgacttttagtaaggtggacaagtgcgagaaaagagaaaagcagttcctca

SEQ ID NO: 681959 - DNA, 244 bp, Homo sapiens
gcggcggatggccgtgtccttggcatggttgaccgcgcgctcacggatctgggtctccacctccgtgcggatcttgaagacgacctcgcccgggtccttgcccttctgctgcgagagctcctgcgtgaacttcttcgcgaagcgctcgtcgatcttggagacgtccgccgggtccttgaagatgacgcggatgatcgaggtctctgcgccgtaggcgatgcgcaccttctcgtcgagcttggcg

SEQ ID NO: 681960 - DNA, 578 bp, Homo sapiens
  misc_feature (103)..(103): n is a, c, g, or t
  misc_feature (106)..(106): n is a, c, g, or t
agaggatcccggtattgagtggcatgtgaaatagtctccatttttggctttgagggggtcagttgggtgctgtctgttccgggttgggggaaagtggtgggtnganggagcaggttgggatggagggagtttacaggaagcagacaggccaacgtcgaagccgaattcctggtctggggcaccaacgtccaagggggccacatcgatgatgggcaggcgggaggtcttggtggttttgtattcaatcactgtcttgccccaggctccggtgtgactcgtgcagccatcgacagtgacgctgtaggtgaagcggctgttgccctcggcgcggatctcgatctcgttgagccctggaggagcaggccttcttgaggtgccagtctgctggtcatgtagccacgctgttcttgcagtggtaggtgatgtcctgggaggcctccagtggacatcaggcgcagaaaggtcagctggataggccacatcggcaggatcggagccctaggcggcatactcgaactggaatccaatcggtcatgctctcgcggaaccagacatgcctcttgtggttaggcccgaag

SEQ ID NO: 681961 - DNA, 1604 bp, Homo sapiens
ggtgccctggccaccgggtactcgcgctaagttagctagtagcagagcgctagcctcggctgaggcatgctccggcagattgagtctttacgctgggctcccgacggacgcagaggccatcggagtcgacgaccggagggaattgagggagctgtctagtcagcgggacgcggcatgtcgtctgctgcgaacgcgagtagctgctgcaggccaatgtgcagtacgcagggtatagaacgcaggtacggcaggacatgtgcattgagtactagcgggaaacgcgcggtgcatcgagccccatggcgcctctggcgtcccgagacatcgtggagggtcgtcaggtggagaccgggtggcgagtcgcgcacaccaaagcattactgcaacgcagacatcaactagggctttaagtgacacttgcttgtctggtgatctggactcgggtacgtccacccgggaagttatggagccattgctctgggttcgcggtagcggagtagcgtagggggacgcagccggggaatcgcggcaggtaagacggtacctggcaacgtgttggggcgcccaaggaagagtggcgacaattcacaaacaggccgcaacttcggaacgaggacccgagggacagggggagcacgccaaacttcataggaccgtctgatacggtgccgatcgtttgcgcagacgatgacacaagcatgaccaagcagaagattgactccgtggtttgggcgcaaacagcaattatcgcaaaacattttcacaccagtaggttggattccgagttgacacacaagtggcacacggacagcgctaacatagcattagctggcacgcacgtaggcggatccggtcctaggttccgcccgctttacgcggaagactaaagatagcaaaccgtggggaaaccagtatccacaacaggtatagaagcgagaattcaatattacgtggagagaaccccacaaacgcgcatttggacctctcaacagaattcggcagacagcacctagacgcgcaagagagggacagacattcgaacgccacattgggcgctcgaacaatagccacacagagtccttggacgccaggcggcaagtattaccgcccgaaaactggacaataaatgtcaagccatccctaagagctgcattaaccgcatgtgtagggtgctagacgctgtagagtccgtttggaccatataacatgcaaagacacagtaaacataaatagcttgaaatatacaatcggtatccgtaccacgaagacatgaagcaaaaagaacgagagagaacagaagaagcagacccgcaaaggacgacaatcaaaaataagaacagaacaaaagagcggaaaacaacagaagagcagcaagcaaacaacaaagacacacgagcgacgacacatgaggcaccgcagaatagagagatagtcaaccaacagcacaccacaaaagcaaaagagtgaagagagaactaaacacaaacggcagaaaaaaacaacagcacgtacgcggggcacgacacacgcacaagagaagacagaacgaacgaaataaaacaagtaaagaacacaagcgacacggactagccgcgagcaataaa

SEQ ID NO: 681962 - DNA, 267 bp, Homo sapiens
attagggttagaccagttgaccaggggggttagggttagaccagttgaccaggggggttagggttagaccagttgaccgagggggttagggttagaccagttgaccaggggggttagggttagaccagttgaccgaggggattagggttagaccggttgaccaggggggttagggttagaccagttgaccaggggggttagggttagaccagttgaccgaggggattagggttagaccagttgaccgagggggttaggggtcgacgc

SEQ ID NO: 681963 - DNA, 211 bp, Homo sapiens
tacccccccccaggggggggtttttttttttcccgggggggggggttttccctttttgggggccatgcccccctcccccaaggttttggggatgtttttggcccccccgggtgaaaagggctttttggggggcctttttttcgggccccccccaaggcccggggtttttgtttttttaaagccttgtggattacccccttttttgggccca

SEQ ID NO: 681964 - DNA, 289 bp, Homo sapiens
  misc_feature (87)..(87): n is a, c, g, or t
ttttttttacccccccgttccccggggggccccccccccctttttttttccccccaaaaaaacccggggggggcccccccccccggntttttttttggggcggggggggggaaaattttttcccccgggaaccccttttcccctttgcccctttttggggcccccttaaacccggtttttcccaaaaaccgggggggggccggcccgggtttcccggggttttttcccccccccgggcggggggctttttttttttttgggggcccttccccattacccccttttttta

SEQ ID NO: 681965 - DNA, 764 bp, Homo sapiens
tgttcagcctaagtttgtgttggagacctgggatctcgaggtcactggctgtcttccccaagatagtcttctcctgagagaatgaatttttccgggaggggaaaaaaaaagatcttggggggtttgggagaagcatctgacctccgtcgagtgcgagctgagctcatcactctgatgtgttggtattgaccctggttgtctcacagaaaccactccttgtccgatcccgattgcgggagttatcactgactccaatctaggctgggtttctccgtcctctcggggttggctctcctgtgggtgtaccactcgtcgggctgcgcgagcgcagttcttggcaggctgctgtttacaacagggagcgtaggatgtgcctcctctcacacggcgatgctgtttttcttgttccctcccggcagctcgtctcttcctggggtctgtgttttttctctgtcctcctactagtgagagttcttgttctccatgctcctcctactgatgttaattcacaactgaatctcatcgtttggtctctctcgcgatgttcgttcccgcgtatcctcatccgtgtctgtcgatcccgtctgtgccggcgtctctattgtgtgagttgacgatccgacgaactcctcctgtccagatcacacttgtcgtaccggcgaggactatcatttgtgttgttgcatctgcagtgcgcgcgggaggtcacaattgagtagcgcgtaccctactatgtactcttcgtctactcgagacgctcccct

SEQ ID NO: 681966 - DNA, 413 bp, Homo sapiens
  misc_feature (1)..(1): n is a, c, g, or t
ncttgctagctgcataaactcagagaattattgttggaaatctcttggcttcagatatctcatctctaccctagtcatgggattgtaaagatcaacagaatagacacatgtgtatacagcatgcctagaacactgcataatgtaaaccatttgtaagtcttagtgctacttgagaaagaaaacttaggcaggggttcaaagcaaggagaatgaaaaatcaatatatttatgggaacaaatgacccagccacagagtgaaccaattccagcctttctgaaagctttccaatcctgatctgcctcctctgactgatttgtgtcctttgtgtttgttctctgtgcatttagcctctcccgtggcatatcccatgtgagttattcattttgtgtgagacatttgcatgtaagtcagt

SEQ ID NO: 681967 - DNA, 411 bp, Homo sapiens
agtcatgactagaccctgggcccctgcacccccaacaccaggcagccaacacaacctatgggcctagccctatgccaggtacaatggagaatatgaataagaaaatataccccctgttctcaagaggtttgcaaattacttggggagacaagagttgtcttttgagggcagtgccaattcaggtttcagctaagagacatcagtgggagctagaatatggggaaggcttcctggagaggatggatggtactggagctgggcctgaataggtggaaaaaaactagagaacccaacaaaaaaaataagagctggaaagaaaaaaagaaaccatttgttccaactcctcatttcacatcagtatgataaagtcttaattaactataaaatactacataaatgtaaaaaaaaaaa

SEQ ID NO: 681968 - DNA, 135 bp, Homo sapiens
aggaggtagcgcactcacaaacagcaagatgtgctacggacccgcgtaaagacacggggatgtggagacacacttcaccttcaaggacctacacttcaagatgttagatagagggtggtcagcggtctagagcgg

SEQ ID NO: 681969 - DNA, 161 bp, Homo sapiens
ccaggattcatttcgctcccaatccgtgcgcaagtcttaatcttggcttcaaggcacagcatcagacaggaaggccaggcaatgcttaggcaactaaaatgaggtggggggtaatgctaacgtcaccctcacagggtatggccacggtggactgttattcg

SEQ ID NO: 681970 - DNA, 971 bp, Homo sapiens
gtcagccggcttcgagataagtcccggcgcttgcgcggcggcggctatggcggcggaggaggaggaggtggactctgccgacaccggagagaggtcaggatggctaactggttggctccccacatggtgccctacgtctatatcacaccttaaagaagctgaagagaagatgttaacatgtgtgccttgcacatacaaaaaagaacctgttcgtatatctaatggaaactaaaatatggacactgaagttctctcataactatttcaacataagactccacttgtccttctccatggttttcggacggaggtcttgggctctgggcactgaactttcggagatctttgcaccaacagacctgtctatgcttttgacctattgggctcttcggcaccgacgctagtagacccaggcttcgcacacgcctgactgccacgcacacgaacgctggcagcaactcacgcttctgctggacatccacttgacacggacgctgcgcacgactgctgaccctagcgcacttggcacaacacactgactcttgcttgcggcacaacctaggtggatctccttggctgctgcttactcgctgaagctacccatcacaggcgttaactcatctcactttctacgtgcgagccttgcgggcttctccctgaacgaccagaccttgctgatcaagacagaccaattccagtcaggatcagagccttgggagcagcattgactccctttaaccctttagctggcctaaggattgcaggacctttggttcaagtctagtgcagcgtctcacggcctgatttcaaacgaaacgtattcttcaatcgtccgaaacgactcctgctacacaatacatctaccactgtcatgtccagactcccagtgccaacacagctttcaacaatcatactatccccttatccatgccccacaccgccctgccccaccaccctcgcctaaattgcac

SEQ ID NO: 681971 - DNA, 1199 bp, Homo sapiens
  misc_feature (1199)..(1199): n is a, c, g, or t
gtgaggccgaggctgggtggcctccaggccaagggcttgggccccatcctgagtctccaggacccaagggcaagagacgccaggcttgggcagcaggagggaggatctagacctgggcctgggtctgtccctgcccgaaatccatgccgagttcccttcccggcagccaggtcccccaccccactctggacgcggttgacctagtggaaaagactctgaggaatgaagggacctccagttctgctccagtcttggaggaaggggacacagacccctggaccctccctcagctgaaggacacaagccagccctggaaagagctccgcgtggccggcaggctgcgccgcgtggccggcagcgtcctcaaggcctgcgggctcctcggcagcctgtacttcttcatctgctctctggacgtcctcagctccgccttccagctgctgggcagcaaagtggccggagacatcttcaaggacaacgtggtgctgtccaaccctgtggctggactggtcattggcgtgctggtcacagccctggtgcagagttccagcacgtcctcctccatcgtggtcagcatggtggctgctaagctgctgactgtccgggtgtctgtgcccatcatcatgggtgtcaacgtaggcacatccatcaccagcaccctggtctcaatggcgcagtcaggggaccgggatgaatttcagagggctttcagcggctcggcggtgcacgggatcttcaactggctcacagtgctggtcctgctgccactggagagcgccacggccctgctggagaggctaagtgagctagccctgggtgccgccagcctgacacccagggcgcaggcgcccgacatcctcaaggtgctgacgaagccgctcacacacctcatcgtgcagttggactccgacatgatcatgagcagtgccacaggcaacgccactaacagcagtctcattaagcactggtgcggcaccacggggcagccgacccaggagaacagcagctgtggcgccttcggcccgtgcacagagaagaacagcacagccccggcggacaggctgccctgccgccacctgtttgcgggcacggagctcacggacctggccgtgggctgcatcctgctggccggctccctgctggtgctctgcggctgcctggtcctcatagtcaagctgctcaactctggcgcgcggccn

SEQ ID NO: 681972 - DNA, 200 bp, Homo sapiens
tcccgttcacttgctacagcaaagagaattgtaactcctcctgagacaaacattcctgctacaaacataaattttgctccaatatgtacaagatagtttccacaataccaaggcatgccatgcaactctgaacaaagcagaaacatccaaatgatcataccagataatgtgtagaaagttgaacagggtaccgatgctcg

SEQ ID NO: 681973 - DNA, 270 bp, Homo sapiens
  misc_feature (30)..(30): n is a, c, g, or t
  misc_feature (270)..(270): n is a, c, g, or t
acaccccccacactccccctcaccggcccntacatggagaggaacagcacagccccggcggacaggctgccctgtgaggcccggcccaccccggcccaccccccaggctccccctcacctgcccctgccctgcccccaggccgccacctgtttgcgggcacggagctcacggacctggccgtgggctgcatcctgctggccggctccctgctggtgctctgcggctgcctggtcctcatagtcaagctgctcaactctggcgcgcggccn

SEQ ID NO: 681974 - DNA, 1277 bp, Homo sapiens
  misc_feature (1277)..(1277): n is a, c, g, or t
atggagacaaggcctaggggccttggggccaggagggtacccccgtgagggcctgggctcctgggtaaacattaatgggctcagtacccagcaggtcatgtgcgcgatcaggggatctttgacctgcaactgctcccgccccatgtctcctccctgcaggtgccccctcaccacccacacagatctagacctgggcctgggtctgtccctgcccgaaatccatgccgagttcccttcccggcagccaggtcccccaccccactctggacgcggttgacctagtggaaaagactctgaggaatgaagggacctccagttctgctccagtcttggaggaaggggacacagacccctggaccctccctcagctgaaggacacaagccagccctggaaagagctccgcgtggccggcaggctgcgccgcgtggccggcagcgtcctcaaggcctgcgggctcctcggcagcctgtacttcttcatctgctctctggacgtcctcagctccgccttccagctgctgggcagcaaagtggccggagacatcttcaaggacaacgtggtgctgtccaaccctgtggctggactggtcattggcgtgctggtcacagccctggtgcagagttccagcacgtcctcctccatcgtggtcagcatggtggctgctaagctgctgactgtccgggtgtctgtgcccatcatcatgggtgtcaacgtaggcacatccatcaccagcaccctggtctcaatggcgcagtcaggggaccgggatgaatttcagagggctttcagcggctcggcggtgcacgggatcttcaactggctcacagtgctggtcctgctgccactggagagcgccacggccctgctggagaggctaagtgagctagccctgggtgccgccagcctgacacccagggcgcaggcgcccgacatcctcaaggtgctgacgaagccgctcacacacctcatcgtgcagttggactccgacatgatcatgagcagtgccacaggcaacgccactaacagcagtctcattaagcactggtgcggcaccacggggcagccgacccaggagaacagcagctgtggcgccttcggcccgtgcacagagaagaacagcacagccccggcggacaggctgccctgccgccacctgtttgcgggcacggagctcacggacctggccgtgggctgcatcctgctggccggctccctgctggtgctctgcggctgcctggtcctcatagtcaagctgctcaactctggcgcgcggccn

SEQ ID NO: 681975 - DNA, 285 bp, Homo sapiens
tttttttggcaaaactaccttttgttaactcttttagggagtttcccacttttaactttttacccccccttttgttttttggggacttaaggtttggggctcccttgcccgggccgcccttccggggctccttttttaagggcttttcaaacttgtttcaaagccccgggctcaagttattttcccccggaattcccagggttggggttccccccctttttgtgaaggttccttgattggtcccacccccttttccttttggaaaattaaactttttttaatcca

SEQ ID NO: 681976 - DNA, 671 bp, Homo sapiens
gcaaccagcagcctctggtgttctgccttgatcgcctcaatggtgcttggagaggcaagcagctctatccctcaggcctgcacaaggagagagtcacttcctctttatgcgatctgtctcttacggtgaacccctcgtggaggttgatgcctgcctgctaggacagcatctgtgtgccttgacctgcctggcttccccgcaaaattctctcccctcatttacggccaccacgtgtcgtggtcaacaccgtggctcttatctccctctttcctgccttttaacgtgattgcgaggctctgctgcctgctgagtaaagacccagcttatggacctgacagacatactcggactggacagcattggaggaaaggctatcacttcttgaaagggaaaggaacaaggctcgaaggggacagcgagatccctgccctattgaccaaaaggaatccttgaggacacaagagccgggcctctggccggaatggaattcaccctgaggctctaggaggaaaacttcgataaagaatgctctgtcacttacgggcctgcgcctgatcctgttacctgctcttgataagcacgcaaagtagaaaggacggacgattgaacttgaactgtgtccaaactaggcaattcaccctgacaatcccgaattagaggtgagcatgctg

SEQ ID NO: 681977 - DNA, 82 bp, Homo sapiens
actgaagacagtgccacttacttttgtgctcttggggaagtccggccttctcctactggggccacgggccgataaactcact

SEQ ID NO: 681978 - DNA, 106 bp, Homo sapiens
acatgccaaagaaagcgtgcatattagcctatagaaccacagtaatcacactagagaaattccactgctacaataaaatgtaatcggaagcatctttacttataaa

SEQ ID NO: 681979 - DNA, 103 bp, Homo sapiens
tcctgcctaaggagtgccaaacagaaaggagagagtatcgcatttcggacttgcagaaaagaggtccagaaaacaattttcgggtctgggcagaaatggggat

SEQ ID NO: 681980 - DNA, 400 bp, Homo sapiens
  misc_feature (1)..(1): n is a, c, g, or t
  misc_feature (13)..(13): n is a, c, g, or t
  misc_feature (16)..(16): n is a, c, g, or t
  misc_feature (39)..(40): n is a, c, g, or t
ngaaaattaaaantanatttaaataaataaactttagannttgcatcccctattctacccctagtccaactccgccaatctactgttggtagtgaatcacaatggcaacttaccaaggtttctgatacagatactctggaaagaaatgttaaaacctcaagatgctactgcagcggtccctccaacgcgtctgctgccacattcacattatgagcaaggcatgaccgcatttgcacgcaaagggcatttcgcccacccacccgcctaccctctctccatccttctgccaaccccctcttccccaacctaaacctcacttcataatatctaggatccgccccccccactcccccacccagccatccaatacaagtctgcaagctgcaacataatcacataa

SEQ ID NO: 681981 - DNA, 127 bp, Homo sapiens
ctgtactatacacaatcttgaaggagatgtattcagcttgtatcaattcagcggctttgattccagcaagccacaacagttaaaacacacggctatccaggaaatttttcgggtggtatcaggggta

SEQ ID NO: 681982 - DNA, 425 bp, Homo sapiens
cacgaggccatgccaccgcgtgacaggccgatctgcggcggcgggcgctggtaggtcacttcgtccggccgcagtgcatcccagcggtcgatgggcgcttcggacgcggtggagggcaccggcttgtcgtgcggcgtgaccaccacggcgtcggcgcccggtgacgtgcagcctgccaaccagacgcatccaagcagcaacacagcgctagggttcatagggcctcagctgggcatcgcgcatggtgtaagcagaaccggccagatcatcatccagccgttcggcacgcagggtgccggccaggaagaatggcgagtacatgtccggcatctcgatcggctgcggcagcaccacgtgcacgatctggttcggcggcggcggtggcacgtggatgcaggcgccgtaatacgggacgaacaggaatt

SEQ ID NO: 681983 - DNA, 137 bp, Homo sapiens
ggcacgagacctggatcaaatagtgagaccccatctttacaaaacatttgacaaaattagctgggtgtggcagacacatgcctctagttcggtttacttaggaggctaggttgaggtttgtttgagtctggtagata

SEQ ID NO: 681984 - DNA, 387 bp, Homo sapiens
taccgaccggcctgctcggtggtgtcacccgccgcaggtactgaaaactgccgccgcgcccgccgcgcacggattgccagcgtatcgggcagcggggaatcggcgctcgactccatccagcgacaccgtgcccagctgtttcctccagttcgaccgtctcggcccaggtcttgggaatcagcagcgtgggcgtttcgggcaggtcggcattgacaaaggtgccggacccgcgcgaacgccggatcagggccgtccctgttcccagtctgccgaagtcctggcgtatggttgcgcgcaatatgccataaggttccatcagggctcccagcgggggaattttgctggcccggcccgccagggtgcgggcccctggaatttggctgcgaa

SEQ ID NO: 681985 - DNA, 177 bp, Homo sapiens
aaattgttgagcatgaatgtatgggtacaggagatcggtcgtacagagttggggctgtggcagaagaaactccatagctgggtggccactgtctcattgtccactacatgctgtcttgagcacagactgtcaaacgtggtcccgaggacagggtcctgcttgcccagctatgcatac

SEQ ID NO: 681986 - DNA, 311 bp, Homo sapiens
cggtttgccctgcaaaaacaccaatggggtttagtgcaggtggacactttgaacccctcctcaaaaaaaaaactttggctgattccttgtggtgacactcaaaggggtttgaacaaacttgacaattctgttctggtcaagctggagtttttttttgtgacttggactgctctacaaaaaacatcagccaactgcccgagtcaaagtccagggattgtccctattattaataatgtaaatggcttcaaatggggccctgcagataaaatcccaaaaacccctgttatattaaagattccccctttcctgga

SEQ ID NO: 681987 - DNA, 192 bp, Homo sapiens
ggcaccgattctcgccaagagtctgaggtgacatgcgaagccaatatgaggtcatggccgagcagaaccggaagtatgctgaatgcctgtgttcaccagcgcggactgaagaaattgaacgcgggaggtcgctggcacacacggcagcagctccacattaaggcggagtacgcgagctcgtaattcgtagat

SEQ ID NO: 681988 - DNA, 894 bp, Homo sapiens
caggccggagggaatgatggcggcgccctggtggcgatgccgcgctgtgcgagttgtcggagatggcggggtcttcagcatcctcggccgtcctgggccgccggactagcccccgctggggccgatgcccaacagtgacatcgacttgatcaacctggagcggcttggagaagtaccgtgagcttctgaccagcgtaccggctgccgagcagagcgaggaggctgcaggccccgcactggtggcggacctaccgagagtatatcggggagaatgacagatcccaaagagaagattgatattgtggctgactccatgccaaagtctctccggacccaacagctatctggtaacggaatacaggtccatccaggagtcttcgaggccaatgtggtacagagagagcgtggctgctcctgctctccgactacatgtcagatgtccctgctgggatgcctgtgcgtggccgacgtgtggaaaggaccttgtgggcccataccacaagtcagcgtctggctgagtattacggcctctaccgagacctgttccacggtgccacctttgtgccccgtagtccccctgcacgtgggctacgctgtgggtgacggatgacctgatgtcctgtgtacgtgtggcaatcgaggtgactccaaacgaggtaaccactcacttgtgccactcctcccatgcccttgtgcaaacacagacacatcccatctcagatgtcacagacactccctgggttggaccatcagatggtctgctgactctatggatttccctggaagacgaataccaatgaacaattttcaaagaaaagtagacacacacatgaaggaaaaagaagctctgtctttagcacattcctgtgaccgcctgcgttctgtgaggtgcca

SEQ ID NO: 681989 - DNA, 704 bp, Homo sapiens
aactcggtggtggcactgcgcagaccagacttcgctcgtactcgtgcgcctcgctttgttttcctccgcaacatgtctgacaaaccgatatggtgagatcgagaaattcgataagtcgagacttgaagaagaccgagacgcgagaaaaatccactgcttccaaagaaacggattgacaggagaagcagcaggcgaatcgtaactgaggcgtgcgccgcaatatgcactgtacattccacaagcattggcttcttattttacttcttttagctgtttaactttgtaagatgcacacacgacgttggatcaagtttaaatgacctgtgctgccctttcacatcaaagaactactgacaaccgcaaggccgcgccttgcccttttccccatcatgtctatcatcatccttggcttgcgctcagggccacggcacacagacactctgccatcgtcggttgcaaagggacgaagtgcggggtgggcaagcaaagtggcgggttgccgaccgacacagactgacactcttaaggcagtcaaacaccccaagatcggccacacagagtgtcctggcaggctcgtcactgaagctcccaaaaccaagaagtcgccgactttaatgcccaccgcggcaccatccatttcaaaccatcaggcaagtcgcgatctgtgaaaatccatgaaaaaacagccacacaaccaaaaaaaa

SEQ ID NO: 681990 - DNA, 790 bp, Homo sapiens
taacacgtgaagggttatttatggttataataaccctgttcctgcaacgagggactggaagccactacggaggaggagggtcccatctctctcctgtcggtttacaccgaggttcacagccagacgtgtggggcaaagggtgttccctgtgttcctacccagccatttcctgtgggcctgccgcctaggggcctcacagggcccaggagtccccagctcacaggccagggcatcaggccaggcgcgctcgggtgcacaccgcaccgtgggaggcaccgtgggttacacctcaggaaaccaagaagcactgtggcgggtctcaggagtggtgtggcgttacagcctcccatacgggggtggggaaaagttctgtagccgaaagccaagcccccttccttgccaggctcttcccaggtttcgaaaaaggctggaacctcaatttctgcagaaaaatctcccagtattcccgtgttgggtaagttttttatacaaagacgggatctggctgtgtttgcccaggctggtctggaactccgggcctcaagcaatcctcccacctcggcctccgaaagtgctgggataactgggcatgaaccattgcgcccggttggagctccggttttaaagcactgccgatcctagaagagctgaccttttctctggccctcaaagctatatgctgaagctgagtgtgaggacccagagagacctttctgagacaaccgctgtggccaaaggggtatatgccgccgagatcctggatcccaaggaaggaggtcctggggaaggg

SEQ ID NO: 681991 - DNA, 246 bp, Homo sapiens
tcagtcggtaccagaggtgaggtaggagaactgcttgacactgggaggtggagtgtggtgagctgagatggcgcattgcactccagcctgggcaacaagagcaaaactctaaaaaaaaaaaaattatctactgtagttgaatgtttatgtccctccagaattcatattgaaacttaatccccaatgcaatagttttaagaggtggggcttaccagcctgagcaacagtgtgaaaccccagcgctac

SEQ ID NO: 681992 - DNA, 168 bp, Homo sapiens
  misc_feature (11)..(11): n is a, c, g, or t
  misc_feature (13)..(13): n is a, c, g, or t
  misc_feature (40)..(40): n is a, c, g, or t
aacatcactgncngatttatgttcatatcttgaacccctnatactgtgtcataagaaacgcacttcacctctgtgctatccttccccaaaatatataatcccagtctaattatgagaaaacattacacaaacccaaattggggggtattctacaaaggtacttgacca

SEQ ID NO: 681993 - DNA, 736 bp, Homo sapiens
cgacgagtcgtgctgaactaccttccatgacgggtactgtcgtgagccgctcacttgctgtcattctcatcaggcaggtccatccaggacgcatgcgcattcgaattaatcataattaccgcccccgctgccgtacccccaccacaccacccaccccacccacaccctccacacccacccacacccccaccacaccccccccccacccacaccaccccccccccccccccaccccaccccccaccccccacaccacccccaccccacgacaccacccaaccaccacaaccccccacaccccacccacacccctcacccccccaccacctcacaacacacccccacacccacctcccccacatcccccactctccaaccacccaaacgcacacacccccccccccccacccaccccgccaccacgaaaacacgacaccacccataaaccaccagcaccccccccagcgatcgccacccccacccccaccaacacgcccaacccaccacaccacccaaccacacaacccacaaccacccaccgagccccatcacccccctaccaccaccaccccaccccccagccaccctccacaaaactcgaccaaaccacccacaactccaccacaccccacccccaacactcaccaccccacaacaccccccccaccgcaccccccacccccaccaccaccacacccacccccacccccaccccacccacacccccaaccccacc

SEQ ID NO: 681994 - DNA, 1365 bp, Homo sapiens
  misc_feature (375)..(375): n is a, c, g, or t
gagcttctgtacgctggtttactgaccatgctgatgcaggtgctgatgagttaggagaggtcatcaaacgatgatatttggccaaacccattacagtatctacttggtttcccgagtatggatgatgaatgaaggagaaggagaaggaagatgatgatgatgatgaggaggaggaaggattagaagatattgacgaagaacggggatgaggatgaaggtgatggaatgatgaagatgatgatgaagtgggaggaacggagcagggaggatgacagcgtagatacgatcgtactaaagtagtaagagcagccgatggattccaaccgctacctgttacttctatgttcctccagttccctggcgaggcgagcttgntggatcatccccaattttgtctggatgaccactgggtggcctgaacgcgcgcggatccagcggaggacgccctgtccaccaatactgccgcgcggaacaccaaaatctacttgggcgggagaagaaccgctaggaacgggtgcacacgtgggaaaaggaagtccaatgacccccttttacggtccacggaaaaggctcacatagaaaaccctcacccgggtggtgaatgcaacaatacggtactggaggactaggcgccagccaaggcatgctacgggagggggaccaagccaggcaacgataccccggagaccccatggagggagcggtagggagcactccagggggtcttcagaccccctgggcaaagctggatggaagcacaagagtccgacacgccaaatcgaggaaaagggggcccccagagccacccggagccatccttagacatagggcaggcacaatagcagagatgagtagacaccctcgggtctcaacgagaaacactcgacaacggtcgatcaggagcaagcggcaccgtatagagagccccgataccgcgggacactaggctgcagggggacagcgaccacaaaaagctacgtgtccagcgtgtgtcgacgttcgtcgtcgtgacactaacacgatgaccactagagccgacgaccagacgcagcgcagacacacggcaagcacagcaaacaccacaaggagaacacacaccacaaccgacacacacagacgcgcgcaacagacacgcatgaggaccaaccagcccagcagcgactagaactcaagttacccgcacacagcggtatccagcggtagacacggcaaaacaccagaaaacaaaagccgagaacgagcacagaaagaaacacaccccacacacagccgaacacccacggatcagaaacaacacaacaaaagaagtccacaatgaacaggaaaagaagaacagcgaaaagcagagaaactcaaaagacccca

SEQ ID NO: 681995 - DNA, 250 bp, Homo sapiens
  misc_feature (41)..(41): n is a, c, g, or t
taggagctctagagatctatccgggtctgggtagctgggantatagtgtgcccaccaccacgccggctaattttttgtatttttagtagagacggggtttcactatgttggccaggctgatctcgaactcctgaccttgtgatccacccacctcggtctcccaaagtgctgggattacaggcgggacgcaccgcccccggccttgaatatccttttaatcatgcttcttgtctacaatcatacccaggaa

SEQ ID NO: 681996 - DNA, 428 bp, Homo sapiens
  misc_feature (13)..(13): n is a, c, g, or t
  misc_feature (41)..(41): n is a, c, g, or t
  misc_feature (52)..(52): n is a, c, g, or t
  misc_feature (76)..(76): n is a, c, g, or t
  misc_feature (108)..(108): n is a, c, g, or t
  misc_feature (140)..(140): n is a, c, g, or t
  misc_feature (180)..(180): n is a, c, g, or t
  misc_feature (219)..(219): n is a, c, g, or t
  misc_feature (245)..(245): n is a, c, g, or t
  misc_feature (270)..(270): n is a, c, g, or t
  misc_feature (420)..(420): n is a, c, g, or t
  misc_feature (427)..(427): n is a, c, g, or t
gctaatggttgcngggcttcatccccggggtgatgagatgntctgtgcagcnaagccccatggtcatgtttccctntgtacaaccctgacatcctgcacatgtccccnggaccttaataaaaggtggaaatttttaaaangaatgaataagccctggtatttgatagcacaacagggagnctatagtcaacagcaatttaattgtatattttaatatgnctaaaagagtataatggattgtttgnacacaaataaatgcttgaggggtgncaccccatattacatgatgtgattattacacattgatgcctatatcaaaacatctcatgtccccataaatatatcacctaattcccacaaaacttaaatataaaatgttttaataaaaataaagaaaagattcccacaataaaaagaaanaaaaatng

SEQ ID NO: 681997 - DNA, 195 bp, Homo sapiens
tgcccagcttaatttttttatttttatagagaggggtttcacctgttggtcggggctgggcctccgaactcccttgacctttagttgaccccaccccgcccccagctctcagggaggcttaagaggcggtgtaggattagctttgagcccaggagtgtcgagacctcctgggcaatatacgagaccccgttctcc

SEQ ID NO: 681998 - DNA, 128 bp, Homo sapiens
  misc_feature (39)..(39): n is a, c, g, or t
ctggtccggacgttaattggagctcagctaccaatcacnatcatcttcattgccttctgctgtcaaggcctctcttgaatccagaaatgcccagtgtgggaagaggtcctggaggatggaaaggggga

SEQ ID NO: 681999 - DNA, 147 bp, Homo sapiens
tacctggtgtcattggtgatccctgggagcgcggtggagtacgttggtccatggaaagcagcgccccagagctggagcagagtgggcaggaatccccaggaagtgggacaagagtgcctcgtctggaagtcgctccctagtctgcat

SEQ ID NO: 682000 - DNA, 758 bp, Homo sapiens
  misc_feature (36)..(36): n is a, c, g, or t
  misc_feature (65)..(65): n is a, c, g, or t
  misc_feature (71)..(71): n is a, c, g, or t
  misc_feature (161)..(161): n is a, c, g, or t
  misc_feature (208)..(208): n is a, c, g, or t
  misc_feature (246)..(246): n is a, c, g, or t
  misc_feature (251)..(251): n is a, c, g, or t
  misc_feature (276)..(276): n is a, c, g, or t
  misc_feature (279)..(279): n is a, c, g, or t
  misc_feature (281)..(281): n is a, c, g, or t
  misc_feature (299)..(299): n is a, c, g, or t
  misc_feature (306)..(306): n is a, c, g, or t
  misc_feature (325)..(325): n is a, c, g, or t
  misc_feature (352)..(352): n is a, c, g, or t
  misc_feature (378)..(378): n is a, c, g, or t
  misc_feature (382)..(382): n is a, c, g, or t
  misc_feature (384)..(384): n is a, c, g, or t
  misc_feature (396)..(396): n is a, c, g, or t
  misc_feature (402)..(402): n is a, c, g, or t
  misc_feature (406)..(406): n is a, c, g, or t
  misc_feature (418)..(418): n is a, c, g, or t
  misc_feature (436)..(436): n is a, c, g, or t
  misc_feature (438)..(439): n is a, c, g, or t
  misc_feature (441)..(441): n is a, c, g, or t
  misc_feature (447)..(447): n is a, c, g, or t
  misc_feature (455)..(455): n is a, c, g, or t
  misc_feature (466)..(466): n is a, c, g, or t
  misc_feature (478)..(479): n is a, c, g, or t
  misc_feature (486)..(486): n is a, c, g, or t
  misc_feature (493)..(493): n is a, c, g, or t
  misc_feature (495)..(495): n is a, c, g, or t
  misc_feature (498)..(498): n is a, c, g, or t
  misc_feature (533)..(533): n is a, c, g, or t
  misc_feature (543)..(543): n is a, c, g, or t
  misc_feature (549)..(549): n is a, c, g, or t
  misc_feature (644)..(644): n is a, c, g, or t
  misc_feature (648)..(648): n is a, c, g, or t
  misc_feature (662)..(662): n is a, c, g, or t
  misc_feature (758)..(758): n is a, c, g, or t
atttcaaaaggatagaaggagaaaagcaggccaggngtggtgggctaagaggcgagcctgccggngcctgnatgctgctgggcaaaccgctgcatccgctcctcgagctccggccgtaaagtggcggatcagaccctgcacaggccaggaggccccgtcanccagagcacaaatcgtatggccttctatctgcttgctgatctcccanagggagtcgatctcggccggccgggcatcccccctcangaaangtgccaacaccttgttcatccagtncanancctcacggcatggggtanactggcnaaagctctcgtgcttatanaactcaatgaggcgggcgatggctttnacgatgtccgtcgagcggtccatgangatnancgcagctgtgcncaggcntgtntgtgcctgcacnagcgcatcgaagtccatnannancgtctnaaaaaaanaattggggatnagtggggtagannagccgcnagggatnanagnaaggaggttgtcccagccgcccgtaacaaccccancatgcttctnaatcanttctttcaagggcacagacatctcctcctccacagtgcaagggtggttgacatggccagaaatgttgaatagtttagtgcctaaatagcgttctntgcnaaagccagcaaacnaggtacctccacggcggcagattgtgggggacactgccactgtctccacgttggccacagttgtggggcagccaaacactcccacgtctgcggggn

SEQ ID NO: 682001 - DNA, 226 bp, Homo sapiens
  misc_feature (47)..(47): n is a, c, g, or t
  misc_feature (50)..(50): n is a, c, g, or t
ggcacgagctttcttgttctccaaagtctttaacctttccctgggtnttncctctcctctaataaacatttagaagtgtctagccgggcgcggtggctcacacctgtaattccagcacattcagaggccaaggcagacatatcacttgaggtcaggagttcaagactagcctggccaccgtggcgaaaccctatccctgctgagaatacaaaaattagccgggcgt

SEQ ID NO: 682002 - DNA, 151 bp, Homo sapiens
acacccttactgcttctgccaaatgagactttcctcctactgtatttggagaaggaatatccgcaggaaagaacagatctgggctgcttcctgcttctgccggtctaccgccaataccaccctgaatcgcgcccgagtctcggtcttgatc

SEQ ID NO: 682003 - DNA, 1369 bp, Homo sapiens
  misc_feature (1)..(1): n is a, c, g, or t
ngctgactaagaagagtgtggcgctattcttatagggaagggagtggccctcctagcctcccccttgtgggtccccaaggacccccccacgccacaagggggcaaaagactttgtccgccgccttctcataagtgtatagggcaccagggccccagcgggactaagagcaccaaaccaagctctcgcattgggggcccccaggaaagtgttggccccattatgacaacaaagggccaatctgcttttaggctccggatttgaatattaacccttaagagttatctgggcgcctatgcttggtggttgaattctttttctaaggcccctggcccaaataaccctcgggtgcccgtgcccccttgatagagggttaccaaccggtcgcgtgggaagacacatgtgtgggccaccctggggccagtcacctgtgccccgtgcggcccccaccctaaaaaggaaaaaggggggcttaatatttggccctgctcctgtggcacaagaaacacaacggtttgcccgcgcgctgccgctcccgtgctgttccccctctcccctcgtgggggttttttcccccactttcacgcccccctttctcggttttttcccctctctttaaaaggcccccccgttgaaaagatttgggtggccgctctatacagcggcttgtctccccacgttatagcgtttatcacttgaaattgtgaagagttggcttcccctgtgcccctgggccccataccctccccgtgcccgctcgtggcccccaccccccctcggcattaaagtcgtacacttgtgtttgggtattttctttccgcccgagtttgtctgtgttgccccacagtagagggtttttggtttgaaccctgcagactccccccgcatgtcccctgaggccccagaagagtgtggtggtggctttaaaactttccccccacccctcttgggtgttttccccgcctttccccccgtgtggtttttaagttcttctttgtgcctggtggccctataatggccaccctgggcctcggggaaggaccacctgccccgcttctagggtttttaataaaatggttcttaactccacagggtcacaaccctcccacgcgcctcgtgagaattatacctcggtgttctctctctttttgaacttgggaagcccacgtattaggctttggggtggggggaggttctgtaaagtgaaacacaactttctgtgtctttttttctgccccctcgttgtaaataaactctttaatggcccaaaccccacgagctttggactttttttttttctaactgctaaaacccttctcttccccctggttttactgtaaccatttgggaaagggataaatgtcgtcccct

SEQ ID NO: 682004 - DNA, 245 bp, Homo sapiens
  misc_feature (30)..(30): n is a, c, g, or t
  misc_feature (97)..(97): n is a, c, g, or t
  misc_feature (168)..(168): n is a, c, g, or t
  misc_feature (231)..(231): n is a, c, g, or t
gggaaggggtctttggaaaggggagggaanagtgggaagggctgcatctcatggcttgagtgccagctcagccacagtacactagaacaccaagtanacttctaaggtttttgactgcagtccctggctcccagacagcacctctagacctgcccacggcctgggggnacttgctacagaggttacactgagccgagatcatgccactgcactccagcctgggcgatacancgagactgcatctc

SEQ ID NO: 682005 - DNA, 169 bp, Homo sapiens
ccggagtacccagaccctccttgttcctatggcaagcacagacctaggggagaaacagaacgcgctgctttcctgagcaaacacgcattggggctgagcttggtttcccgcaggagagttgcactttctgcgtaaggaaggctgcaaaggaaagctagctttggtgcca

SEQ ID NO: 682006 - DNA, 173 bp, Homo sapiens
  misc_feature (57)..(57): n is a, c, g, or t
aggataccctggctgtgggcgcgaccagcagcagcaggagcagcacggtgcccatgnatgtgaggaaaacaatgaaggcaacagtgtccgatgtggactggaaaaggagcccaagccagagggcaagtgacaaaggatgtaccatgtccaatctcccacaacccacgcgccca

SEQ ID NO: 682007 - DNA, 1108 bp, Homo sapiens
gtggaaccactatatgagattggctgtgtgaatctcggacgcctcccttcccacacacctctggacctacaccaaagggcctcaggtggccacacttcctatccttcgaaggggctccccttcttggcatggacattatttaaaatcaccgactccatgaggatgaggtttgttttacaaaatgccatgaggttaaggagagttgggacccgtgagactggaggtggctaccgtccccactcctttgatcttttaagaccattcctcttccttgatccctgtgacgcagactcgagtggtacatttgtgcaagttgctcggccctggagggaaccagatcagttatttaaagccagaaataatgtttttcattatggttacggattctattgtttgtgtcctcttactccgattaccgaggtgtgtgtgtacatatatatagtatactatatcattataaatatcaaagaaattatatatctatcctgggatgggaaaacaagggagggatatatagatatatatatatatatatacataaaggagggggatccatgtcttcaccttaccttagaccagaaggaaaagagagacatgaaagtcttaccaatgacatcagaaggaacacctctactagagaccacaagaaaacaagtaaggaagtagcactactctgctggagctaagagatcaggaaagacaccgggtacatcatggagtcacagataaacagaactcgggagacgtcaaaagggctccctcacgatcaagaaccccacgacagggccagaaactcacgagggagaaaacaagaaaaacaatatgactatgagacaagaagaaccacgccacaattggaaaggagagagaagagaaagaacacgtaccggacccccagtgctagcagagccagaacgcgacggccgagacgtcggcacaaaagaaacccagacggcagcaaagcaaacgaggggggagcgcagcgcaggccaggaccgccagccaccagtacggcgagaaccaagcgacacgcagaccaaagataggagagcacgccagggggacgagagaaccgcaggagagccactggtagtaatagagaacgaga

SEQ ID NO: 682008 - DNA, 250 bp, Homo sapiens
aattcgcggccgcgtcgacctgttcttccaggcgcaagctcgaaaggcggcggtagagcgccaggcggtccttcatgtcgggcacgtacgtttcggggagcatcgcggggaatggcaggttgatttccacttcctcgagaggtttcgccacctcttcgcctttgaggcgatggatttcttcctgcagaagctcgaggtacatctcgtagcccacgctgccgatgtggccgctctgcgagctgccgagcgc

SEQ ID NO: 682009 - DNA, 138 bp, Homo sapiens
ctactggttgcagcggtactgagctttgctacggttactggctttgcatcgtgtactggtttccgccgggtaaacgagagaacagcaagggaagactggtcgacagtggccagtggatcagggtcttggtgacggggg

SEQ ID NO: 682010 - DNA, 289 bp, Homo sapiens
aaaaggtgcagtagattattttctacaagctgaaggaagtatcaacaatgaggttatccctagacccactccagatagctctaatccgagtcagctaagagtctgcaatctttagcaaatatgtatcccttgctagagttctggaatacttatctgatcactcaatttattgcttatatcatagaacctgtaagtttgcacttaaaatgaatatttaggcacatctatctctccgtcattctgtcggtaagcagatcagtgagtgcttacctttgtttcatccttggca

SEQ ID NO: 682011 - DNA, 314 bp, Homo sapiens
tacatggagctgatgaacactacataatcacagcacatattttttttggagatagagtctcactctgtctcccaggctgtaattaaatgtctcatggtctgcctagtcatataagaattgtaacttccaaaaggacaatatgttggcttaattcactgattcatcccaaaaaccccatgtacatagatgcttcaataaagctgtatccaccgtagatatttaaggcccttctacaagatatttaactgcaaaagatgaacagtctcactgaaatttaaatgtaagcatgatgaccaactactttaaatcacagc

SEQ ID NO: 682012 - DNA, 226 bp, Homo sapiens
  misc_feature (3)..(3): n is a, c, g, or t
  misc_feature (7)..(7): n is a, c, g, or t
ttnttgncatgcctccattcagagatttgcagaccaatctagggactccgtcctctgtcctctaccaaggaaaagattgctattgtcgtcatcacctaccgacctccgggggtcttctgggagttttctcccctaaccatttcaacttttttttggattctcgctcttgcatgcctcccccgtcctttttcccttgccagttccctggtgacagttaccagctttc

SEQ ID NO: 682013 - DNA, 186 bp, Homo sapiens
aaatggttagctgggcatggtggtgaatgcccttagtcctaactgcttgggaggctcacgtggcaggattccttgagcccagcagttcaaggttgcagtgaactatgattgtgccactgccttctagcctgggtgacagagtgagaccatgtctctaagaaaagttggtgaggacgccaggggaca

SEQ ID NO: 682014 - DNA, 261 bp, Homo sapiens
cgataggtatatcgcctggatcctatggacctcgtttgtgttagagggtatttgatctgtctctccccgcagagttatttatagttagttcatgtaggcacaagttatatgtgttagtgctctcatataatgtgtttggtgatacctttgtgctctatggttagttattgtatttgatacaggagggtccgacattattagcatgtcagatatttgtgtagatggatatgctcagtgtatctgtcagtgtggatgagtcgc

SEQ ID NO: 682015 - DNA, 1089 bp, Homo sapiens
  misc_feature (964)..(964): n is a, c, g, or t
ggacggacagtggataggtgcccgatgcctacagctggtctggggctcgtgtctgttaccttcgtgacgttggtggcccggtggtccaccctttccgtagcttgtcccaattgggatgctggaattgggcatgctggtgaccaacgacctgctgggccgtttcctgcatagaggaacagtggagatttcggcggacggggaaccggatgtacgtgccgtgagggaaccgcacatgggtactggtgtcgctgctcagcatttcaagaggataccgacgacgaactggtgacaggtaaaaatgatttagctgtgcgtccctgctgtaggtgctcccagtcgtcagggtgatacacttctccagtcgtctcgtcccaatcacctgaccttggttcgcaaccagtggatacaactgcacgtaacatgctctctgccacaacgggaagaagctgttctcgtaatggcagtactatgagcacgtgaagaggcgtggtcataagaatggacgggtgactcccaaagagtgagcttcgcacttggcaattagttggaacaggatgcgtgagtagaggaagaacaagggacaaagtcagcttgacggttctaagctagcgttggtcaccaactgcacggaagtagagtaggttgctcactcttggaactcaagaggtatgggcagtgtgacatcaccttggggctaggagaacctggtttgacatgctcaacttagagagcgcgcagagaaaccaacaccttgctagagaaagggtagatgcgacgactacaaacgtagtttcttcacctaactaccacgatagtatttcattgtcattcaccagaacgacagtctggccatatgagattggaaagaagatagatattagacagagaaggagatctaacacttaaaacagctcgattctttgatgacatacagacacacaccaaaaccattttgtacttagcnttcagtaaacaaaaaatttataacagacgttccttggtagtgaactaggcaaaacaagtgccgacccatattacaaatgtgaagaaaaacctaccaaaggacaaagttaacactttgatactttc

SEQ ID NO: 682016 - DNA, 615 bp, Homo sapiens
agtcgttactgttggagttaagtattcagaaaatccaaaataattctatttaaggggagtttgtgatcatacagtcaaactcttatcaagatacttttctacaacattcctaacaaactagccttgctactcacagacagttctcagcgatgtatatccttacttcacatgaattccttaaatagctctaattttcaggaaattctttctttatatcagaaacctgcttccttacaactgtctgcctacgggaataccaaaaattaagtctgcacttaattcactttgggaggccaaggcagggggattgcttgaagccaggcattcaagaccagcctgggcaacatggtgaaaccccatctctacaaatacaaaaattagccaggtttggtggcatgtggctgtagtcccagctgcttgagaggctgaggtggaaggattgattgagcctgggaggtcaaggctgccgtgagctgagattgtgccactgtactccagcctggacaacagagcaagactgtctcaaaaggaaaacaaaaacggtgttccaagactctttagagttttattaagcatgtgaaatttcgttgggttgggtgatagttcctttagaac

SEQ ID NO: 682017 - DNA, 288 bp, Homo sapiens
caaccactgtctcatgagagacagcagatgctgtgctggcatgctgctgtcctctagtttacatatcctatctgaggtaagcgggtaccaagtatggccatggcagtctggctgagttagaatgtgaaatgtaaagtgacttctgtgggtcatagccacaaatagtgtcaagatgtactaacttgataaacatattccagatgtttggttaaacctaaaaagacctctctggtggatgtagcagtacatcatttcatatgtattaatttcataacttttttattttaa

SEQ ID NO: 682018 - DNA, 114 bp, Homo sapiens
cgcatagctatgaccatgcactggacgacgttctacacgcagagctatgaccatgcattggccgtcgttgaacaccaatagctatgaccattgcatgggccgtcgattgaccac

SEQ ID NO: 682019 - DNA, 1646 bp, Homo sapiens
  misc_feature (1119)..(1119): n is a, c, g, or t
gacaaaaactacgaatctgctcagccctcgcgggctgctgctctctgttactatcctcatttctatgacggcgacactgaaatgttacggagattacgggacagttgctgacgctgcgactgggaacctaggcccatctgagcccctgacgctggacgtgctgacgctcaccactgccagtgtggcctcccatggaccaagtatcctattatgactgggacccgtcatacttaaccttgcgctgctgtcagggcacactcctgctgggctacgagcctgcgcacactctgactgctcctagctccacgcactgacccactatgacggacgtcccgtctctctacccaagcgtgcgggtgctactctccaagaaccacaccgggctgccacgcacacgcgggcgaacgcgcgcctactcacccgcgcagaccgacacacctccctggcgcccccgaccaactgcctcaccccgccggcacacaacccgcacccacctcgcacacctcccagcacacccaccacccgccaccaccacctccgacacacacccacacccaccacaaaaacaggcaaacacgcacacagccacacaccaaccaacaaactaagaacaccgagaaacagcaatacaaccaccagaccacacactcaacgcatcgccgcccacccgacggaccagccgaaacgcccaccacagcgaaaggaaggaacccagccaccacaagcggcagtaccgaccaacgaaccacaacagaagcaccaccgactagataagcacacacacggaaccagacgaagccgctccacctaccatccacgcaacgaccgcgacacgaaaaacgacagcaaacaaaccaacagcgagctcgcgaggcacgcagccaacaccgtacaccaccacaacgccaccagaccaccacacacgagcaaagagagcaacatgggcccggcctgacaagacccacacaaacaaccagggcgagccagcaaaagcgagagcacacccgcatccaacaaccaccatgaccgaactacgtgcggaacacaacacaactgccacagcacacaaaacacacgcagcaacgaccaacacaaaatacaagcaaacaccagcaccanacactactgcggacagccctaacactacatcacaatgacacgggaccgaccctgaagagacaacgcacaaatgatagtacaccggcacaggcacgcacacacacacagaacccacgaggcgacagagcagtaggtcggcgatagactgcgacacaacgagcgcacaacgaccacacaaaaagcacagaccacactacagccaacgaacaatcgccaaaacagaaggccgagacgctcacataccaggcagcgacagactagaagccactaggcggagacacacagcgcatacgactggcgcgagaggctacagagatgacgcagcagacagaagagaacaacagcacgacgacgcccaccgcggccgcacgcagcaccgacgcagaccgaaccagacgcaacagcgacgcaccacagcgcaatagaacgacaagacgcaccaacacacaaccaacagacagggaggagagaaactcaagagagagggcgcgaggcgaccggcgggagtggtgtggcatcacgacccg

SEQ ID NO: 682020 - DNA, 258 bp, Homo sapiens
tggtgagaagtacttggaatctgggtatatttagatgatgaagctagaaatttttctgacgggttctctgcgggaagtggagagaacagattcaaggctgagtgcaagatgttggcccgggcaactggaaaatgggggggctatgatggagtgggaagctggtgggagccacaggtgtggccgagggtgatgaggatccatccggggcgagcgtgagctgcctttgaccccgagttgagatacggactctgctgttgg

SEQ ID NO: 682021 - DNA, 119 bp, Homo sapiens
gaattctctactcctgcacgatgggcactcatgtaggatgtggacggctactgctacaatggcatctgcagactcacgagtgtgactgtgggagcggagcaccacctcttgcacttgtg

SEQ ID NO: 682022 - DNA, 145 bp, Homo sapiens
tggctgagggctatgtccaagtcaagatcagaaataggtcagctcatcatgcttggctatgttggtctggtagttagattaggtcaagggcttgtttcatgagggagagattggaacactcgcaggtgtacgaagtacctcgtcg

SEQ ID NO: 682023 - DNA, 90 bp, Homo sapiens
  misc_feature (69)..(69): n is a, c, g, or t
ccccattccctctctactcttgacagcaggatggatgtgtgtatgtggtttattttattttcttcattntgttctgaaattaaagtatgc

SEQ ID NO: 682024 - DNA, 341 bp, Homo sapiens
ctcatatgatggggagtcggtgggtctctctctaaatcgtccccccttttttattaaatttggtgttcctttttggaggctgtgtttggacacacaggcacacacacacacctcttttgggatttatacacttttaagttatgtaatactacattttctcgtatgagcctttggcctaacctatcggctgatctaacatcaaaccagcttcttttttttgaagtggcctaaatactccttaattccatcttatgaactctttttctttcttcttccttttttgggaaacggcatatcggggacccgagcccgaattcgaaactcggggccatagttgttcc

SEQ ID NO: 682025 - DNA, 464 bp, Homo sapiens
aataaaacttatctatagtttttcattatttttgagtggtaattatgtgttaattcagctgaacaattgcaattagtattatttctttgtaaccaagacacattttttacttttcttttctccctttgtttgcattttattcactctctaatgtcaatatcaagaaactataggctgggcatggtgctcatgcctataattctagcgtttggtgcagggtagggggcgccaaggcaggaggattacttagcccaggagtttaaaaccagccttgacaacatagcaagatcttatctctgcaaaaaagtaaaaaattagctgggtgcggtggcatgagtctgtagtcctagctagtcaggcggctgaggcaggaggatcgcttgagcccaggagttcaaggttgcagtgagtcatgtgcgcaccactccattacagcccgggtggcagagtaaggcctcaactca

SEQ ID NO: 682026 - DNA, 183 bp, Homo sapiens
ccagtcaacactgagtcaatgctttgcagttccaaagtacgtatactatcttcagtctccgggttagttactgaagtaccttgtgtctaaatccttagtactttgtaacgttggtacatttcagttgtcaagtcctctcttctcccagtaacctctagtacaatgtctagtctcattctattg

SEQ ID NO: 682027 - DNA, 91 bp, Homo sapiens
ttaccaatgatataaagggtttataatacatctagttttattatacttagtactagaattatctcaaacgtacaatataatgtatttcagc

SEQ ID NO: 682028 - DNA, 349 bp, Homo sapiens
  misc_feature (17)..(18): n is a, c, g, or t
  misc_feature (42)..(43): n is a, c, g, or t
  misc_feature (87)..(87): n is a, c, g, or t
  misc_feature (131)..(131): n is a, c, g, or t
  misc_feature (183)..(183): n is a, c, g, or t
  misc_feature (224)..(224): n is a, c, g, or t
  misc_feature (330)..(330): n is a, c, g, or t
actggaatatgtattanncggatgatttttaaaagattaggnncactgtgataatgatttgggattgtaatttattgattttcgtcnctttcccttttgaattctctatttattaccgttcaccccatcanacactcttgcgttctcttaccatctctcttcctttttctctccaaaccaaancgttgtaagttgttaaggttttaaagattcccacctttaanttatttttcccttcatcccaaagcttccttgctccttttctctgtttttagtcgcaagtcacccatgggacacgtgtcgttattaatgttgtgtatttattttttnataaaagaggtatttattg

SEQ ID NO: 682029 - DNA, 127 bp, Homo sapiens
  misc_feature (57)..(57): n is a, c, g, or t
gggccacagcactcacatgtgtcctagtgcgtttggcctgccacggttggtttgttncccaccgtggtctttggtaaccactacaagtgccttggtagaagctactctcttctgtgcatcctactca

SEQ ID NO: 682030 - DNA, 336 bp, Homo sapiens
  misc_feature (27)..(27): n is a, c, g, or t
gctactactactaaattcgcggccgtncgacccaggctggagtgcaatggcagtctctgacctcacagcaacctccgcctcttgggttcaagcaattctgctgcatcagcctcccgagtacctgggattacaggcatgcacaactacacctggctaattttgtaattttagtagagacagagtttttccatgtaggtcaagctggtcttgaactccagacctcaggtaatccgcccacctcagcatccaaaattactgggactacaggcatgagccaccacacccggcctagttcctgtttcttatgaagcatgagttaaactcacattatacgtg

SEQ ID NO: 682031 - DNA, 1274 bp, Homo sapiens
  misc_feature (642)..(642): n is a, c, g, or t
  misc_feature (689)..(689): n is a, c, g, or t
  misc_feature (694)..(694): n is a, c, g, or t
  misc_feature (749)..(749): n is a, c, g, or t
aggggctgtgttcagatgcttttgttgggggtaattccacctttaaaaggtttaaaaggttgccagagggagaaaagctcaaggatagaaagggccagttaatctggatatatatttcgctgataactaagcttccctttaacagtaaccttttcacatttagcctttacttctgtgtttacattttgttaatgttcagtataaaaattcaattccattgaattcagccataggcacattgtaaacttcctttttgctgaaacgaaatactcctggtggtgatagcttgtataaatataatgtctttctgagcatgttggcattttctcttacctcctttaacaacttctactattagaaagggaccaacggggacacagaccttttagagtctatttgctcagggtcacacatcaagcaataaaatgcttgttgttttacaggtaggtgttaagatgatggtgacatacattcattcttggcctgtgtgacatagtgacagagtctccttgttgttgcagaatggactgtggtaacttctttctggcctttcaattttattaattcctaagttgttcgcagagtacctacaatataggaagcaggctgcgtggtgcagtggctcacgcctgtagtcccagnactttgggaggctgaggcaggaggatcacttgaacccaggaatttgngaccngcctagacaacatagcaagaccctgtttctacgaaaaaaaaaaaaatcaggcgtnatggcacgtgcctgtggtcccagctacttgggaggctgagatgggaggatcacttgaacccaggtgtctaaggctgcagtgagctaggggtgtctccactccagcctaagcaaccgagtgagaccctgtcttttgaaaaaccaaccatgaagatatttgatagaataaaatcatgtttttgtgggttactgggtacccaatgaaaaaaaatatttgcccttggccaggcgcggtggctcacgcttgtaatcccagcactttgggaggcaaaggtgggtggatcacctgaggctaggagtttgagaccagcctggccaacatggtgaaaccccatatctactaaaaatacaaaaattagcggggtgtggtggtatgcacctgtaatcccacctactccggaggctgaggctggagaattgcttgaacccaggagggggaggttgcagtgagctgagatcacgccattgcactccagcctgggtaacgagagaaactgtatttcaaaaaaaaacacaaagtcgacgc

SEQ ID NO: 682032 - DNA, 140 bp, Homo sapiens
gctcactgcagcctcaaattcctggctcaagtgacccttccacctaagcctcccaactagctaggactacaggcgtgacacccacacccaccctgtttatatttgagagtatgcaatctgataatttttatttacaatga

SEQ ID NO: 682033 - DNA, 772 bp, Homo sapiens
ggcccattacgccgtgtgctggagtcttcctgcaggcttttcctatgcctcatgatgggacccatgtgggcgtgtccatcctggctggaagaagaaaagccctctcatgctagcgttgcaaagcccagagggtcctagtgtgagtctgtggcagagtggctcaactgatgaatcataggcagcccagtcggcgaggaatgcgttcccatgactgaggtcatctccaccgaggttatctccgaatcacgagcacagccctgttctccaaagccaatccgcctggttcaggacctcccagaggagctggtgcatgcaggctgggagaagtgctggagccggagggagaatcgtccctactacttcaaccgattcaccaaccagtccctgtgggagatgcccgtgctggggcagcacgatgtgatttcggaccctttggggctgaatgcgaccccactgccccaagactcaatgcttggtggaaactcccccggctgagaacaagcccagaaagcggcagctctcggaagagcagccaagcggcaatggtgtgaagaagcccaagattgaaatcccagtgacatccacaggccagtcggtgcccagctcccccagtatcccaggaaccccagagctgaagatgtggggtacgtcccctgaagataaacagcaggcagctctcctacgagccactgaggtctactgtggacctggacatccagaccaatgctgtcatcaagcaccgggggtcttcagaggtgctgaccccgtatcg

SEQ ID NO: 682034 - DNA, 457 bp, Homo sapiens
gtgatgtgcgggtgatctagaggatcccttcgattggaatggctgcacgcctctgcaggtcttcgaggacctgcaggtccagcccctccttgcaggtatacagacagtcgatcaccttcttatccgcgagtttcccggaacggagagttaagccagccagatggcctcggaaaaacggggtcatgtgcaggtcgccaccttggggtcaggggagaaaaggcgaagtcaggcgtgcaacccagcatcgcccaactcacttctcactcaacacggtgtaacgggtgctggcagctcaggggatggacatgcgggttagttcataccaagtccggttagccttgcaatctacatggaagcgcaatgaagaaattaaaccgtttatgatcatgcacatggccgggagaaagggagagtggggggtgtctcacctgaagccaagaggtccccggaagggagc

SEQ ID NO: 682035 - DNA, 551 bp, Homo sapiens
ttgcgtgcgtgccccttcgtacctgaccccatgataacctattcagatttatgtcttgccctctagcactctccccttcagtcaagctgtcttttcatccagacacagttcctactgtcatctccctgtcttcactctgtactttacgtctgatccactcctctcaacaccagctcatccctggcacaacaaagctttctgaggttcttgtggccactactttgctccaaatgtgtttctgataaaataaggacacagtttagcacttaaaattttctcaaaacgatctattttcccagttgggtgtgaaagctctttaagggcaaaagccgggcttgaagcaacatatacttttggacagattcagcaaaccccaccatctgcctggaaaaaaacaaggctcaaggtaaactcccgaggttgttggattgccagtttggtttattcttccattaccttctttctttcattagtcccttgttctcaacaaccaagagaaaaatacaacaacatccaatgcaaaggcttcttactatgctgaggggcaagcg

SEQ ID NO: 682036 - DNA, 624 bp, Homo sapiens
cgagcgacagccgggtatacatggaggtggcacgaccaggtcatagccggtgcgcgcagccatgaccttgctctgcatgatttcggcgctgtcgaaagcatccatatgcagcttgatgccggtctcctgctggaattgcctgggcgtctgcggttcaagaaacccgaaccagttatacagatacaccgaagattcagcggcggctgcgggcgtgctggttgcagcccccaggagcgaagctaaaaaaatagctcgcaagtgtgctcgactcatatgactatccctgtccacacgacacgccttcatggctatcgtaagctcggggtgaatataccgagcatcaacgaatagtaaatacctacaagtacttagctctggcctgcaaagccctaaccctaaaggggtagaatatgtcgcttgaccttcatagcctggcttggcaccgatcggttggaaaactgatcatgcagctcaatcgcccggagttctggagttcgttgattcgcgtattgaatgaatatgtgcagatagacaattgggtggtgctggttttgggcgaccacgcggtgcgcgtgatcagcctgcccgaagtagcagacggattccattgggggggggatcctc

SEQ ID NO: 682037 - DNA, 426 bp, Homo sapiens
aaaaatcatatccttaattaacccttcatcagtttcttaagtcatcggtcatccggaaagcaagtaaattatctaaaggtaaataatttgggtagtgtctaatctataaaacatacatacactaccagtttttttctacctttaacaaattcgttcccataaaagacaattttatcactaacaaaggataacgggcaggcacaaaatagtgagtagaaaaggatttcctaaaatttttcatttctatcatttgatagcaggtggcatttatcttaaagataaatatccttcaataaaaataacaattcgaattttccagtggtagaaatcccgggtgatgacattggatacaaatagtttatcccggaaatccatttaaaatttttaatcaaatcttcggcaattcatggatcaagaatacatagg

SEQ ID NO: 682038 - DNA, 697 bp, Homo sapiens
  misc_feature (112)..(113): n is a, c, g, or t
  misc_feature (186)..(186): n is a, c, g, or t
  misc_feature (195)..(195): n is a, c, g, or t
  misc_feature (228)..(228): n is a, c, g, or t
  misc_feature (235)..(235): n is a, c, g, or t
  misc_feature (238)..(239): n is a, c, g, or t
  misc_feature (249)..(249): n is a, c, g, or t
  misc_feature (253)..(253): n is a, c, g, or t
  misc_feature (261)..(261): n is a, c, g, or t
  misc_feature (263)..(263): n is a, c, g, or t
  misc_feature (281)..(281): n is a, c, g, or t
  misc_feature (286)..(286): n is a, c, g, or t
  misc_feature (300)..(300): n is a, c, g, or t
  misc_feature (305)..(305): n is a, c, g, or t
  misc_feature (314)..(314): n is a, c, g, or t
  misc_feature (319)..(319): n is a, c, g, or t
  misc_feature (330)..(330): n is a, c, g, or t
  misc_feature (344)..(344): n is a, c, g, or t
  misc_feature (357)..(357): n is a, c, g, or t
  misc_feature (374)..(374): n is a, c, g, or t
  misc_feature (382)..(382): n is a, c, g, or t
  misc_feature (398)..(398): n is a, c, g, or t
  misc_feature (414)..(414): n is a, c, g, or t
  misc_feature (425)..(425): n is a, c, g, or t
  misc_feature (462)..(462): n is a, c, g, or t
  misc_feature (534)..(534): n is a, c, g, or t
  misc_feature (557)..(557): n is a, c, g, or t
  misc_feature (576)..(576): n is a, c, g, or t
  misc_feature (590)..(591): n is a, c, g, or t
  misc_feature (599)..(599): n is a, c, g, or t
  misc_feature (613)..(614): n is a, c, g, or t
  misc_feature (627)..(627): n is a, c, g, or t
  misc_feature (634)..(634): n is a, c, g, or t
  misc_feature (676)..(676): n is a, c, g, or t
tctcaccaagggtaccgcacaccggaatttccaggaagaaatagagtttcttaatgcaattttcccaaatggagcagcatattgtatcggtgcacgtatgaattctgtctgnngggacttatatactctggatttcccagagagtcgggtaatcagtcagccagatcaaaccttggaaattctgangggtgagcntgacccagcagttatggaccagttctacatganagatggngtnnctgcaaaggntgtnactcgtgngngtggaattcgtgacctgntaccnggttctgtcattgntgccncaatgttcnatccntgtgggtattnggtgaatgggatgnaatcggatggagnttattgggctattcacntcactccngaaccagacttttctnaagtaagctttgaaanaaacttaagtnagacctcctatgatgacctgatcagggaagttgtagnagtcttcaagccagggaaatttgtggccaccttgtttgttaatcagagttctaaatgtcgcacagtgcttgnttgcgccccagaagattgaaggntttaagcgtcttgattgcnagagtgctatgttnnatgattanaattttgtttttannagttttgctaagnagcagcnacaacagcagagttgattaagaaaaatgaggaaataacgcanaaagagtacacatgtagaagg

SEQ ID NO: 682039 - DNA, 537 bp, Homo sapiens
agctgactctgtaggtaggtttcagggaaaaggagagcaaagaaagatgaatttaaaaattatacttggccgctgatggtccacaccatggtgtaatgaaattgggtaatttagattcttgagtaaagacaattttctcatcatcagacaggtctcttgaggagggacatggatttcccaacgtatatctgactactacacatctctgttcagaagaatacagacatctatctgcaaaagatcgtggccttaaaattggtttaaagcatgtattatttcctgccagttcctgtatgtgctcgtgattgggggataagattaactgcatcctgcctcctatatctataatgttaggcatttgacatttatggagataacattggcagcttcatctgttcataaggcatccttaaaggtccatcatattataatttgcaatatccatggcacccaaaactttgaaatttcatcttgtgtgtggcagcaagcccttgtgcagtgaataaactacccagcccccttagtggtcccccccca

SEQ ID NO: 682040 - DNA, 205 bp, Homo sapiens
ccgggttggctcccgtggtactagacacatgatgatacaaggcactctgaaggtaaaccagcagaattaccatgctaaatagaaaaaatacccacaaaatctccaaatatggaaataatgggaaaacaaatgaaattaattatgcctggtatactcaaggatatcaggaggagattaaaaaagagaagagcggggtaccggagct

SEQ ID NO: 682041 - DNA, 271 bp, Homo sapiens
ctggtgagcaatgagacttatggattcaaatctgcctcatgccatttagctagtaaacacaaagagaagtccataacctagccctctttgacctctctgtccacactctcagctactagaggatggagactggcaggagaaaagcagaaggttctggagtccagaacaccagctcttagtgccaggaactgccaggtaagaattctggctacactgaggccaccatgctctgtggaagtcaagccagatggaaagatcacagaaggagaac

SEQ ID NO: 682042 - DNA, 433 bp, Homo sapiens
  misc_feature (390)..(390): n is a, c, g, or t
accgcacgagctcggagttccacgaatcaagttgggagtggggaattgtcgagaggagtttctctttattttattttattttactctatttatttttgagacagggtcttgctctgtcacccaagctggagtgcagtggtacagtctcagctcactgcagcctcaacctcctgggctcaagcaatcctcctgcctcagcctcctgaggtgctgggactataggtgtgcctcagcagcctggctaatttttgtatttttttgtagagatggggtttcactgtgttggtcaggctggtctcgaactcctgacctcatgatccacttgccttggcctcccaaagtgctgggattacagacatgagccactgtgctcggcctaatttttgtatntttagtagagacagcattttacaacgttggccagactggtctc

SEQ ID NO: 682043 - DNA, 86 bp, Homo sapiens
  misc_feature (22)..(22): n is a, c, g, or t
  misc_feature (84)..(84): n is a, c, g, or t
gcttggaacaaagtgacaacgntttgttaactcaaactaggacaattgcaatgtcattggtgaaatgtgccagcagtgacacgnag

SEQ ID NO: 682044 - DNA, 205 bp, Homo sapiens
cccccccgggggggggttttcccggggggggttttttttttttcccccccacaagggggggggggccccccctttttttggggggggggggggggtttttttacccattccccccccggggttttaaacaaggggggtttgtttgcccccccccgggcccctttttgggggggggggtggtaaggggtttcccctttttttttta

SEQ ID NO: 682045 - DNA, 382 bp, Homo sapiens
atacgttctctcctcaaaaaaggatgaggcggctcgtctggtaacagctctcatcgacccaggtggggtgctcagccttcagcagagtcacacacacagattgtgctcacagtaggcggagcgtggcatacagcatgagcccaggaagcagcccaaacacctcctggaccacagccatctggctctggggcgggctgcctcgggggtagtgcatcaacacaggcgcctcttctaccgagggcgggtacatttctccatccagggaactggtacttgagtttcccatccttaaagagccgcagttgatactgacgctccagattgtctccataaatgtggccgaggtctaccccatggcccaaggccttggtgaagccaggac

SEQ ID NO: 682046 - DNA, 111 bp, Homo sapiens
gggactccatcttaaaataatactaataataaagaaaaagaaaaagaaaaaaaatgaaattgccacagccactccaaccttcagcagccattacccttctgtcgtcttctc

SEQ ID NO: 682047 - DNA, 826 bp, Homo sapiens
ttggtgagctgttggtttgcgattgtgggttccgatagtggtcaggcgcgagggcccagccgagggcaccaaccggggggacttcctggcccgccgttcttgggaccgcacggagctgggaggacgtgtactatcccctgattcgtcctgtccttgatacgatcgcgacgtcttcagagaggtgacagctagcaagaccggatcgatagcgagacacgcgatcgatgtggagcatgtcataggagctggcgcgttcgtgtgcgctgccggctatgagggggctggccgccaacgaggcgcggtcgcggtgcagccggtgggtgttgtgcgcgcgtgctttgtctaggggaggaacttgtcaagggcgagcgacagcgtgtgtccaagcgggtcccacggcgtggagagcgctgcgcgcgcccattgtggggtgtccttggccacggacgcgccttgccttggcccgggtgccgacactgtggggttggaccgtgttcgaaagcgggtgcagctcctgaggaagacctgttcgcggcaatggggctcccacgagaagcgcctgtgttaccagaaatgggcgagggccccacggcctcgtgttgggaaaattcccattgccccattgggagccgtggggggagaattctgttagcggccgtgggttgacagttgtatgccgctttgtaggccggctggcgatatatgcgctcctcctcttccagtgtgcacatggcattgagggaaaccaccctttccctctgctaatcataccgcttaatgggggcaatatctgtacccattggtggcgcggcataaggaaccctat

SEQ ID NO: 682048 - DNA, 436 bp, Homo sapiens
agtatatgaagtctccaacttttctggggaaatattcagtgtactgaaatttacctgcatttaaaatcattataaaccaaaaaacacgtcaaatagcattatcgtattattattttttgtttgtttgttttgagacagagtcttgctcctgtcccccaggctggagtgcagtggcatgacctcagctccctgcaacctccgcctcccgggttcaagtgattctcctgcctcagcctccaaagtagctgagattacaggcacctgccaccatgcccagctaatttttttcgtatttgtagtagagatggggtttcaccatgttgaccaggttggtctcgaactcctcacctcaggtgatccacccgccttagcctcccaaagtgctgggattacaggcgtgagctcccacaccctgccagattattaacattttaaa

SEQ ID NO: 682049 - DNA, 232 bp, Homo sapiens
gaaagaactatacacagacacattacagcgaaactgaaaaagacaaaggatttcaaaatgttctagagaggaaaagaaatcaaacggcaacagaacttcccccaaagtaacatcagagataagaaaacaaggtagtaatattctcaaaaggttaaggggaaactatttaaaaccaaaatcattactcaaactaagctatgggtgatactaagctatcagctatacctgaggg

SEQ ID NO: 682050 - DNA, 469 bp, Homo sapiens
  misc_feature (8)..(8): n is a, c, g, or t
  misc_feature (17)..(17): n is a, c, g, or t
  misc_feature (42)..(42): n is a, c, g, or t
  misc_feature (85)..(85): n is a, c, g, or t
  misc_feature (199)..(199): n is a, c, g, or t
  misc_feature (282)..(282): n is a, c, g, or t
  misc_feature (338)..(338): n is a, c, g, or t
  misc_feature (428)..(428): n is a, c, g, or t
  misc_feature (441)..(441): n is a, c, g, or t
aaactgtnatccctatnaccccaaatttggacgggccttttnacccaactcaaaaactgatgaaaactagagtaaaatagccctnaatcaagtggacctatttatgaaatttctcccctaaacattgattccctcaccctattgagggagcccaggactgtaccggcccagtcttcaaaaggcagttaatgggcccagntcagtagcacatgcctgtaatcccaacattttgggaggccaaggtgggaggatcacctgaggtcagaagttcgacaccaggcnctgcaacatggccaaaccccatctctactaaaaaaaaaaaaaatttagccgggcantgtggcacgcacctgtagtcgcagctacttgggaggctgcacatgagaatctcttgaacctgggaggcagaggtcgtaatcagccaaaanttgccactgcacntccaaccagggcaatagagccagacctt

SEQ ID NO: 682051 - DNA, 288 bp, Homo sapiens
tatgtatattgctaaaagaaatgaaaacatatgtccacacaaaatctcgtagaaatatgttcatagcagcatcattcagagtagccaaaaagtaaaaacacacaaatgtccatcaactgatgaatcaataaacaaatgtggtctatctatacaatgaagtattattcagcaatacaaaagaatgaagtactgatacatcctcaacttggacggccctagaaaacattcagtggaagaagccaatcacaaaagagatatcacatgattccaggggtggccgtatatatt

SEQ ID NO: 682052 - DNA, 143 bp, Homo sapiens
tcttgaggatacccacagacggaggtgtaccgctggaccagcacagaggaggtggccgctggacagcacagacggaggtggacagcaggcggttgctagggcactggggtgggccccatctcctgtccttccctctgtgctgt

SEQ ID NO: 682053 - DNA, 400 bp, Homo sapiens
  misc_feature (13)..(13): n is a, c, g, or t
  misc_feature (88)..(88): n is a, c, g, or t
  misc_feature (94)..(94): n is a, c, g, or t
agctcggttctcncttttggggtctttgctcttttggggtctttgctcttttggggtctttgctcttttggggtctttgctcttttgnggtctntgctcttttggggcattgctcttttggggtctatgctactatggggtctttgatcaaatgggatcttagctctattaaggtcttcgctctaagcagacactttaagaggaaacttcattattagatcaggtagattactaccaagtgatgtgacatttagcaagaacggcagatattaagaacacgtacatagcgtttaatttccatcatttccttgatttcaggcaagatcatgaatcacagcacattgctaattcaacattcttaaagatctagaatggaagggcaggcagagacaccataatc

SEQ ID NO: 682054 - DNA, 328 bp, Homo sapiens
  misc_feature (13)..(13): n is a, c, g, or t
agctcggttctcncttttggggtctttgctcttttggggtctttgctcttttggggtctttgctcttttggggtctttgctcagccgggcccatccggtaaggctaaatactcccatgagaccgatagtgaacgagtactgtgaaggaaaggtgaaaagcactccgcgcggagagtgaaatagttcctgaaaccatgcgcctacaagcggtcggagcaaagtaatttgtgacggcgtgccttttgcataatgaacctacgagttaccatgtctggcaaggataagtgattcagtcacgcatccatagtgaaagcaaagaccccaaaag

SEQ ID NO: 682055 - DNA, 427 bp, Homo sapiens
gcccaaacctatgacgtagcaatgcgccataggggttgtaggaccacgacattgtattaagtcaatcgagaagaatattctggaaagaataaccatagagggtgatagtcctgtactcgaagtgcgacttagcatagtggtatcctgagtaccgcggaacacgtgtaattctgcgcgaatcagccgggcccatccggtaaggctaaatactcccatgagaccgatagtgaacgagtactgtgaaggaaaggtgaaaagcactccgcgcggagagtgaaatagttcctgaaaccatgcgcctacaagcggtcggagcaaagtaatttgtgacggcgtgccttttgcataatgaacctacgagttaccatgtctggcaaggataagtgattcagtcacgcatccatagtgaaagcaaagaccccaaaag

SEQ ID NO: 682056 - DNA, 212 bp, Homo sapiens
cggacgtccagctgagatctcctaggcgccgaaaaaaaaaaattttattggaaataaaaaattttcaatcatacacgtaatatcctttaactttttgtgttcgtttcttgtttcagtaagtgttagtgttcgtcaaatatcaaactgtataagaagatctaggacacacatccgtgttgtaggttaaaataccctgactctgacatgtcata

SEQ ID NO: 682057 - DNA, 169 bp, Homo sapiens
  misc_feature (13)..(13): n is a, c, g, or t
agctcggttctcncttttggggtctttgctcttttggggtctttgctcttttggggtctttgctcttttggggtctttgctcaaagtgcacaggaggtggcagcagggtcaggcaagttcctgttcactttgagcaaagaccccaaaagagcaaagacccaaaaggagc

SEQ ID NO: 682058 - DNA, 139 bp, Homo sapiens
catttaaggggtggcctggccttcggggtccccacgctcctttgcaaagtccactgtgggtgccatcatggtttccgggacctgggccaacgggaacgtgggggccctgggtgtgtttatataaagtcggcatttctca

SEQ ID NO: 682059 - DNA, 317 bp, Homo sapiens
ggggtttctttggggtttttttaggcccccaattttgggggccccccccccccccagggggttttttcccccaaaagggggggccctggggggggggaccgggggggggggccccttaaaaaaccccctttttgcccccccctgttggggttttttttttttggcccggggggggggccccccccctccccccccccgggggggggggggcccttttgggggtttggggggggggttttggggagtttttccccttgcgggggttttccctggggggcccccttttttcttttttatttttttttttctccccccca

SEQ ID NO: 682060 - DNA, 205 bp, Homo sapiens
gcacagaatgaagaacccagaaatagagctgtacacctacagccatctgagctatcaacaaagttggtcaaaaaatacacaatggagaaaggactccctattcaataaatggtgctagggtagctggctagccatatgcagaagaatgaaaccagactcctatctttcaccatataaaaatgactattggtggcatcgataaaca

SEQ ID NO: 682061 - DNA, 860 bp, Homo sapiens
gctagtaagcctggttaatcggccgagggcgacctccgtgacgcggcccgctgctgctcctcgggctgctgctgctcggctccggccggccgcggcgccggccagagccccccgtgctgcccatccgttctgagaaggagccgctgcccgttcggggagccggcaggctgcaccttcggcgggaaggtctatgccttggacgagacgtggcaccccggacctaggggagccattcggggtgattgctgctgctgtgctgtgctgcctgcgatggcgcctcaagtgtgggtctgcctgtaccatgggtgccctggcaagggtcatgctgcaagaacatcaaaccagagtgcccaacccctggcctgtgtggcatgcctgcgccagctgccgggacactgctgccagacctgcccccaggatgcgcagcagttcggagcggcatgccgagctggcctgtccttcgagtatccgcgggaccctggagcatcgcagttatagctgacctgcggggatgccatggctgctgaggacgcgggcccgtggtgactggccacacggacttcgtggctgctgctgacagggccgaggtcgcaggctggtggcacgatgcccgagtctcgctgctgcgctctagcctccgcttctctatctcctacagggcggtgtgaccgccctaccagtgatcctgttctcagactccaattggcatgtgtcctgtttgagcaccctgcagcccccacccaagatggcctggtctgtggggtgtggctgggcagttgcctcggttgtctctgcggctccttagggagaacagctgcttgtggccttgtgacctcactcaccctcaggggaggctcggg

SEQ ID NO: 682062 - DNA, 126 bp, Homo sapiens
atacagcaagcccccactgaccccgcagatggcccggtgtaggggaacttccctcatttctctctgcaatctgaaaataactcctccattgaaataactcctccccaccccaataacaacaaatag

SEQ ID NO: 682063 - DNA, 147 bp, Homo sapiens
ctcctcgaaaggttgtcagctccatcttgccgatcaccgagcgcaacgtggtctgcgcgagctgcgtgatcgcgatgatgtagttggagtgagtcatagctcgtctcgtagttgataggtcacctggaagtacaagatgccgtccac

SEQ ID NO: 682064 - DNA, 193 bp, Homo sapiens
ctcggctcactgctcctcgccgcccaggtccaaatatgctgtgccttagcctcccaagtagctgggattacaagcctgtgccaccacacctggctcattttagtattttgttttggtagagacggggtttcgccatgttggtcaggcaggtctcgaactcctggcctcatagagtagttgcgatgattgaatg

SEQ ID NO: 682065 - DNA, 366 bp, Homo sapiens
cctactgacctgagtcgacaccacctgagtttaagctgaaggaagattttgtggtaaggttgttagaaggagcatttgtgatatataatgattggtgatggcctggatgtggctttgtatgaatcgaaaaactaaacggaagacacaaggtccgaataagagaaggagaaaaacaggtattaatggactatgaattgggaggacccgtgacatccaattagagagtgcccaagggggttcagcataattacttgcttggttggcaagttttcgggctctattcttgacagagaccttttttttaagttggaggctgaactgagtgaggtatgattttaaaagaccattattccgttttacctttcc

SEQ ID NO: 682066 - DNA, 227 bp, Homo sapiens
ccagaatgattggaagtgccctgttttgcctgagcattcacatgtgtccagtaaccagctgtatggcctccagagggtacatgcggagagcctcatgcaaaggccaggacccttctatcctccctcgacctcctcctccaaatctatcctccaccgccacttcatattatcattacaccaatctggactgacatgcttatcgaaaaccacccccagattgtccgcca

SEQ ID NO: 682067 - DNA, 836 bp, Homo sapiens
agcggggggggcgcggctcgcggggtggccgaaggagcaggtgggcgacgctcgcaggggcgcgggagggtgccgctgggaccgtcatcaggagcctggggttctgccagctttcggagggatcagcgacctcttcgccctgcgggtgacagtggggcatctgcctgcgagagggggaacggagcggagaagccaggatcgacacacaaatgttctcctcatctaggaggacaggaggaggtgaaggagggaggagcccgtgttgatactaacttggagctgcagaaaaccttggggcggcgttcaaggcacccctcgccaaaaagaggcgcagagcagagcggccatgatcctaccttacagctgcgtggcgtcgacagcgacggggacgaaagaaagccagtccaataccggcgctgggagagctggaaaagacccagcgagagcaagaagaaagggcaggaccgcgagacgaaacacagagacaagacacgaataaacacacgcaatccgaagcgaagcgcacaattaggagacaaaggcgggaaaaaaaggtggcaataagagaagaaaaagaaaggaatacggaccaaacattgagaaaaacggccaaaacaacaaagtcaacattacaaaagaggaagacgcaagaccatacccacaaagatcaacaaaaggagacagacagacctaacactaccacagcgaaaacgcacccagtagacagagcaggacaacacaagcacgagaaaagaccagaaaggacgggaaagacaaagagaagcagagagggaaaaccaaaaagaaacgagaaaacaaggacaaagagagagaac

SEQ ID NO: 682068 - DNA, 292 bp, Homo sapiens
  misc_feature (147)..(147): n is a, c, g, or t
  misc_feature (277)..(277): n is a, c, g, or t
ttcaccgtgttagccaggacggtctcgatctcctgaccttgtgatctgcccacctcggcctcccaaagtgctggtattacaggcgtgagcaccgcgcccggccaccattcactaattttcaagaaatgtggaagtgttctatatttncttcccactccatagctccaacattgttggctattatgaatttggctattaagtgatgccaacaatatttaatgaaaaaaagatatagcagtatagttgaaggaggaagctgaaagaaaacggtccatcngtgaggaaaaggccc

SEQ ID NO: 682069 - DNA, 130 bp, Homo sapiens
  misc_feature (39)..(39): n is a, c, g, or t
  misc_feature (124)..(124): n is a, c, g, or t
gtgccacagaagatgtaagatcgagaagtagctttaagnagttaaagatagagcaacttattaggagacaacacaaaaggtaactgtaaaataaaatctatgcttctctgtctgagaattactntgcatt

SEQ ID NO: 682070 - DNA, 111 bp, Homo sapiens
aagattgcaccatgtgcagtctgcctgggtgacagagctagactctgtctcaaaaacagaaaaacaaaaaaacaagtttccagtggcttctcagtgctctgagaataaact

SEQ ID NO: 682071 - DNA, 269 bp, Homo sapiens
  misc_feature (193)..(194): n is a, c, g, or t
ggcaactgcttactttcattgtcagagtagagtcacttctgtaatattcaacaagcttaagatttgtcttgctagaatagtgagactatactagtgtctcgtcaatttgacagacgtatatcgttgctcaggttattacgccatacgtagtgatttggcaacctttctttatcttctatcccgttccttgatnncaaagagaggtagaagaatctataagggtgagaatgaggctgaacctcacgaaatagttcttaatgaccacaata

SEQ ID NO: 682072 - DNA, 272 bp, Homo sapiens
gtggaaaatgacggttataagaccatttatttctttggagaaaaaactattccaggtggcaatgaccatgagatcttcacagaccccagaaccatgggctactccgtgacagcgcctttaggccacggggcaggatctttgaactgctgttctcctaacgtgggagccggaggggcggggtcccggcttacaagccagcatagggaattcggtggccaaaagccgagggtcctcccacacgtgctaacccacccgcagcctaggcagggtct

SEQ ID NO: 682073 - DNA, 634 bp, Homo sapiens
tgggggggaaaaaaaaaggtggttttttttttggggggaaaatggggggggagggggggggaaatttttttttgaaaaacccggggtttggttttaaaacccgaagaatgtgtgttacgtcgtcatagcacggaggcaaaaagcgaggaagcgctcgcgcatcaggagagggaaaaacaccccctcgactgcttttagacgccggcttgccgggggagggagaacatctgcggggggacagagggttcttgttggatcagcagagaacacgagggggtatcaactgtgagggaggggggtgcgggggttctggggggggcgagcaccagcggtggccagggatcctcatcgtcgggattagagagcaaccccgggagggggggtgcgcggggacaaggagaagaagcagcagaaaaaaagcaaacatatttcagagtgagagaaaaagggccccctcccgtcgtcctaaagaagagggggtccccggggaagggttgttcttccacaagaaagaagctgccgttgtcgtcgtgaaggggggctagctcaggaaaccttcttcttatcgagttggtggtgtcaaacgtgttgataatacacaccaatctcgggggggcgtggttattgccgtcag

SEQ ID NO: 682074 - DNA, 404 bp, Homo sapiens
ggtccccggaaattcggccattatggccggaaattaaaaattccgccattttaggttttttattggccaacccaaccaaaattttaggttttaactttaaggggaaggttttttttttaagttgatctaaaattgaaggcaaattttctaatgtggaaatatttggttattattttaccggggggctttccaaggttttaaggcctaaggttcttttgttgcgttaatgtaggttgcccaggacctttaactaattggtaatggggcctaaaactttttgaaggtttaccttttaaatggccccgacgatttaaattttacaggtaaccatgggttaatcctggggcttccggaattttacagccaattttgaggataatgattccattgggttaaactaagcc

SEQ ID NO: 682075 - DNA, 2571 bp, Homo sapiens
cccagtccagcctccctactcagggccgagggcaccaggaggatggtcgttgcaaaagaatatgggaggccgggtgcggcggctcacgcctgtaatcccagtacttctgggaggccaaggggggcggatgacttgaggccgtgcaacacctgccagcaccagcatttgacacggaatcgaagaaaacaggcaggacataccctgactacactagtacaagtcatcggcgtctcggggtcctgggttttagaaatcacactgtcagggagggctgatggggtcctgggttggaggctggaagtggaggaatcgaggcataggcagaaacttgaaggaagggtcagccgagctggccagaagggggctcctcgccacggtccccagggaagcactttgctcatgggccccggccctgagagaggagctcctgcctcttcccactcggagagggctgacaggagaggcttggcctggtgtttcctgatgagatagcgggcacgttccgggaagcggtgagcaggcccagcagacatcagatgtggtgcttcctgtctcctgtgaatgcgcctggcccttgaggggggtctgggatggagagtcgggggaggggaaccccactcgcccttctccttgttgttcttggcagctggacttgggcaattgtgcctccaccctctggaggggcctccccctgtgctggctgcagatcagaggggcgatggggagggatccaccggtccaggcgggggctcaccttccagacccgggcgtgggcgagaggggtgcatgggaggacgcccgatgcctcagggcccccggtcagcagcgaggcacagactctcctctgggcggtgatggccctgcacgaggtccgtgtgccgtctgcctgcacagggagaggaaaggatcacgcgaccatgggtacgttggccacctgaaggttgagtcccgcagcctagagactggagcgtggggaccaggaggagcttcttagcggaactgggctggggctcatgcagccctccaggagcccccgacgcgacgccctggctcatcccgggtgaagaggctgctgagtctgaactgatgacagtggacgggtggccgccggttcccaacgcatggttgggcctggaacccaggtgactctgggagatgtggtcacagtcacagccgtctgtgggcctttgggttcaaaacagcgcgagtcacaggagacagaagggaatctgagcttgcgattgctcattcttgtcaccctcctggctctgggacacctctgccatctcctaccaagggtaccccattcctggcgagttggaaagtggcctcatgggcagaaaacgagggcaaagggagctgcgtgctgtgagagacgtccccgcacccaccctccccaccagctcccttgggcctttcctccctcccagccccacccacagccgggtggctcccttcactgtctctcctgggtttaactcagaggctggcgagcaggggctgaccagtgtgtgtcggagactctccgagtggccagcacgggcagggagctcataggcttggccctgagaccaggtcctgtctgagaaggaggcaggtcctgtctgagaagaaggacccccacccctcctgcctgggaccctgccttaggctcactctaatgacctaatttcaatttgattgaatgcaaatctgaatttgctagaagacctgatttcatctttccgggttcagtaaacatgacattctccgtgggggtttatttgtggaactcccagtcggagctgctgccccagcccagcagggctcagcgacgtgcactggttttaggagtaaatccgaagcaacagaagcgttcgcactggctctgggtgcagcctgcatcttcagccctggggcactgatgctgggcagcttctcggcttcactcgggaagggactcaggagcgaggtggtggggaagccagcagcttggctgaggcggcagtggaggtggtccagctccgcgactgctcccacagagcagggctgccgctcggtcagtgtgcagagtgcagccgcttggggccaacttgccatcatatgtataaccacttttaatgacatgctaattaggggacgggttattcagatatagctggaggatgggcagttgcttccaggtgttgccaaggcagtgagagcaacgggaactgcccttggcgcctcttccagctttggcctgtctttggtcgggtccggggaccaggcttgcctaccacgttttctgtgtcaaaacagtcacgcagaaataaacagtgacagcactgtgatgagaaaagcgaagaaacaacttatttcaactttctgacttttgttgtggcctcagcacttttgtttgtgcttaacattgaaaacagtgaggcagtgtaaactgtgagatgtgatttttcatttggtaagtgcaaattttagttcattcatgaaaccaattttgaagatctttaaaatagaatttagtcgaccttaagaattgttaattgtttacaactaaagaccaaaaatccaagagaataaagcgttgcaccagtg

SEQ ID NO: 682076 - DNA, 2664 bp, Homo sapiens
  misc_feature (2639)..(2639): n is a, c, g, or t
  misc_feature (2644)..(2644): n is a, c, g, or t
  misc_feature (2646)..(2646): n is a, c, g, or t
cccagtccagcctccctactcagggccgagggcaccaggaggatggtcgttgcaaaagaatatgggaggccgggtgcggcggctcacgcctgtaatcccagtacttctgggaggccaaggggggcggatgacttgaggccgtgcaacacctgccagcaccagcatttgacacggaatcgaagaaaacaggcaggacataccctgactacactagtacaagtcatcggcgtctcggggtcctgggttttagaaatcacactgtcagggagggctgatggggtcctgggttggaggctggaagtggaggaatcgaggcataggcagaaacttgaaggaagggtcagccgagctggccagaagggggctcctcgccacggtccccagggaagcactttgctcatgggccccggccctgagagaggagctcctgcctcttcccactcggagagggctgacaggagaggcttggcctggtgtttcctgatgagatagcgggcacgttccgggaagcggtgagcaggcccagcagacatcagatgtggtgcttcctgtctcctgtgaatgcgcctggcccttgaggggggtctgggatggagagtcgggggaggggaaccccactcgcccttctccttgttgttcttggcagctggacttgggcaattgtgcctccaccctctggaggggcctccccctgtgctggctgcagatcagaggggcgatggggagggatccaccggtccaggcgggggctcaccttccagacccgggcgtgggcgagaggggtgcatgggaggacgcccgatgcctcagggcccccggtcagcagcgaggcacagactctcctctgggcggtgatggccctgcacgaggtccgtgtgccgtctgcctgcacagggagaggaaaggatcacgcgaccatgggtacgttggccacctgaaggttgagtcccgcagcctagagactggagcgtggggaccaggaggagcttcttagcggaactgggctggggctcatgcagccctccaggagcccccgacgcgacgccctggctcatcccgggtgaagaggctgctgagtctgaactgatgacagtggacgggtggccgccggttcccaacgcatggttgggcctggaacccaggtgactctgggagatgtggtcacagtcacagccgtctgtgggcctttgggttcaaaacagcgcgagtcacaggagacagaagggaatctgagcttgcgattgctcattcttgtcaccctcctggctctgggacacctctgccatctcctaccaagggtaccccattcctggcgagttggaaagtggcctcatgggcagaaaacgagggcaaagggagctgcgtgctgtgagagacgtccccgcacccaccctccccaccagctcccttgggcctttcctccctcccagccccacccacagccgggtggctcccttcactgtctctcctgggtttaactcagaggctggcgagcaggggctgaccagtgtgtgtcggagactctccgagtggccagcacgggcagggagctcataggcttggccctgagaccaggtcctgtctgagaaggaggcaggtcctgtctgagaagaaggacccccacccctcctgcctgggaccctgccttaggctcactctaatgacctaatttcaatttgattgaatgcaaatctgaatttgctagaagacctgatttcatctttccgggttcagtaaacatgacattctccgtgggggtttatttgtggaactcccagtcggagctgctgccccagcccagcagggctcagcgacgtgcactggttttaggagtaaatccgaagcaacagaagcgttcgcactggctctgggtgcagcctgcatcttcagccctggggcactgatgctgggcagcttctcggcttcactcgggaagggactcaggagcgaggtggtggggaagccagcagcttggctgaggcggcagtggaggtggtccagctccgcgactgctcccacagagcagggctgccgctcggtcagtgtgcagagtgcagccgcttggggccaacttgccatcatatgtataaccacttttaatgacatgctaattaggggacgggttattcagatatagctggaggatgggcagttgcttccaggtgttgccaaggcagtgagagcaacgggaactgcccttggcgcctcttccagctttggcctgtctttggtcgggtccggggaccaggcttgcctaccacgttttctgtgtcaaaacagtcacgcagaaataaacagtgacagcactgtgatgagaaaagcgaagaaacaacttatttcaactttctgacttttgttgtggcctcagcacttttgtttgtgcttaacattgaaaacagtgaggcagtgtaaactgtgagatgtgatttttcatttggtaagtgcaaattttagttcattcatgaaaccaattttgaagatctttaaaatagaatttagtcgaccttaagaattgttaattgtttacaactaaagaccaaaaatccaagagaataaagcgttgcaccagtggtaggggtttgtagttgcctaaattgtaccttttacagatgtttcattttattaaaactcactagtcnctggntnttctattcaaaaaaaaaa

SEQ ID NO: 682077 - DNA, 451 bp, Homo sapiens
catctcaacctctgctgggataggaacagaatgatggcctcagcagagacaccgcaacaaggaggcagcagcaacaaggtcaccacctcctcaaggaaagccacaagggacatcccaaacaggagagcatcccccctcctcctcaaggaaggccacaaggaccaccccaacagggaggcccatccccgtcctcctcgaggaaggccacaaggacaacccaacagggacggcatcagcaaggtcctcccccagctcctcctggaaagccccagggaccacctccccaagggcgccgcccacaaggacctccacaggggcagtctcctcagtaatctaggatacactgacaggaagtgaataagaagatgacagtgtttcaaatgccttgaaacataatgtgatcatgctctaacttcaatataccaataaaataatcagattgcggagttag

SEQ ID NO: 682078 - DNA, 142 bp, Homo sapiens
cctgaatggtgctgacagggacacactcctcttccagctcctggtgattcacggccttccttggctctgcgtggagtttcacatggccttttccctcttctattttgtctcttacaagaacacctgtcagttgcatttacgg

SEQ ID NO: 682079 - DNA, 168 bp, Homo sapiens
tggagcctcccaggcatgcagaacggagagtccggtaaacacctgttctttataaattaaccaatctcagggatttcttcctaggcgtgtgagaatgggctaattacacccttgggagtcactagaaccctgggtatgccccagacccttctattgtttttttccctc

SEQ ID NO: 682080 - DNA, 103 bp, Homo sapiens
caaagagggccagccctgagaagcttaccttaaatatttctttccttctctcatggaagtccgattaaagccaccccttctccttatcctgttcaactgggct

SEQ ID NO: 682081 - DNA, 566 bp, Homo sapiens
gtgagtatgcgcagtagtcgtctcttgcggtgcgttggtggttctcacaccttttaggtctgttctcgtcttccgtcgccgactctctctttttcgcttgctgccactgaagatcctggtgtcgccatggtgcgacgccccgtccgttggtgagtcttgactccgtgtacttgcatcctgtcgtgggcaagacgtagcgagggtaacagaagctgccgtatggccgtctgaaacatacaaattgtggggtggcatgccgtcccccgctgcgttggccctgatcttggtgaactgaccctatgttattacacctcccgggcatattctatttagtcgtgcgattacttactgtactgttccattcggatcccgtgatcggtgtggaagtcgacgtgttccctcgtatctctgccgtgtgtcctgcgaaggctcatccgcattttctgggcgctagataccgctcttggggccatattgtgtgcgttcatcgtgtctgtatttccgggcgagcgtgcctgctgtgcggttgtcaggatcgtgagggggcagtccgggaacaaatgggt

SEQ ID NO: 682082 - DNA, 117 bp, Homo sapiens
agggagggaagcttctcctcctcttggggcaacggtctgggctgaggctctgagctgggaaggtcaacgtcccctcctcaggttccttcagtcccagctccattggagcctcatgta

SEQ ID NO: 682083 - DNA, 248 bp, Homo sapiens
gaagcaccgtaaaggcgctgcgcgttgccgcccggttgggattttcgctgagcggccacggctacatcaagggcatcgtcaagggacatcattcacgacccggggccgcggcgggcccttcgccaaggttggtcttcccgggattcctattcggttaaggaggcggaccgaacctgtcaattcccgccagggccattacacacggcccatttgtgtgtatgcgcggcaggaggccccatctcaacatg

SEQ ID NO: 682084 - DNA, 973 bp, Homo sapiens
aggagctggaacacagccaggacacagacgcggatgatggggccttgcagtaaggcagtcctgacatggagcaatggcgaccagcaggtgaagggcatcgtgcgccaggcctcgagcggggcacccaaactctggatgccagcccccgcagcgggttaccagagtgcaaatgcatgggcgagaatggcagcctcatctcgcacaatgcattccagccaggtgccagtgttctctgcaggtggagttactgcctactccttccccatgagccctccctgtctgcactgccaggccagagggtagagcacaggtgtttccccatatactccccctccccaggaacactcccaggctgggtttggtgctaatacggttggcggggggccacagggaaggggacccctgacaactaaaagagatgaatctcaaaaaaaaaacaacaacaaaaacaaacgagaacaaaatacggtttgccgccgcagcatacgcgccccacaaaaagcacttaaagacaacatcaagatggggcacacagcgggcacaaatatagcagcaacgcaaacacgggcgcaagacagggaccaggaaaaacgggggaagacaagagagcgggacaccccaccaacaataacatcaggccgcggggacacggcgcgttggacaccaccacaagggaggctagagaggcaacaagaggcatagacacacgaggacaacaacgaaacggaataaaaacgccacgcggcggaacaaacaaactgaagcagaaataacgaaccatccatgaaacacgcgcaaaccggcacaacgcaatacctgctcacacagacgagctgacagcaacaaacgacgagcaacgcccacgagaactacccatagatcgccgaccagcagacacacagcacgaagccgcgcatcacgacagcataccacaagctaggagacgaaccgaccacagtcatgatagccgata

SEQ ID NO: 682085 - DNA, 211 bp, Homo sapiens
  misc_feature (103)..(103): n is a, c, g, or t
cagtcaaactattattaggggggggggggggggtctcaatcaatctaaatcgattcgttattctgaatccatgctaaatcgtagctatcggactgagcttgantggtcacactacgtgatactagctgatgctactgatacgtcagactagctctcatacgtactgatgccgtaagctaatcggctagctaggtcgacgtagagtctcgca

SEQ ID NO: 682086 - DNA, 748 bp, Homo sapiens
ggggatcaaaagtgggaggtggatggttcttattctggaggagaagaagggcgggaagaacttccgtttcaggaggaagctggaacttactgactgtaagaggttagaggtggaccgagaaggacttttacgcagtatttcaggtggcacttcccaagattgtcctgttgccggtgtggtctgtgcctagattttaggacagataagatgactgccatgtgatgttgcaggcttaatttgtgtttgttcgtttcctttcgatatcgcagtataatctctgataatcgacaggacgagcccaagaacccatgtgctctcccgagtaacacggatggctgtcttggtcattgccatcctacattttgggactcctttcagactcaacacagttcccttgctcagtgaccaaaatggtggcctactggctggtctagcagacagtggtacttagcaaagaccactgtttccatagtgaccagctgatacctcttctgccctctagtgtgacaattgggtgttgcctcagtttcgctcccagctcagtctttattagatcaaagctgttgttgcgcaccagagtggccacttcaatcaccagccaacatgcttgctttgtccaccagaggtgcaagttcacctctctggtgctgtagttcccagctccttcctgattttgctaatcgctccttgtggggaacaggaagtgatcttcgccatggtggacggaaatgccgtacctcagtagtta

SEQ ID NO: 682087 - DNA, 129 bp, Homo sapiens
gtttacctggtcgcaagtcggggttgctgtaaagttgcgtaggtagaagtagaggttacggagggatgatggtggctatgctggtggggatgatgaggctatagttttttgtgaattcttcgataatgg

SEQ ID NO: 682088 - DNA, 253 bp, Homo sapiens
tcagacgctgaactatgttgcatttgctatgtaatccctgcccatggtggccgcagctaatcagaatcagatggaaaattaaaccgggtaatctgcttctaagccttaagaatattccctgtggacacatgacactataatgtggaagtgctgagctctgggtgcagagaggatcagtgtgactcttctgcaacacaagtttgtcccctcagcctcacatatgttcacgcgtctgactgggtacccgagctcg

SEQ ID NO: 682089 - DNA, 1012 bp, Homo sapiens
  misc_feature (241)..(241): n is a, c, g, or t
agcgggtggtgaggcctacagaacgcggccttcagctggaccttggtctccccgccggacttcgagggtgtctatcgtccgcccctggttggcggcgtgagcgccggcgcggtctggcctgtactgccttcagcagtgcagagagaaaagaccccttgtatacgcatgtaaccaaggaacacgctgtgctcgttttcacttggctccaccggagccaattgcgacgatccctcttagcacncgagcatgagagtgcgccccagaggagttctattgcccacacgacaagacatacgacctatgacaccgaagaggcgatcagaacagaggacagtatggagtgtgcgtttagtatgactgacgtatgactaccatgcgatgctaccattgcaagtgaaccatcgtggtgccttcagaagtcttttatttccgcgtcaaagggtacctttcaagtgtcacacaactaggaggagatgagagaatagaagaagacgctaggtaattccaggctactgtaattaactttgccttcatcagtgtttgcttcagagttatgaggaagatgttggatcgttaaactaacatgcatgactccagatttcacggacctcgactggattgtggatcctgacattgttgctagctcttgatgatcgatttcgactttgatgactccagataatctgcttgaggatgacttgtattcttcaggccaaataaggcaacaggaggaggaacgagggcaatggatatccagaacattctgagaatgaccgatttacggcgagtgggaagattgtggattgatgagcaagggagatagccattgatgactagtgaattctggcaggccttataggtccagattgaacactgtatttgtcctgggcccccggaaaaacttccagaactatagccgaattcactgtgttctggagttaggaaacaacagaagtgctttccgggattatcgctgaaattcctcaatcatgagaaaatgaacgtggaccta

SEQ ID NO: 682090 - DNA, 358 bp, Homo sapiens
cggtttcacgtatacctgcagcgcctcactgtccaccacgtcagctaggtattcctcctccagattgaggatgtgctcgattgcttcctccacattctctgggagccccgctcacatgtgacgcacgtttgggagtctgggtgctccgactctgtgcgtaagcgaactgtccaaccttgtaattcagtccactgtattattgcgacctggccttctgccgacgggccacctactgactccgtgcgcgatcacaccgccgatgtgtccgagcgcgcgactgtcctactctaacccaatgcttccacgtgggagcaccaaggcggacccacccttctactcaggactgtccatcatgacc

SEQ ID NO: 682091 - DNA, 303 bp, Homo sapiens
ccgggcttcattggaaaaaaacagtttagtgtaaccgactaaaacatgatgaggccaggcgtggtggctcatatctgtaatgccgacactttgggaggccgaggcgggcagatcacttgaggtcaggagtttgagaccagcctggtccaacatggtgatgccctgtgtctactagaaatacaaaaattagccaggcatggtggcgcatgcctatagttccagctactctggaggctgaggcaggagaattgcttgaaccaacagaagggaaataaattgtggcatactcattacactctgtgg

SEQ ID NO: 682092 - DNA, 1769 bp, Homo sapiens
  misc_feature (149)..(149): n is a, c, g, or t
  misc_feature (1250)..(1250): n is a, c, g, or t
  misc_feature (1253)..(1253): n is a, c, g, or t
  misc_feature (1263)..(1263): n is a, c, g, or t
  misc_feature (1293)..(1293): n is a, c, g, or t
atcctgcccttgctccaaaactgtcagtggtggtttcccatgaccacgccacagtcccagggtctcccctggccttcaaggctggcacagtctgaccctgccaacgtccctagtgccaccatctgtcagcccctccttgctcctgctcntggtctgcacatgctgttctctttgccaagaatgccatttccccagccccctggttccgatggggaacacctcctcatccttcaaagccaagctggaagggaacatctttggagatgccgcttgacctcccaggcagaaggggtcattctccctggagatgtggtcacgtcattaaccacactgggttagaatcatcagaagctgttcctgcctcttccgtcaagcaaggggctctggaggccagaaaatgcctatgaatcatgcccacacccccagagcccagcatggggcgggctcaggttaggtcaatcgtgtttgaagactgaataaatgaatgtcttcatttgctaccctcagaagcccagtccggaaaaaaattccagtgcaaggtttttggcttgaatgagatcccaagaatcaccttcaggttgtcaggaaaatgatacagggaagggaaggagccaacaaagggtatgggaatgagcacataacactatggacagctggggaaccttgggcgatgatgcagaactgtttatcactaactctcaccaggtcagttgtgcatcaaggctactcgggggatagcactttacagcctactctagcaccacggtggccttctggggcaggggccagcaggctgcagctgctggatgaagcccccaggcagagtcgctggtcctcaggtgctcaagcttagctggaagccttcaggttgctgtgcaatggaatagtgagtacccagaggatatgtgcgtgtgttacagtgagtgagtgaatgaacgaatgaatggagaatcaagaaaagagccgcgtatcttcagtcattgagcagacacgggccttctgctgtgtggccctggacgagccatcatgcctctctgaccctggtttcctcttctataaagcaggaatgctagcccagcctcccaggagataaagggtgggaggtcccagagagtgagaagggttccactgggctcccagactcaatctcagctccaggaagcaggacatggccccagtgagggttctctgtgggtgaagaagccacagaaggcaggcacagtgccctggttggaaccacaggggccccnaancaaccacatnatggccaccacagcctccaccatcccacancaatttccgctgctgcctctcccagggcaagatctcccaccagtggctggctgtcccctctgccagcacctgccccgggtgggccctgcagcatggccatggctgctgcaaggcaggctggcagctgctcctgtgtgcagcagcgtgtctgctttgaaaagccacagagactcctgtggttaggggctcatgttacagtagcacacgttcgaatcccagttctactacttgtgactgtgggaaagtaatttcaccccagtcctctctggtctcattgatcaaatggaactaacattctattgtcccctctggtggtctcaactccagcagtttgtgagatggttgccttcactgttttccctactgcaaaacccataaggacacagttatcttgcctcctgccccaaccccagggtcttgaacacagtaagtgctcgataaatgcttggtaaatacatgaattattgtctgaaaaa

SEQ ID NO: 682093 - DNA, 555 bp, Homo sapiens
  misc_feature (262)..(262): n is a, c, g, or t
  misc_feature (330)..(330): n is a, c, g, or t
  misc_feature (398)..(398): n is a, c, g, or t
  misc_feature (404)..(404): n is a, c, g, or t
  misc_feature (409)..(409): n is a, c, g, or t
gaagctgttatagtagctgtgtaggaagaaagagagcaccagtgagaggccctgctacagatggagcaagagcaaatcatctttaagtacctcttcttcaaaggctcagaaattaaattaagtattctttgtggtcacgaaggggaaagaacattgcttataaagagaccagaagtggtatccaccatggcttctaccctataattctctgtaaaaatcatctgtactgtgtccaggaccagccactgttgcagcatgagtncccagcagcagaagcagccctgcatcccaccccctcagcttcagcagcagcaggtgaaacagccttcnagcctccacctcaggaaccatgcatccccaaaaccaagagccctgccacccaagtcctgagcctcacnccaaantgccngagcctgcagccaagttccagaccatgaaccaaaggtgcttgagccctgcccttcaatagtcactccagcaccagcccagcagaaagacgagcagaagtaatgtggtcacagccatgcccttggggagccggcaccagatgctgat

SEQ ID NO: 682094 - DNA, 953 bp, Homo sapiens
  misc_feature (149)..(149): n is a, c, g, or t
atcctgcccttgctccaaaactgtcagtggtggtttcccatgaccacgccacagtcccagggtctcccctggccttcaaggctggcacagtctgaccctgccaacgtccctagtgccaccatctgtcagcccctccttgctcctgctcntggtctgcacatgctgttctctttgccaagaatgccatttccccagccccctggttccgatggggaacacctcctcatccttcaaagccaagctggaagggaacatctttggagatgccgcttgacctcccaggcagaaggggtcattctccctggagatgtggtcacgtcattaaccacactgggttagaatcatcagaagctgttcctgcctcttccgtcaagcaaggggctctggaggccagaaaatgcctatgaatcatgcccacacccccagagcccagcatggggcgggctcaggttaggtcaatcgtgtttgaagactgaataaatgaatgtcttcatttgctaccctcagaagcccagtccggaaaaaaattccagtgcaaggtttttggcttgaatgagatcccaagaatcaccttcaggttgtcaggaaaatgatacagggaagggaaggagccaacaaagggtatgggaatgagcacataacactatggacagctggggaaccttgggcgatgatgcagaactgtttatcactaactctcaccaggtcagttgtgcatcaaggctactcgggggatagcactttacagcctactctagcaccacggtggccttctggggcaggggccagcaggctgcagctgctggatgaagcccccaggcagagtcgctggtcctcaggtgctcaagcttagctggaagccttcaggttgctgtgcaatggaatagtgagtacccagaggatatgtgcgtgtgttacagtgagtgagtgaatgaacgaatgaatggagaatc

SEQ ID NO: 682095 - DNA, 250 bp, Homo sapiens
  misc_feature (104)..(104): n is a, c, g, or t
  misc_feature (107)..(107): n is a, c, g, or t
  misc_feature (109)..(110): n is a, c, g, or t
  misc_feature (113)..(113): n is a, c, g, or t
aaaccagtaattgttactgggttgcaggatacaactgttcttcagacagtgttgctaaatttgcagttaaggctactggagaacccgaccaactgccatctggnccncnnganggaaaggccattacacaaggaggtaaatataaactctcctgaagacaagggagggttcttcttagaaattcataagactgatacttctgacagtggactttatacttgtacagtaaaaattcagctggatctgtgtc

SEQ ID NO: 682096 - DNA, 781 bp, Homo sapiens
gggtcctaggggtgcttccgtggtcggcggctgctggggctccgcgccggggtccgagtcccacgaagccccgggccgagccgccggatgcccgcgcgcagaggggcccagtttgccgagggatggggcaaagagaagcagcgaccagctagagcagggtcagccacagagctcgtccgacgcagcccaggcaacctgcggagcggccactacagctctgtccagatgcagacccaggcacctggccccagggagcgctgcattgggaccgcccaaccaactcccgggcccatataccgcacgtgtctactattctcaagcccataagggccgaccattatccgagtgggggttggaggttcttcggaccgagctcgggagatcggccacctggcccaggggcaattatctgggacagggtcctaggctccgcgcggaattgtcctaatgggagcagaaacctccggagggccagcaatcaggtgggcaggaccggatggtcgactagccctggggggcccacgaagggatttgaacgcccagtccacatctaccaccggggggtggggccgggaagagagacgccacacggaagagaccggaggagcactgttacacttgagagtccgggggaggaaccacgtgttacggcggttacctctgcatttgagcgggcatggtaccattcgtggatcgtgaacgattacttcgaggcaggggggacacagggggactaggcagaactggctgcacaaggaccgggagcgccgggaggcgacgg

SEQ ID NO: 682097 - DNA, 626 bp, Homo sapiens
gtcgatctaaggatcctgtacaggtatatttgcccacgttgcttaggatttgtctcatactcctgtggattatgcaggtaccgtccatctcgtgcttccaaagtgctggattaccgggatgaaccactgtgcccatctcactagcgtaatatctgtattctatgtagacagggtttcaccatgtggcccaggatggccctctgcattcgaaagattttattttttgaaacgaagtctcactctgtcacccaggctggagtgcggtggcacgatctcagctcactgcaaccttacctcccaggttcaagggattctcctgtgtcagcctcccaagtagctgggattacagacgtgcaccaccacgcccggctaatttttgtattttaagtaaagacggggtttcgccacgttggccaggctggtctcgaactcctgacttcaggtgatccacccgccttggcctcccaaagtgctaggattacaggcgtgagccaccgcgcccggccaaacatttgttttatattggaaatattttcttcgaattttccactttatagacctcactttgtgtgtgtgtcatcttagaaaggttttctctctatttctacattctatgttcagattca

SEQ ID NO: 682098 - DNA, 598 bp, Homo sapiens
  misc_feature (16)..(16): n is a, c, g, or t
  misc_feature (72)..(72): n is a, c, g, or t
  misc_feature (126)..(126): n is a, c, g, or t
  misc_feature (175)..(175): n is a, c, g, or t
  misc_feature (209)..(209): n is a, c, g, or t
  misc_feature (225)..(225): n is a, c, g, or t
  misc_feature (229)..(229): n is a, c, g, or t
  misc_feature (249)..(249): n is a, c, g, or t
  misc_feature (321)..(321): n is a, c, g, or t
  misc_feature (332)..(332): n is a, c, g, or t
  misc_feature (338)..(338): n is a, c, g, or t
  misc_feature (357)..(357): n is a, c, g, or t
  misc_feature (369)..(369): n is a, c, g, or t
  misc_feature (375)..(375): n is a, c, g, or t
  misc_feature (380)..(381): n is a, c, g, or t
  misc_feature (414)..(414): n is a, c, g, or t
  misc_feature (424)..(424): n is a, c, g, or t
  misc_feature (427)..(427): n is a, c, g, or t
  misc_feature (501)..(501): n is a, c, g, or t
  misc_feature (517)..(517): n is a, c, g, or t
  misc_feature (531)..(531): n is a, c, g, or t
  misc_feature (534)..(534): n is a, c, g, or t
  misc_feature (573)..(573): n is a, c, g, or t
acagggggctgcagtnctagtaccctgtcggggaggactgagggatggtgagtttggtctccggagggggcnccagtcctggtgcccagttctgacacctgcccctcctgagttcacactggagtncttgcagtcctgaaaccacaaggcctgcctgaaccctgggtcaggaganaaacacttggggaggggaaaggacggcgtgggcnacccatgacggctctnagtncttcctggggcttgtgtctntccttggcagaagagggcacagccaaggcaaggaggggctgaaggctgcggggccatcccggcctgccaganccatgcccctnactccncagcttcaaaatcaggggnctcaggacagangatgcngggtnnggctcagagctcatcaggggggctgtgtgtganaggggatgcnttntggatgccctcatcctcctcggggctggggtctccctcaaggccacccagctccttcctttgtttgctgccgcnactcctgccgcctgcngccttggccctgcngcncttcttcttggacttcttccctcccagggcagctgtttnttccttcttgccggaccactgctct

SEQ ID NO: 682099 - DNA, 136 bp, Homo sapiens
tgctggggttacaggcgtgagccaccgcacctggttatgttatttctcttctcttctcttctcgatctcgtctcgtctcgatctctcttttttttgagacagatactcactgtattgccaggttgtagtgcagtgg

SEQ ID NO: 682100 - DNA, 412 bp, Homo sapiens
cgtgaatatccattgaatggttccatcctgccatcgctatactaacatctgcgtccagagcttcacaaaattacaaatctttttcatctctaggccttttttaaattgttatctcaataccactgttttcacaccaagaccaccataacagccttagcattatgcatttgcaacttgcgtacctccctgatgtttcccgtcccctctctccctttacagaagcaattacttgggccaggcacagtggctcacctattaatttatttattttgagacagagtctcactccatcacccgggctggagcgcaatagtgtgatctcgacttattgcaacctctgcctcccaaagtgctgggatcacactactacagccggctgaatatctttatatctaggtccttgtaaagctgt

SEQ ID NO: 682101 - DNA, 170 bp, Homo sapiens
attatgttgccaaatgcaaacctgatctacatattgtagtgaacctgtaattaaggtaacaattatgtaaaatcaccacatctggaagtctatgacacaggaaactctcacaaccacactggttacagggccttggtacgttgatgcacaactatactttacacctcacg

SEQ ID NO: 682102 - DNA, 164 bp, Homo sapiens
ctgtaccaagtaggaattctcaccactactcaataacagaaataagtgcctacagctaacttgcgagtactggctgtgctgttcatcatcctaaatcacatgggcatggtctacattacatccatttggacttctggactaagccaccaaacaccccttttctc

SEQ ID NO: 682103 - DNA, 264 bp, Homo sapiens
gatctggaacattgtgtatacttactgattagagcatcacaaaatccaagagattcagagccggtgatgctgtgtcccatgaccctgataatcgcatcattttggaggactacaagtgagcagactagcgttgagcacaagggtttgagaataggccatgcctgatctggtacccccatctgtaccaacatgccaccgttagccatgcttggtggtcgctgtgcctctggctccctgctattctgtatggggaatctcggacgc

SEQ ID NO: 682104 - DNA, 272 bp, Homo sapiens
gtacgttagcctgggcactacagttagagagacctgtctctcaaaacaaaaatcaaaagttacatttacacagttttagaacaacagtgtacataccttaatttaaaaatattttattgctagaaaacgctaacaatagcggctgggtccagtggctcacgcctgtaatcccagcagtttgggaggtcaaggtgggtggatcacctgaggtcagaagttcgagaccagcctagccaacgtggtgaaacgcgtgtctattaaaaatacaaaaa

SEQ ID NO: 682105 - DNA, 379 bp, Homo sapiens
ctgagttcgcggcggcgtcgacggcgatgcctatgagcccaggtagtcaggaggctgacgcataagacttgcgtgaacccgggacgtggaggttgcagtgagccaagatcacgccattgtactccagcttggcagatactcccgctgtctcagaaatagagtagataaataggccaggcacagtggctcacgcctgtaatcccagcaccttgggagggtgaggcgggtggatcacttgaggtcaggagttggagaccagcctggccgacaggtgaaaccccatctctactaaaaatacaaaaagtagccgggcgtggtggcgcatgctggtaattccagctactcgggaggctgtggcaggagaatcgtttgaacacgg

SEQ ID NO: 682106 - DNA, 2220 bp, Homo sapiens
  misc_feature (1053)..(1053): n is a, c, g, or t
tgctgagtgtattattgtaaagatcgaagtgaaggatcgcgaacgtagagcattgagagttattagtactaggcatgacgacgtagagttgcagattacttgtagtacacaatcggctaggcaggatatgcatgcgctcgctcgggaaggtgccgtatgtgaatatcactatcgcacgaccgacgcgccggcaagccgctatagcatacgaatctcgatgcgacatatagtcattcgagatcgctcgatgcgctatgtcggtgcgcacgcgtcgcgctggctaagcgccaagcgagcgttcattgggctgtccatcgcttgagctcgttgtgtctcggtctcttgcgcatacgcttagctgacccggatacgacacgccgtctcgttacacgcatcgaactctagccgatagagccaagttctagagtggacctatcctaatcggtcttctgcgacctatcctagtcgatctgtagaccaccagaacctgacaacggttattggctaacctcggtgcgcagggcaacgaactttatagactgcaactagttttcaaatgctttcgattcacttaccgtttgctttggttctcagccataatggacgtaactgcatctaatccgcactactggtgaaaatatatagactctaacagctgcccaccagggcacgcattaggcagcatttaggtaattaaaaaggcgccttaagttagcacgcccgcacagtggggaataacacacgtgaagccaacgcatgtgggcccaaccgaaaagggacgaggatacgaccgactacaccacaaaagcgagcgagcgaagagtacgcacacacacacaaaagaaagcgcataggcaatatgtgaatatacccctgtgcgtgtgtcataacaacaactctgcccacaccaatcagcgtagacgccaacagcatgtgaaagccgccacggtataagcctctactcaccaccatcatgaaacataacggatgtcactgttcataggacaactactatgggctcccgcaggacatcatcgcaaaggttgaccgcanactatgtagatcacagagcgaatatagacacaccctacacagatacaagtttactgcacaacacagtaacacattatccaagcatcgggcatcagaaaaacagagcctcgatcctgctacaaggcagtcacactggcacccatccgataatgcagcgtcgataccatatcaccatacaacgcacccagcgcattagggacagccctctcacctatcactcgtcgaatataactcacactcgacacccgcaagatccatcttatagatcgatcgtcaccagtctaccagtacgaacccacaaaacctcttgttagattacaacgtagactactggacactccgcctataaacgattataaatgaatgcccactgattgatcccatttcgtaaccgctcagaccaacctcatgaacagcaaatctaagtgataccagataaaaagctccctcaccacaagagtctcagtcacacagaccacctagttctgtcgctcgacactcacctccccccctgctctagtttctgatacaccgcaatgtatccgctcgtctggctctcaccagaatcatcacatacccgacagcagcacttgccctatacttcgcccacagatatcacagacgtacccgtaccctactgaagacctacctatcaggatcgtctcacattatcaagcgacgtcacgaagacaaccatcggagcccgctacgcgttatataacaacaccaatcatatttagtgcatcgactataacacgaacacaccctcattggcacacaccagccgcatctataagcattcacctgaacaacatcccaagcgaaatcatgatacaaaacgaatcatcctctgcccatgcctctactgtcactcgcttccgacctcacctgctaggtcagtgcacaccacatcaagacgcaaacaaacactagatcatagtccatccgcatactctcaagtgtgtcgcacgacctgtacacgacaaaagcgagatcatgaccgcatcactagagttacaaactagttcgaagaagccagtagcgaacacacactagactattgtcaacggcaccaggcgccagcagccatagtacgcacacatcgcgtacatcccgccagcgattaaacttcatagaccatatgaccatactagaccagcaactaca

SEQ ID NO: 682107 - DNA, 233 bp, Homo sapiens
catcaagaagtggaagactgcccttgatgagcagtagctgaatgtgtaggtgtaaacaaggaatgctctgtgtcgtcacagatgaatgagggcgtgatgggaattcctaatgcagggaaatcgcctgattcacagacagtaccataaatgcagatgaatgtctcataacgaattaggctgggttgctgacatagtaatatagatacagtaggtaactatcattaggttgcaga

SEQ ID NO: 682108 - DNA, 346 bp, Homo sapiens
  misc_feature (30)..(30): n is a, c, g, or t
  misc_feature (75)..(75): n is a, c, g, or t
cccttcgattacggctgcgagaagacgacngaagggacttgaagagggaaggtaaataactgggcgagatgggtntggtggctcacacctgtaatcccagcagggaggctgaggtggccagatcccaaggtcagaagatcgagaccatcctggtaacatggtgaaaccccatctctactaaaaatacaaaaaaaaaattagccgggggtggtggcgggtacctgtagtcctagctacttgggaggctgaggcaggagaatggcgtgaacctgggaggtggagcttgcagtgagccaagatcgtgccactgcactccagcctgggcgacagagcaagactccgtctc

SEQ ID NO: 682109 - DNA, 502 bp, Homo sapiens
  misc_feature (207)..(207): n is a, c, g, or t
  misc_feature (274)..(274): n is a, c, g, or t
  misc_feature (356)..(356): n is a, c, g, or t
  misc_feature (361)..(361): n is a, c, g, or t
  misc_feature (401)..(401): n is a, c, g, or t
  misc_feature (473)..(473): n is a, c, g, or t
tgagaccatcccctggtgacagaatgacccgtttgatggaatccctcgttgcaagagaaactccccaggcatctcggaacgaaactaattagttccagtgtgaactgcccaaggggacaccctttatcaacttactaaggtggaccactgtagtcgcgcttgctgagacaccagtggtggtaagcgtgtgggaaacagatgatgtgncgtctaaggagagagaggtcttacggaagtgtcgtgtcggtcatgactctcttctattagttgggtnacagtgccctcatgggtgtctctgtgtgtacaaagagcccagagccactactctgtgtcttttcgaggtggatgattgtganatccnctactgtccgctcacctctgacctgcgccgggttcaactntctgtccccctgatgtccaccatgcacacagaacctccgtgtgtctatttctctgttcctctgtggctgacncaatagacttttccctctgaaaaaaaaaa

SEQ ID NO: 682110 - DNA, 410 bp, Homo sapiens
  misc_feature (36)..(36): n is a, c, g, or t
  misc_feature (126)..(126): n is a, c, g, or t
ggatgtcagtgctacctccacaaacagagtgctacntctagtgctactccacaaacagagtgtacctccacaaacagaaacgatccatttatgacaagggtcactgaatgaacaccagtcactgtnctgtcacaatcacaccagcgagcttaagagttaggaaagaatgaggtcggtgcagcggctcatgcctgtaatcccagcactttgggaggccgaagtgggtgaatcacgaggtcaggagttcaagaccagcctgggtaacatggcaaaacctgtctctactagaaatacacaaattagccactgtgtggtggcacacacctgtaattccagctagtatgggagtcagggaggatagaatcgcttgaaactgtctggggtaacgagctcccaatttcctactcctg

SEQ ID NO: 682111 - DNA, 297 bp, Homo sapiens
  misc_feature (29)..(29): n is a, c, g, or t
  misc_feature (45)..(46): n is a, c, g, or t
  misc_feature (123)..(124): n is a, c, g, or t
  misc_feature (234)..(234): n is a, c, g, or t
  misc_feature (249)..(249): n is a, c, g, or t
aggaggtgatgaaagtttcgccatgttgncaggctggtctcgaanncctgacctcaggtggtctgcctgccttgccctcccagggtgctgggattgcaggtgtgagccaccgtgcccagctgnntttatataagcatccagggaaaagtcagccagcacactcaggaagtcattgtcactcagggctttgtgagtcaccccagtaagccaggcctcatagaattaaagtggccnaggaaaggtgaacgnatgttgcactgggaggtagaaccccagggtctggatcctggttctgcc

SEQ ID NO: 682112 - DNA, 301 bp, Homo sapiens
  misc_feature (127)..(127): n is a, c, g, or t
gagacggatccgctctctcgcctaggctggagtgcagtggtgtgatctcgctgcaactccgcctcccgggttcacgccactctcctgcctcagcctcccgagtagctgggaccacaggcgacacacncacgtctggccaatccttcgtatcttcagtagagacggggtttcaccgtgccagccaggatggtcccgatctcctgaccttgtgatccgactgccacctacttctgcaaccctcatcccacctagtgttaagtgtttcggatatgacagggtatatatattcctgaaagtcgac

SEQ ID NO: 682113 - DNA, 319 bp, Homo sapiens
aatctaaaatatttagtagctttgaagatttctgggcttttagggccttttctattttgtttccattttattttttgccaggcattttccatggagggcagggtatccattctttaccatgggtgtacctgctataggttaacaaatcataccaaggcctcatacttccccaaggttttttcaactagttttcgcccggattccttttgatttggaagggggcggacggggggaagcacggccaggggttttaacctttggggccaaaccccaaataatttggtttccaaccctgatacccgtgttcaacacaatcctt

SEQ ID NO: 682114 - DNA, 288 bp, Homo sapiens
gtcagcctctccaagcctggattttcttacctattaaatgggagtaataatacctacttaaaaattctgatgtgagtattaaatgagttcagggatataatctgtaaagtacctggcatgtgataggaattcagtaaatgttctccctctccagagcttttagtcttgtatttaaaatgagtttctattctcaacttggcactaatgagaccatatttgggattgaaagtctgttgctttgagatcacaaagaaaatttaaaacaagcctattagaaataaattttac

SEQ ID NO: 682115 - DNA, 1185 bp, Homo sapiens
gtcagatgctcagctcacaattactctacagctcagaacaccaactgctgaggctgccttgggaagaggatgatcctaaacaaagctctgctgctgggggccctcgctctgaccaccgtgatgagcccctgtggaggtgaagacattgtggctgaccacgttgcctcttgtggtgtaaacttgtaccagttttacggtccctctggccagtacacccatgaatttgatggagatgagcagttctacgtggacctggagaggaaggagactgcctggcggtggcctgagttcagcaaatttggaggttttgacccgcagggtgcactgagaaacatggctgtggcaaaacacaacttgaacatcatgattaaacgctacaactctaccgctgctaccaatgaggttcctgaggtcacagtgttttccaagtctcccgtgacactgggtcagcccaacaccctcatttgtcttgtggacaacatctttcctcctgtggtcaacatcacatggctgagcaatgggcagtcagtcacagaaggtgtttctgagaccagcttcctctccaagagtgatcattccttcttcaagatcagttacctcaccttcctcccttctgctgatgagatttatgactgcaaggtggagcactggggcctggaccagcctcttctgaaacactgggagcctgagattccagcccctatgtcagagctcacagagactgtggtctgtgccctggggttgtctgtgggcctcgtgggcattgtggtgggcactgtcttcatcatccaaggcctgcgttcagttggtgcttccagacaccaagggccattgtgaatcccatcctggaagggaaggtgcatcgccatctacaggagcagaagaatggacttgctaaatgacctagcactattctctggcccgatttatcatatcccttttctcctccaaatatttctcctctcaccttttctctgggacttaagctgctatatcccctcagagctcacaaatgcctttacattctttccctgacctcctgattttttttttcttttctcaaatgttacctacaaagacatgcctggggtaagccacccggctacctaattcctcagtaacctccatctaaaatctccaaggaagcaataaattccttttatgagatcaaaaaaaataatttca

SEQ ID NO: 682116 - DNA, 986 bp, Homo sapiens
gtcagatgctcagctcacaattactctacagctcagaacaccaactgctgaggctgccttgggaagaggatgatcctaaacaaagctctgctgctgggggccctcgctctgaccaccgtgatgagcccctgtggaggtgaagacattgtggctgaccacgttgcctcttgtggtgtaaacttgtaccagttttacggtccctctggccagtacacccatgaatttgatggagatgagcagttctacgtggacctggagaggaaggagactgcctggcggtggcctgagttcagcaaatttggaggttttgacccgcagggtgcactgagaaacatggctgtggcaaaacacaacttgaacatcatgattaaacgctacaactctaccgctgctaccaatgaggttcctgaggtcacagtgttttccaagtctcccgtgacactgggtcagcccaacaccctcatttgtcttgtggacaacatctttcctcctgtggtcaacatcacatggctgagcaatgggcagtcagtcacagaaggtgtttctgagaccagcttcctctccaagagtgatcattccttcttcaagatcagttacctcaccttcctcccttctgctgatgagatttatgactgcaaggtggagcactggggcctggaccagcctcttctgaaacactggggtaaggatgagtttcatcatttttggattctttcttgtctgtcaagttcagaacttcctgccttttactcctatatccaaaaactttgttttccacacttcatgggtttcttttctgtctctcttttttttggaagaataagcaaaaaaagcagaagatttattgagaaatgaaagtacacctctacaggatgggagtgggcctgccattcatggttttctaatggacgaacttccattcttctcctaagctggggctgagtcttggagagccaaattttacccatccatccaaaagtgccctg

SEQ ID NO: 682117 - DNA, 164 bp, Homo sapiens
gcggccgcctactactactactactgctcgaattcaagcttctaacgatgtacggggacatgcctggggtaagccacccggctacctaattcctcagtaacctccatctaaaatctccaaggaagcaataaattccttttatgagatcaaaaaaaataatttca

SEQ ID NO: 682118 - DNA, 1131 bp, Homo sapiens
gtcagatgctcagctcacaattactctacagctcagaacaccaactgctgaggctgccttgggaagaggatgatcctaaacaaagctctgctgctgggggccctcgctctgaccaccgtgatgagcccctgtggaggtgaagacattgtggctgaccacgttgcctcttgtggtgtaaacttgtaccagttttacggtccctctggccagtacacccatgaatttgatggagatgagcagttctacgtggacctggagaggaaggagactgcctggcggtggcctgagttcagcaaatttggaggttttgacccgcagggtgcactgagaaacatggctgtggctgaggttcctgaggtcacagtgttttccaagtctcccgtgacactgggtcagcccaacaccctcatttgtcttgtggacaacatctttcctcctgtggtcaacatcacatggctgagcaatgggcagtcagtcacagaaggtgtttctgagaccagcttcctctccaagagtgatcattccttcttcaagatcagttacctcaccttcctcccttctgctgatgagatttatgactgcaaggtggagcactggggcctggaccagcctcttctgaaacactgggagcctgagattccagcccctatgtcagagctcacagagactgtggtctgtgccctggggttgtctgtgggcctcgtgggcattgtggtgggcactgtcttcatcatccaaggcctgcgttcagttggtgcttccagacaccaagggccattgtgaatcccatcctggaagggaaggtgcatcgccatctacaggagcagaagaatggacttgctaaatgacctagcactattctctggcccgatttatcatatcccttttctcctccaaatatttctcctctcaccttttctctgggacttaagctgctatatcccctcagagctcacaaatgcctttacattctttccctgacctcctgattttttttttcttttctcaaatgttacctacaaagacatgcctggggtaagccacccggctacctaattcctcagtaacctccatctaaaatctccaaggaagcaataaattccttttatgagatcaaaaaaaataatttca

SEQ ID NO: 682119 - DNA, 313 bp, Homo sapiens
aattattaacgtaggaaacatgtatctagggggatggcaggaaaggttattgcgatatggctaaagtaagaatgaatgtagccttagaaaagtaagggcacgaaggtataggtgagttcggagggagaaagctagtggagtaggtgtatgactttggggcagttgatagacaagcacaaggaggagaggtcgtgctgtctcagatatcctagaatgctcacatgcttcaggacacacctgctcccctctctgggaagttgtaatgaccatgatgaagtttgtgaaagattcacaaacgctctattagggtaca

SEQ ID NO: 682120 - DNA, 1353 bp, Homo sapiens
  misc_feature (986)..(986): n is a, c, g, or t
  misc_feature (989)..(989): n is a, c, g, or t
  misc_feature (1001)..(1001): n is a, c, g, or t
gtcagatgctcagctcacaattactctacagctcagaacaccaactgctgaggctgccttgggaagaggatgatcctaaacaaagctctgctgctgggggccctcgctctgaccaccgtgatgagcccctgtggaggtgaagacattgtggctgaccacgttgcctcttgtggtgtaaacttgtaccagttttacggtccctctggccagtacacccatgaatttgatggagatgagcagttctacgtggacctggagaggaaggagactgcctggcggtggcctgagttcagcaaatttggaggttttgacccgcagggtgcactgagaaacatggctgtggcaaaacacaacttgaacatcatgattaaacgctacaactctaccgctgctaccaatgaggttcctgaggtcacagtgttttccaagtctcccgtgacactgggtcagcccaacaccctcatttgtcttgtggacaacatctttcctcctgtggtcaacatcacatggctgagcaatgggcagtcagtcacagaaggtgtttctgagaccagcttcctctccaagagtgatcattccttcttcaagatcagttacctcaccttcctcccttctgctgatgagatttatgactgcaaggtggagcactggggcctggaccagcctcttctgaaacactgggagcctgagattccagcccctatgtcagagctcacagagactgtggtctgtgccctggggttgtctgtgggcctcgtgggcattgtggtgggcactgtcttcatcatccaaggcctgcgttcagttggtgcttccagacaccaagggccattgtgaatcccatcctggaagggaaaggtaagattgagactggttacagttgaagcggcagtatgaaaggaaggaaagtgggagggcgttgtggacatgaatgtggttgaaagttgtaggggaattgggaagtggcatgatgatgacacaggagnccnctcggacccatngatctcatgtctgccctgttgcaggtgcatcgccatctacaggagcagaagaatggacttgctaaatgacctagcactattctctggcccgatttatcatatcccttttctcctccaaatatttctcctctcaccttttctctgggacttaagctgctatatcccctcagagctcacaaatgcctttacattctttccctgacctcctgattttttttttcttttctcaaatgttacctacaaagacatgcctggggtaagccacccggctacctaattcctcagtaacctccatctaaaatctccaaggaagcaataaattccttttatgagatcaaaaaaaataatttca

SEQ ID NO: 682121 - DNA, 457 bp, Homo sapiens
  misc_feature (141)..(141): n is a, c, g, or t
  misc_feature (279)..(279): n is a, c, g, or t
aagatcggactctcatttattccttgtggaaaaagaaaaacacaaatcttaaaaactaatgcaagtcagggaagcctggaaagatacccagatttgataacagtgttagtaaggacaatccatggctaagggcatctcatntttctaggctttgatcgtggttgtcacgttgggtatggtacttgccgcaacgtgagtggtccacagcaaaggccaagctttcttgatatttctcgctcatcctagtacctctatttttcattgaagaatcctgcctgngaagtttaggtcaaagaggctgcttggagcaaaatacagtggtgtctcatcccaaatattctccaggcgtttcttccatccttccaggatttgaattcgggcgtctgctggagtgtgcccaatgctatatgtcagttgaggttctaagacttggaagccacagaaatgcagaatgcca

SEQ ID NO: 682122 - DNA, 1010 bp, Homo sapiens
gtcagatgctcagctcacaattactctacagctcagaacaccaactgctgaggctgccttgggaagaggatgatcctaaacaaagctctgctgctgggggccctcgctctgaccaccgtgatgagcccctgtggaggtgaagacattgtggctgaccacgttgcctcttgtggtgtaaacttgtaccagttttacggtccctctggccagtacacccatgaatttgatggagatgagcagttctacgtggacctggagaggaaggagactgcctggcggtggcctgagttcagcaaatttggaggttttgacccgcagggtgcactgagaaacatggctgtggcaaaacacaacttgaacatcatgattaaacgctacaactctaccgctgctaccaatgaggttcctgaggtcacagtgttttccaagtctcccgtgacactgggtcagcccaacaccctcatttgtcttgtggacaacatctttcctcctgtggtcaacatcacatggctgagcaatgggcagtcagtcacagaaggtgtttctgagaccagcttcctctccaagagtgatcattccttcttcaagatcagttacctcaccttcctcccttctgctgatgagatttatgactgcaaggtggagcactggggcctggaccagcctcttctgaaacactggggtgcatcgccatctacaggagcagaagaatggacttgctaaatgacctagcactattctctggcccgatttatcatatcccttttctcctccaaatatttctcctctcaccttttctctgggacttaagctgctatatcccctcagagctcacaaatgcctttacattctttccctgacctcctgattttttttttcttttctcaaatgttacctacaaagacatgcctggggtaagccacccggctacctaattcctcagtaacctccatctaaaatctccaaggaagcaataaattccttttatgagatcaaaaaaaataatttca

SEQ ID NO: 682123 - DNA, 865 bp, Homo sapiens
gtcagatgctcagctcacaattactctacagctcagaacaccaactgctgaggctgccttgggaagaggatgatcctaaacaaagctctgctgctgggggccctcgctctgaccaccgtgatgagcccctgtggaggtgaagacattgtggctgaccacgttgcctcttgtggtgtaaacttgtaccagttttacggtccctctggccagtacacccatgaatttgatggagatgagcagttctacgtggacctggagaggaaggagactgcctggcggtggcctgagttcagcaaatttggaggttttgacccgcagggtgcactgagaaacatggctgtggctgaggttcctgaggtcacagtgttttccaagtctcccgtgacactgggtcagcccaacaccctcatttgtcctggggttgtctgtgggcctcgtgggcattgtggtgggcactgtcttcatcatccaaggcctgcgttcagttggtgcttccagacaccaagggccattgtgaatcccatcctggaagggaaggtgcatcgccatctacaggagcagaagaatggacttgctaaatgacctagcactattctctggcccgatttatcatatcccttttctcctccaaatatttctcctctcaccttttctctgggacttaagctgctatatcccctcagagctcacaaatgcctttacattctttccctgacctcctgattttttttttcttttctcaaatgttacctacaaagacatgcctggggtaagccacccggctacctaattcctcagtaacctccatctaaaatctccaaggaagcaataaattccttttatgagatcaaaaaaaataatttca

SEQ ID NO: 682124 - DNA, 154 bp, Homo sapiens
  misc_feature (15)..(15): n is a, c, g, or t
  misc_feature (130)..(130): n is a, c, g, or t
agacttgagatagangaaaagaaggaggagagaaaactccggatgccttatgatgtaccagagccacgcaagttttaagcagactaccatagaagaaggaccaacgcatcaagcagttcgtgcccatgtntgacatgaagtggtataaaaagat

SEQ ID NO: 682125 - DNA, 783 bp, Homo sapiens
  misc_feature (14)..(14): n is a, c, g, or t
ttttgacccgcagnggcactgagaaacatggctgtggcaaaacacaacttgaacatcatgattaaacgctacaactctaccgctgctaccaatgaggttcctgaggtcacagtgttttccaagtctcccgtgacactgggtcagcccaacaccctcatttgtcttgtggaggtgaagacattgtggctgaccacgttgcctcttgtggtgtaaacttgtaccagttttacggtccctctggccagtacacccatgaatttgatggagatgagcagttctacgtggacctggagaggaaggagactgcctggcggtggcctgagttcagcaaatctggggttgtctgtgggcctcgtgggcattgtggtgggcactgtcttcatcatccaaggcctgcgttcagttggtgcttccagacaccaagggccattgtgaatcccatcctggaagggaaggtgcatcgccatctacaggagcagaagaatggacttgctaaatgacctagcactattctctggcccgatttatcatatcccttttctcctccaaatatttctcctctcaccttttctctgggacttaagctgctatatcccctcagagctcacaaatgcctttacattctttccctgacctcctgattttttttttcttttctcaaatgttacctacaaagacatgcctggggtaagccacccggctacctaattcctcagtaacctccatctaaaatctccaaggaagcaataaattccttttatgagatcaaaaaaaataatttca

SEQ ID NO: 682126 - DNA, 811 bp, Homo sapiens
ggcttccgctgggaggtcctccatgcgcagtcatgagtcgcttcaagttatcgatatgggtatcaaacttgactgaccctatgtcagaggaattataggggggttcaaaagcatcgagatgacttacaggatgtaatagggagagctgtcgagatttggtgtacaaaagtttatgattacaggtggaaatctacaagacagtaaagatgcacctgatttgtggcacaaacaaatggtatgtttttccagtacagttggatgtcatcctacaagatgtggtgaatttgaaaagaataacccctgatctttacttaaaaggagtgtgctaaaatctttgtggaaaacaataaaaggggaaagtgtggttggcaattaggagaattgcgggacttgatttgtgaccggaactgcagtttttgtcccaaaagatactcaatcaaatatttgtgaaaaaacagttttgaactgtcagaacaaaacaaaattaccaatgtttcttcattgtgtcgaaactcacatgctgaaattttttgacataatgaacaagaaatagagatcggggtgtagggggaagtggtgcattcaatttgagtggtaccaagggaagcaagcaagctgtttgattgactgtggatcttgatataaggatttacttggtttggtcactggaaaaatgacgctaattttgcaagtttgacgtcatcctaattgacaatatgttgagacagattccctctggtgtggagtcaaactgtaccttggtggtcaattttttaaaaggttctacaaaagaggggaagtgggctggtaa

SEQ ID NO: 682127 - DNA, 166 bp, Homo sapiens
gatggagtctcactcttaccatgctggagtcagtggcggatctcggctcactgcaacctctgcctcccgggttcaagtgattctcctgcctcagcttcccaagatgctgggattacaggcgtgagccaccacgcccggcagagactctatttcttaaaaacagcaa

SEQ ID NO: 682128 - DNA, 821 bp, Homo sapiens
acgatcagttgagcgcccgtgagatacgtggtgggtgcgccgtcgttgtacagcccgttgggcgggatattgtgaccgggtctgtggcctggggctagggcggccgttcttggcgcctctgcagtgtgctgtgcggcgcgtcgcctattccgccggtgtcggtgccctgccctgtgggtcatctgctcatgcgcggcggtaagtgtttcccccgggggcgccgcctgaactttgttcttgggtttctggtcgcccgggggctgtatcactgcgcttcacggtggtaggtgtctggccttcgcgacggagcgtctcgtgttgttcggtgtgccccgcttctaaccgagtgtgggccggtcgtgcatgttacgccccgcttcttgcgacggccgtgtgtttcagacgtcgtggtggccgccacgagatagtgtgctgggggacatttcgttcgacaagccttggccgctgagcgttggccggctgtgccccccctccgcttgaccctcccttctggggtggaactctcttttgtttggtatatatcaccactttgcctcggattcataaaacatctgtccctcacttacgcagagctccaacaacatatgaagtgactcacgcataaacctacgcctcttataacaatgtcgcgcccaaacacacttcggggtactacacaacccgcccacaactgtacacaaacaattgaaccctccactttacacccgagagacccaccccttccttgtcaaacaacctattccccccttttcctcctttcccccaccccccaatcctttccggggtttcccccacaaaaa

SEQ ID NO: 682129 - DNA, 220 bp, Homo sapiens
gtcggaccttccatctcctcccactcgcttaacttttatattttcagtagagacggagttcacatgctggccaggatggtcccaatctcctgacctcgtgatccacccacctcggctcccaaagtgctgggattacaggcgtgagccactgtgcctggccaataaattattttttgtagagttgaggtcttgccatgttgcctaggctagtggtcttgaa

SEQ ID NO: 682130 - DNA, 569 bp, Homo sapiens
  misc_feature (98)..(98): n is a, c, g, or t
ccatgagggatgaatggatgaatagacaatggagggatggatccatgatggatagatgggtggatgaatggatacaagatggattgatggatataganccatgatggagggatggataggtgataatgaatacccaaatgatggatggatggataggtgatacatgggtaaatgggtggagggattgatagatgatggatggatagatgatggatggatagatggccaaaaaatgaatggatatatgatggatggatggatggatgagtaaatggatggatggatggtaaagtgatagatatgggtagataaatatagagataggtatcgatagaaatgagggataaaatggggcccccaggtgaatgaggtgaggggtaaccagctgttcattgaattattctaaagacttttctgtaaaattgaagttttcaaaacaaaaagtggtggaaaaaagctaattcctatttcctagttttcccatagtttatcaaacttctaaaatggaaagaccgttcagaccttagaaagcccagagcaaccccccatttaaaaattaaagttatatt

SEQ ID NO: 682131 - DNA, 1264 bp, Homo sapiens
  misc_feature (1131)..(1131): n is a, c, g, or t
ggagagagagaactagtctcggtttatgtgtttttttttattctcattaaactttttaaatggggtctcaaaattctgtgacaaattttgggccaagtggttcccataaaaaagtcctgtatttaaaaactaatataactttaaaacgtgccacacgcaaaaaaaaaacccaaaggtggctccacaaaatcatttcctccttttcctttcgtgaaggttttacaagtgcattgtgttactcatttaaccagctctttaacatacataaacttaaagtggccaatttgaaccaaacagttctcgtgaaaccggttctttccaccactgtgatttaagaatgtgggggtggcaggatataggggcataactatctcatttatacccctctcgtgaaccttcgtgggcgagaactggggtgaccttgtcacagtctccagacagccattcatggctcacaacctgctcttgggattgaacacccccacgcgacacatgtgctcgtgctcctcaaatatctcacgaaaaccgagacaaaaagcggacccccaagaggggtggaaatacgctcgtggaaaaagagcctcttacaaaacaacaacaagtgggctttggcccgagggaaaccccagtatttcaccacaaagttggcaccagattattccacgccagaaattctcagagacaaattcttgagggcgcccaattatttacaccacggcgtatatctacaaccccagaaaaagcggggcgtaattccagaatatcattttctccccgtatcagaggccttacaaggcaaaaacaactgtgccatattgaccatttgtgtacaacacccgggtgtttggacaaaactcccaatcataaagagggggcgcaatacccccgcgccgctaaatagaggggccccggggaagtgcgctccagggaaataaactccaccttagaagccagagaaaaaacccccaggaatgacatcccccaaaatgaggggagacgggccacaaatatcatcaggcgtagtcaccccagagaaacaagtgcttgtccccagcgaatgagaaaacactccctttgcagcgagagccacagtttctgtgacccctttagacggccccacaatttttgctnccccagagaaaagaaacgtcttgtacctcacaaaaagcgccaacacgtgaggagcaatattcggagaccacaaatttttagcactctccccggtatgaaacacgtttgtacttagagccacaatggtgtaccc

SEQ ID NO: 682132 - DNA, 339 bp, Homo sapiens
cggcacgagggtcctgaaggctggctgccctttgagggcaagtgttactacttctccccaagcaccaagtcatgggatgaggcccggatgttctgccaggagaattactctcacttggtcatcatcaatagctttgctgagcacgtgagttcttcccactgaacctttgagaaccttcagggacagcctgcttctcttccaggatgcacacatccctcccttccctggatggcaagaaattagaattacttttcagttactaaaactttaacagcaagctcttcctaaggtagtatcatgcagaggttaagaagacatgctttgtttttgagttcaaaa

SEQ ID NO: 682133 - DNA, 501 bp, Homo sapiens
aaggatggtttatttattccactctgtaagatttgagtgaatttttcatgaaagccaaacagatctttgttttgcagaagagtatcttgtttctgaagatgccaagaaacaaatttgatcctaagagtggtcctttacgataagtgatgtatataagatgacttttttttttttttgagacagtttctcactctgtcacctaggctggagtgcagtggtgccatcagttcgctgcagcctcgacttcccaggcccaaatgatcctcctaccttagcctcccaagtaagctcggataacaggtgtcaccaccgtgccttgttttgttttgttttgttttttgtggaaatggggtctccctttggtcttgaattcctgggctcaagcgatcttcccgccttgcctcccaaagggctgggattacaggtgtgagccattatacctggccacaatgtgacattttaaaattcttatacataattagctttttatgtgttccaaat

SEQ ID NO: 682134 - DNA, 182 bp, Homo sapiens
  misc_feature (23)..(23): n is a, c, g, or t
cccccccggcaaaaaaacaaaangaaaaaccccccaaaaaaagtttttcccccccgttttagggttttaaccttttagcccaacccaaaaaaaggttttggttaattttttatccccttcccaaaaggggggttccaaatccccatattggcccggcggggttttaaaccctttttttgtga

SEQ ID NO: 682135 - DNA, 232 bp, Homo sapiens
  misc_feature (119)..(119): n is a, c, g, or t
tccctcaatcgacggtttctcaaactgagccgagaatagggtctgatagccagccagtttaaaagcagacacacacgaatgtagtatcgttgtgctgaaatgaccatttctgggttgtntagaaatccagaaatcatcacaacgccatgtggtatgaggaaagtataaatatcctcttggaatcttcttaacctatttttgcacaaaatggataggctgcattgaacagctc

SEQ ID NO: 682136 - DNA, 216 bp, Homo sapiens
ggatgatcagtacgcacagagcgtaagagagctctgtaagagatttgaattcatcacgtgaagttaaaagtcactggccgggtgccgtgagctcacgcctgtaatcctagcattttgggaggccgaggcgggcagatcacttgaggtcaggagttccagaccaacctggccaacatggtgaaaccccatctttactacaaatgcaaaaattagctg

SEQ ID NO: 682137 - DNA, 1010 bp, Homo sapiens
gcctcgtgccgaatgtttatcatgctcatatgatgatacatataccaaacgactagccttattcaaaaccaatttaaattctgcaaattgataagcaacataaaagtaggcaaaacgtaggaatgaatggaccaggatgcaacattcaaatagactgttttcggggctacgaacatcgtctaagactcaaaacagtgtctgtcacggatcggcaaaaaagtactgtcaggtaattttggtgtcaactgtaattagctgtagccctttgcacttcggtcttcctagggcagtcattacactgatgtgactactagaccctattactgtcccacacacagactggcgtggcttcaccactaactcagacaattcacttgctatcaccagtttctggacagcctggagatccaaaactcccacacagacaacatgagagggtcaggagttcacctctcaaacgcactgtgcaactgaagcgatctgattccatggcctctcacctagccttagcgagatgacgagacctctcattccccctgtctcttacacatctagtgaccgttgaactagctgttccacaatttacccacactatgcttagtaacgggatcaccaaggtcactaactaggcacttacggagcaccacacggcacgctagaccctacaataatacaaacactttgcattactctatcaggatataaaaggacgcccgtaattctacccaaacattcaatctgtccaccagttatcatggcaggagggaaacataggacagaacaataaaccctactaccatattacacccacattggagtacaatccagaaatagataccgacgcattgaagtcaccaacaacacaaaacacggcataaacctcgaatgataaacattcgcccaacaataccgagaaataagggtataagaccccaatcacaacgcacacacagcatcatcaaagaacacatgacacatagaacatcacaataaccgaaccacacctgtct

SEQ ID NO: 682138 - DNA, 404 bp, Homo sapiens
tcgggagcatttcaggtgtcagctccttgcacaccctcagtattccttctgaaaacagtcggatgcggcgccaggatccatcctccacgcgctgtagctcctctctctgccagggactcggtttgctccaccgtccctcgaatctgcccttcaggccgttccccgcgagaacagatgaatcgagcatccggagagacccctcgagctgggactttgggactgtgggacgttctttcacagtctgcagaggaatgcagctcaagtcagtgccttcttctgagaaactccctgtgcgcccttcctagtctaactccagacccccgccctctctcctgagcttcttttgtttctgttttgggccatttccgggatccctttttccccttgtggtctaaattccagcc

SEQ ID NO: 682139 - DNA, 118 bp, Homo sapiens
tgtacagcacagaggaggacgacaccgcagggattctcgcgagaagagggggctcaccagtctctggcccagctggggccaacctcagtgttgccaggcttctggtgccagcgccttc

SEQ ID NO: 682140 - DNA, 447 bp, Homo sapiens
tgtcgtgcactgtggaacaccctggatggtcgtggctggtacatatttgcacggcatgacatgacctgtctcacatgtctatgaagcataaatgaatccactgcttcactattatgggtcaatgagatgtaagagaatcacaaatggcttagaaccaggcctggcactgctgtgcttacttgtcgtgcgtagtggggagcacagatagctcactaccagctcacagcgttcgctatgtactgcctaacgacagaaggtagttatagatatcggtgttaacaggtcgttcgctctccgtctaatttagagttctctccaaaacttgggaactaaacttctcattgtgccttttatagttttaccatctgatcccacatagctcatattatagctaaggtaaatgttggggccaagaaattgccaattggttgaggtaatccgtgaggg

SEQ ID NO: 682141 - DNA, 434 bp, Homo sapiens
ctctcttggtcagttacaataattttgtcttccctgtccccatccccaatctctgccagcctctaatccatcctcctcactgcttgccatcgtgatctttctaaaacacaaatttgatcatgttcaaaaaaaaaaaaaaaagaaaggggatgaggcccggcacagtaactcatgcctgtaatcctagcactttgagaggctgagacgggtggatcacttgaggtcagaccagcctggccaatatggtgaaactccatctctactaaaaatacaaaattagctgggcgtggtggtgcatgcctgtaatcccagccactcaggaggctgaggcaggagaatcgcttgaacccgggaggcggaggttgtagtaagctgagatcgtgccattgtactccagccttccagcctgggcaacaagagcgaaactctgtctc

SEQ ID NO: 682142 - DNA, 426 bp, Homo sapiens
cccgggctgtaggaattctgcacgagaactcttctgtaccctctaacagacagacagacagagttagatgaccacacggaatgggctgtgtcctctaagagggcctgaaactattggataaatttttggaggaaggtaaaaaggtgtaccactcaaaaaccttcactgtgaactttggggacaccgaagaaggccagaaacagatcaacgattacctggagaaaggtactcaagggatggggatttggtcaaagagcttgacagaaacacaagttttggtctggtgaaatacatattcttttaaggcgaaagggagagaacctttgaagtccaggacaccgaggaagaagactttcacatggaccaagtgaccaccgtgaaagtggctataaagcggttaagcatgtgtaacattcacctgtggct

SEQ ID NO: 682143 - DNA, 170 bp, Homo sapiens
tcttagaggatccccggcattccccgcaagacgcctttgtagtcggcatggtcacgtgctcaccattcaacagcaatgcgaggatagacggcccgggctgcggacgggccctctagaaactgtgccctgccatgctgctctccggcacatctcccgtcttgcggggtctg

SEQ ID NO: 682144 - DNA, 346 bp, Homo sapiens
tctgagttcccaagcttctcaacgatctgttcctttagttacaggaaactggataatgaagatctccaccctggtctagatcagaggaatgacctaagtgagtcttattatagtgttgtaaattatttaaatatatgcttacatttatgattgaagactattttacaagtttgtctgtttctcataaactattttataccagaattatcattgcctgccaatttgtcttccatgtctgcttctcccactaaacctagagctccttgaggatcagaactatttatctatcatatatctttgtatcaccagtgtttcacatagtacctggccacacattgagaagctt

SEQ ID NO: 682145 - DNA, 731 bp, Homo sapiens
tgacatgcttggttgacgctgtgtatgttccttgccatgtgtccctatgtgcgcagcgtgccagggcttcgaccgtgctgtgagtgcacgtgcgagttcaccagactgggtgttctgccaatgggaatgctgaacctgacctgaagtggaggggctggctgtgaccttatccacgcgtgaaacatgatggtgcttgcatgctgtgtgggagtgccctcagtgcaatgctggactggatgatgctgggccactctgccgtgtgcctgggcctgatgaccctcaccaaagctctgtgcccacgtggacggcctatatctgatttcggccggatggattgacaacctggcactgagtggggtgtcctgtgagcaagccgacatcgaatgtactgggcactgcagtggtgtgcctggtgtgcacatctacgagatgccagtgctggcgggccaatgatggctccgctcagtgtgctgcacgtagttggtcacttgtaccccctcaatgtgggcaagagcagctagtgaaacctgcgtcagtcggaacgcctgtgtccatcgtgtcccggagccagggaccaccgtgatggtgctgggagaccccaggtcgactggctggatttccttgtgctgtgctcgacacggctggttcgcgggagggccgtgggccgtggagcacgagggcgtgcgggcgccgggtgtcggcttaagccttgctgccttatctggccattt

SEQ ID NO: 682146 - DNA, 404 bp, Homo sapiens
cactaggtcccgaaacttactatgggttctagaagtcaaggcgggcccttgagccactaacaattgtggccaacacactggttggaatgcattatcgttaaagtgcaaccctattgaggggttaacgcgcacaaaacagagagtgacccaatatagcacaatatcccgaaataatgtggaaaacaaaagcgattgcaaagttatcataagagcaccgattttattaaattcctatccgtgccaacccaatctcgagaccccgagtccatccggaacccgtgcctgaggctgctccagctcgctctcttccgggcgctgccccgcccccacttacgtgggacgctgaccgctccacggtctcgcggctggcaagccccagaaacccgtcgattcaactattatta

SEQ ID NO: 682147 - DNA, 508 bp, Homo sapiens
aggtagtggcatgctttcttttcatcttcattctcagtctttcagagcacagtgttgtagctaccaagtcattggtcgctgtgttgagtggccgagtgacctgctagcttaattcacaagaagccagttttcagaggtaggtgcacttatgtttgctcaaaaaggcagcaatggtactctgagagaactttattcattgtatctggtccctatttgcccaattttatggattttctttaaaattccttccataattcttgacctttggactataacttcaaatgattatagacactggcctgtgctgtctcacctttctttttatatatgaaaatgaacagtacaaagcacagacccaggtcttaaaataaataagctcattcaaaagaaatcaagctacaattaagtgaagacatattacaaatttaagaacatcaccatcgcactagcagcacattaaggccaccagtgctcaaggatcttgggtatcccattgctttgacattga

SEQ ID NO: 682148 - DNA, 218 bp, Homo sapiens
  misc_feature (68)..(68): n is a, c, g, or t
ctcatttggcgaggcagtctcggaggcttcctccgaagaatctttgtcctttccccgaggaatcaggngagctgggcctttacagctggcatcggagccacccttgctggcatgggtccccaccaaggagtgttcaggatctgctgacagaatcagagcagggacacgatgagggacctctagcagggacagatgtagccccacaagtctgaactcat

SEQ ID NO: 682149 - DNA, 360 bp, Homo sapiens
  misc_feature (94)..(95): n is a, c, g, or t
  misc_feature (97)..(98): n is a, c, g, or t
  misc_feature (150)..(150): n is a, c, g, or t
  misc_feature (307)..(307): n is a, c, g, or t
  misc_feature (331)..(331): n is a, c, g, or t
  misc_feature (341)..(341): n is a, c, g, or t
ggtgaaaggtgaggcacggcctgcagattttccagcggatcccccggtggcctcatgtcgcgcagtggaaccgatcctcagcaacccagcaggnntnngaggcggacccgagcagcaaccttccgggcaaacgaccatcagcatatccgntacaacccgctgcaggatgagtgggtgctggtgtcagctcaccgcatgaagcgccctggcagggtcaagtggagccccagctttctgaagaacaggtgccccgccatgaccccttcttcaaaccctctggtgtccctggggccatccgaagccaaanggagaaggtaaagcctgtataagncctggaattntgtagggttgtgggccaaa

SEQ ID NO: 682150 - DNA, 541 bp, Homo sapiens
  misc_feature (1)..(1): n is a, c, g, or t
  misc_feature (216)..(216): n is a, c, g, or t
  misc_feature (243)..(243): n is a, c, g, or t
  misc_feature (447)..(447): n is a, c, g, or t
  misc_feature (455)..(455): n is a, c, g, or t
  misc_feature (522)..(522): n is a, c, g, or t
  misc_feature (531)..(531): n is a, c, g, or t
naagtggggtctgctggtgaagacaacccagctggccaaatgaatcctggttggaagccttcttcagacggggctgtggtggcaccagctcccaagtctgaagaaaaagatgctgctgagatccaaaagcgcaaaaggctagagcaagctggaatcaaggtcatgccagcagcacagcgctttgccaggtcagctctgggctgagggctggcccgnctggctttctgcatgcctggggatttngaatctgtctagagagttggagttttcatctgatttttccacttcccgcttttcctattgcatcactgttccctgctctgagcacgtagatgatagtcttttgccttaaaggcatgttctctgcttaagtacctcctggggtatttttaaatgaaaggtgaagagtggagctcctcactgctggggtgcagcccttgtctttgntcatgtantttgtgattcagtcatgtgtggggctgcaggatttacctaggcaataacattgtatttttctattgntttgttggntgtttaattt

SEQ ID NO: 682151 - DNA, 195 bp, Homo sapiens
atatgatttgtaagtcatcatgcagctttggttctgatctctgctataactggctccagggttgactgattaactctaggtatatatcggtagataatggctgatagatcaaacttatgctgagccttgtttgctggatgaacagcaatgaactaccctggtatacttccactacaaacactgaggaattggagg

SEQ ID NO: 682152 - DNA, 351 bp, Homo sapiens
gtggacaaatgaccccaagacagaagagcatcaagtcatacataggccgtctcgttggccgggtggaagggacgaattggagccccaggcctggacagctcttctctggctggaacaccctcagatgagacactggccactgaccctcttgggctagccaagctgacaggcccaggagacaaggaccgaaggaacaagaggaagcatagaactcggggagggaggctgtctgacagggactacctaggggctgcctgggacggggccaccgtggtgtactggctggagctgtgggtgggcatgcctgcctggtatgtggccgcctggcggggcaatgtcaagagctgtgcc

SEQ ID NO: 682153 - DNA, 120 bp, Homo sapiens
ttcataaaacagcaacaatgacaccaatataagcttaccaccattaatcatttaccattatattccacacacatccatattgcagcgtttcacatttcatgcaacagcaaatatactgtc

SEQ ID NO: 682154 - DNA, 744 bp, Homo sapiens
  misc_feature (1)..(1): n is a, c, g, or t
  misc_feature (14)..(14): n is a, c, g, or t
  misc_feature (18)..(19): n is a, c, g, or t
nactgatagcttgnaccnncatgaccacgtggacacccagcttggcacgagggctacagctcagatcattgatgccgccttagctgctaagcacacctgatatcgggagaatggattcatcatgactgagaaagactatctgaatctgagtccacgaatataataaagagtacatcactaaggctccttatgctaccaactgcaaagacctatccgatcacaaatacaacgattgctcacacgatgaaagcacccccaaagattcgaatgagacagattgcggccgggaccaaaccctaaacaggctcaacgctttcaatcgcagcaacattaccacgtcacatgacatcatgaataccaggtcatgcttcagcatcatctctgactcactcagcggctacacctatcactcagcttgcagactgtcagaacagtttcaaaattcccaccgctacagctttaccgtatcttctggttctccaagtggttttctgcgcacacacgacagcacgtacgccctcaccctccaaatccgaacctgctaatacacatgaaagcggagcaaaacgcggatcacatctgcctagcccaagacaatgcacattgggagactacactcgaaagtgacgaaggatcacctgatggtccaagatttctgacatatgggaaaagtaaaatgatttactttgctccagtaaaggttgcattcccatctcttccaaaggctatgcgaacgtccaatta

SEQ ID NO: 682155 - DNA, 644 bp, Homo sapiens
ttaaaggctaggtacgaggaccgcgtgtagatggagtgcagcagcaggtgtgtgtggtcggccagcctgtgggaccagaaggagacttgaggatggggtcacgaatgctccactgcatggaggatgggtgagctcaggtctgcctgttcttggtgtgaacgactcacaagaagacttgcctagagaaattcaagggaccaaccataccacaagagaatacaaatggcacagagcagtaggcatcatggcatgaggtaccggaactgtgcaaggattacacaagcattaaaaatgcagaatggattgcaagaaaaatgccatatattttctgagtagtcagaggaaagtgtgtacgtaaaggtgtcacgagaagcatagtgaaactgaactgaaatgttaagagtaacaacacaggaaagatcagcagcagcagagatgggagacatacaggagaaaggccggagaactctgagccagcaccagcacggttccagggaattccagtgagggaaggcgaggccaggttggtaagtacaaagaggaaacccagatagtcataacaagaaaatgggcatctacccacctgtgtttcaaacaagacatcaacactttaattgaggaggatcttgtaagctgaacccttc

SEQ ID NO: 682156 - DNA, 146 bp, Homo sapiens
aaaaaagaagatggagtctcgctctctatgcccaggatggagtgcacatggccacgttctccagctcactgacaacctccgacctctatgggtacaagacaattctagcagcctcagcactacccgagtacctacggattcaccag

SEQ ID NO: 682157 - DNA, 351 bp, Homo sapiens
cccgcggtctatgagaggaaccgggacagacaccgagatcgggagcgggatcgagagcgggatctagacaaagacagagagcgggacagggatcgtgctcgggatcgagatggagaccgtaaacgggacatggatcgggagcgggatcgagaccgagaccgagagggcgctttccgcaggtcggagtcattccctgaacggggagccgataggaaagggaatactctgtatgtatatggagaagacatgacacccacccttctacgtggggccttctttcctttcggaaacatcattgacctctccatggacccacccagaaactgtgccttcgacacctatgaaaagatg

SEQ ID NO: 682158 - DNA, 103 bp, Homo sapiens
actgtcgtgaccttggtgaacacacccctgtgctgttaccctcaacttaagtctgccattgccagcaccatcccaccatttctgcccagcttggacgtcaata

SEQ ID NO: 682159 - DNA, 550 bp, Homo sapiens
  misc_feature (539)..(539): n is a, c, g, or t
  misc_feature (541)..(541): n is a, c, g, or t
atatatatcagtcaggaaattttacatcagttggtagcatctgcttggcatgttagtgttgggaagcattgtgaggctctaccctggctaagtaagagtgtgcagttaattagtgatacccactaccagcactataaatgagcgttgaactgctgatttgtttttattagtcttggatcacttcccaaggtatcttttcctcatcttgtcttgtctataaatatacgtacttatctgtatttatatttaaaaattcttttggcttggtgcagtggcttaagcctataatcctaccactttaagagccaaagcaggaggatcacttgaggccaagagttcaagactagcctgggcaacatagcaagaccctgtttctacaaaaaaataaaatcagccaggcatggctaattttggtgtgtggctgtagtctcagctacctggaaaactgaggcaggaggatcacttgtgccccaggagttgaaggggctgtagtgagctatgattatgcgattgcacaccagcctaggtaacagaggaanancctgtctct

SEQ ID NO: 682160 - DNA, 390 bp, Homo sapiens
  misc_feature (151)..(151): n is a, c, g, or t
ataagaaagctcttctgctgctctgtggagaagatgactaacgtgtcacggggaagagctcccttctgtgtgcctgcccacccccctgccttccttcagcacccttaagtgcatttgtaagccaggggttaacacattgccttatttatantaggatggtcatggcccacacaaacccgtcataaaaaaaaaaagtgggggttctttttgatttctagtggagatctctttggccgctgtaggactaaaggggacttaatggtactaagtttaaaggccggcccttttccctttaaataaattttttaaaaggggaaaggggttttagccctttttaaaaaccccctttatattacatttggaaccctgaaacttttatcagaaggttag

SEQ ID NO: 682161 - DNA, 831 bp, Homo sapiens
aaagggcgaaaagcgatcttcggagaaaaatccggtgttcgacagaagatccaaagcctttgtctgtaaaccaggcggagggcccccgagcggtctcggaaaagtattaagaaagagtcgtatgaaggtgaatttgtttagaggcgggggacccccgacaatcatgatggtacagcggtgtggagataaggtcaataaaacgcgcgtggttttgccccacagaggggtgaggattcacagataccgctgtcttaaggtcctgctcttaaaggaggatttctcacacagctatcggtcagaaatctgagagggaacaatgagtgattaaatacattctgggagacaaaataagccccgtagcacccggcgcacgttgtcgacccacacagctagataaagagaatgataaaaatatggcgcgcggcagggcgtgggtcacacacatcccagtgtatataccaccaccacccactgtgggtgagagacgcgagcggcgcgcgcactgatcccacgccgagcggatccaagcgagcgttctgacaggagaccccacccgcgggtgccaaacacatcatggtcgggaagccccccggcttctttatacttcaagaaataagcacacaaatttcaaccgcgcggcgtgtgtgggcggagacacactagtgagtagtccacagtaagctccgcggaggagcctgaggaaaaagggaaacatgtcatgaagccactcggggaatgaggatcgttgccacggaggccggggagatcaccaccccccgcaaccccccgccgcggggccaaccgaagccaaggaacccccgtctaaaaaaa

SEQ ID NO: 682162 - DNA, 244 bp, Homo sapiens
ctgatgagcagctagggactacatccatacaccacaaatgtgccgtgtaatttttgtatttatagcgaagctgagattggccttgttggccaggctgctctcaaactcctgacctcaggtgtatgatattctcacttcagcctcccaacgtgctgggattacaggagtgagccaccgcactcgatccaaattatacttaggtctccattcatgatcagcttgagttgagaaaggccttttcttt

SEQ ID NO: 682163 - DNA, 223 bp, Homo sapiens
atgatgggaaaagcgtataaatcttttgtgacattaacagtggttcagaagagccgatatggctttcacacatccaggtcctgttggtggggaaagacatgtgttcgaccctcgcgagtaaggtgagagccccggtccatgaagtgttgggccaaggctgcagccattcgttgtcttcactaacggagtaaaaatcttgcgttaaaaccattatctttaagca

SEQ ID NO: 682164 - DNA, 711 bp, Homo sapiens
ttgataagttttcagtaagcataacctattccatcagatgatgactgtgtttgcacaatagtgttcaagtgatcacgcaaatttgtacacagggaatgtataataaggatcacctgatcagagctattccactgtatcttatagaggaagaggtcggaaacacaagcaagtgatccttagttatgttccttaagcctgatgataactatggtttactctaataagatagcatatcattgataattatatttttgttacgtgtgcccttgcacatgtttggtctgttttggttatatcttcttatggaataacacataagttagtaaccactctactgtttcaagttaatctagtaagtagagctctacatgagtattatgtataactagctatacccactgtaactgaatttattcttacaacacgtgctagaattcttgaaaagttatacgtagtaacaatatccaaacgaagcagtatctgctagaacagtgtgccaaaaagcagtatttctttcccttggttgtagagagtaactaattatataaatagtgtacctcaagaactacatacactggtatcacacagtctttctacaatgtttctgtattctgaaagctcaatattaagtatctatgtttccattcagatattcatattagaatttcctttagaagatggcagtgattataatattaatagagggcatta

SEQ ID NO: 682165 - DNA, 296 bp, Homo sapiens
ttatttgtccagccccttgggtcccgattcggcttgccggccaagctgtcgactttggtggtgaagaggctagcacttgtgggaccactgaagcgaaagtgcggtacctgtagttgcacagactgtaactgcttatggacacggaaatcggaaatgacctaatgcaaatgctcttgcctaaggatccccaaaatttttttctaaactttgggaattaaaaaaggcttccttagggggcaaactttttcccccggggccaaaataaccgggtaaaaagggggcccaaaaaagaaaag

SEQ ID NO: 682166 - DNA, 814 bp, Homo sapiens
ccgccgccgccgccatcatgagtggaaatcgtgcgcttgcagtgcctgggcagtgcaggcaaccaaatctggcgccaagttttggtgatggtgatcagctgatgagcactggcatctgaccccacgtggcacctaccacggggacagctgacctgcagctggaacagcatcaactgtgtactacaatgagtgccacctgtgctgtgcaatgtactgtgcccctgctgcctgtgcatctgtggactcttggagccctggcaccagtgagactcctgtgctgctctgtttgggtgcccattactgaggcatgaatctatcctgtgcctggacaacattctgtattatcatgtgtcatgagtgtgtgctgagtgaacaacgtggtggcacaacgtggggcactaacacaagaagtgctgctggtgagctgtgttgggactcgtgttgcttggatgtttgtgaagaaacgtgagtgcttgagagcttgtgactggatctgcatgtgtgtttccaagcatgaccccacatccctgggtggggtgtgactgggtctaggggatggtgtaccctcctcatcagcaagatccgggaggaggtacccagacatggatcatgatacacgataatagtgtggtgccttcgaccaaattgtgtcagacaacagtggtgggagccctacgactgccaccctctcatgccagcagctcgtaaaaacacacgacgagactactgcatgatacgaagctctctacacgatgctcaaacctaagtgcagccactatgtgctgacactgtgttgacggtggccagtgcggta

SEQ ID NO: 682167 - DNA, 895 bp, Homo sapiens
  misc_feature (423)..(423): n is a, c, g, or t
  misc_feature (819)..(819): n is a, c, g, or t
aacaggcgcatgccactgaagccctgctagttttggtattttggtagagacaatgtttcaccatgttgaccaggatggtctcaagtctcctgaccctgcgatctgcccacctcagcctcccaaagtgctgggattacaggtcgtaagccaccgcgggcctggcctggttctccatgattctgtaagtatgtgtatagccattggattttcatagattcagcctattgtagaatacatatcccttctgaataagttctgtaggacagaatctagcaacatcttacagctcaataattcactagattcaagcaggacatgagatgctagcctatgttgtggcttctaagtctgaatgactgaattatttgctcacttgctcaattaccttggcgtgttagttactcttatgaagagatcctcgcnaacggcttctgtagatgtggtaatgcgactagtccactgatcgacaggaagtgcaaggctatctggtaccgatgatcgctcaagatttatgaggaggaccgaaagcctaatgactagatgaggctttaaacttacaatttcttctcgaagtggacaaacttccggaagtttgaagccacacgggagccaggaagcatgctgcttttggccgaagtttttaagaacgtcccagggtctcttgcttaaggccagtaacttgctatttacccttccatgctgtctacgaccctgcatccctcgtaatttgggtctccaggtgggaaacagagcagagtatggacgatgtaagccccttattgggggttttttaaccttaagggacggctaagttgcaantttaaacttgcctcggaagatcttgcagttcctgcgaaaaggtggttccggcaatcctggggccctcctgggccat

SEQ ID NO: 682168 - DNA, 105 bp, Homo sapiens
acacggaaggcagatacggtgattgtgtgttccatccctcctgtagcatagggacacggctcatcctcccacgtcagattctaaatcagagagagagaaacatgt

SEQ ID NO: 682169 - DNA, 1273 bp, Homo sapiens
  misc_feature (643)..(643): n is a, c, g, or t
gacaacataaagggggcccacataggggctcgtatattgggcgaaatcttctgggtggccacaataaaccgatggcagcttgtgcggaaggggttcttcttctctcggggcttttaatgggaagttgtatagggcgacccactatggggggcacaagatccacaagagatcatggtcgtgtgttatgctctctccatgatggggtcttggtttattgagtataagaccgccgccttatggggtgttgttgcgacgtgctacccttgtcggcgcggaaggttggctgttgaggccccccttggtgtgaaaaagcctccgcttgggaaccattgtgttgtcactaaagaagcggggcttgcggtgttattggcaaagaaggaccccagtggcaccagtgtaaaatggggcccactcctctggcttaatttggggggtcccactacgtaaactaaaaggccttgtccacccacgagatgttgttcctatgcgaattaaattgtgggggaacggggactattttgggagagttccccaatttcacagggaagacatttcgttgggtgtgaatacaacgccctcccccaaagagttagtttaccctcgatttatgaccataggcatcactctggccatttgagatggnagcacatccaggaccgggtgcaaatatgtcgctaacagcacgttgtagacacactaggtattaagttatgcccgacatggactctcgtatgacgaggcttgagttacaatgtgtaggaaagaggatcaccctttatcacttccgcgaaaaattgggggtattaaagggtgccccatacgcgcacaaggtgcactgttatgagaagatattatatgagtctaaacacacgggtcactcttctcggaggcacaggcactgggagatatacccctctaccgagcgacagacaacacctggccacacctggatagcacaggaggtaataggtggaggatactcacgatggatgtgttatgcctacaacaaagagggtgggtgtggactgaagctggctcaaagccccgacaaggtaggttgccgaagacagcacaaaagcggagaaacggaagcgagagacctgagcgagtgaaaagtgagacgagagctctctcccacgacagagctcctcacaggggactccaaagaacggattatagaagaagagttacgaaggatcaagaaggcccaaactaggatttggagtatcggggtctcgaatacctggagatgggggcagtgattctcctccca

SEQ ID NO: 682170 - DNA, 128 bp, Homo sapiens
acacgctcacacataacttactactcctttgctacctgtgccagccatctgctccatttcacagagtgtacaaactaaggcaaagtgagagcaaccacagatcataaagggagaaatgtggcagatgg

SEQ ID NO: 682171 - DNA, 109 bp, Homo sapiens
accgtcctagccgcgcagtgcatctgaactattcgcaaaaaggcgtgattgacgtcttcctgcatgcttggaaaggatacgcaagtttgcatggggcatgacgagctga

SEQ ID NO: 682172 - DNA, 1387 bp, Homo sapiens
  misc_feature (90)..(90): n is a, c, g, or t
  misc_feature (247)..(247): n is a, c, g, or t
  misc_feature (464)..(464): n is a, c, g, or t
  misc_feature (509)..(509): n is a, c, g, or t
  misc_feature (638)..(638): n is a, c, g, or t
  misc_feature (674)..(674): n is a, c, g, or t
  misc_feature (696)..(696): n is a, c, g, or t
  misc_feature (758)..(758): n is a, c, g, or t
  misc_feature (765)..(765): n is a, c, g, or t
  misc_feature (855)..(855): n is a, c, g, or t
  misc_feature (898)..(898): n is a, c, g, or t
  misc_feature (903)..(903): n is a, c, g, or t
  misc_feature (928)..(928): n is a, c, g, or t
  misc_feature (937)..(937): n is a, c, g, or t
  misc_feature (957)..(957): n is a, c, g, or t
  misc_feature (1017)..(1017): n is a, c, g, or t
  misc_feature (1038)..(1038): n is a, c, g, or t
  misc_feature (1047)..(1047): n is a, c, g, or t
  misc_feature (1085)..(1085): n is a, c, g, or t
  misc_feature (1092)..(1092): n is a, c, g, or t
  misc_feature (1094)..(1094): n is a, c, g, or t
  misc_feature (1171)..(1171): n is a, c, g, or t
  misc_feature (1205)..(1205): n is a, c, g, or t
  misc_feature (1235)..(1235): n is a, c, g, or t
  misc_feature (1245)..(1245): n is a, c, g, or t
  misc_feature (1269)..(1269): n is a, c, g, or t
  misc_feature (1296)..(1296): n is a, c, g, or t
  misc_feature (1298)..(1298): n is a, c, g, or t
  misc_feature (1340)..(1340): n is a, c, g, or t
  misc_feature (1350)..(1350): n is a, c, g, or t
cctcctcttgctcccaccctcctcactaaattcggctgatttcggtggacactgcgatgtggccagcatttgtttatttcttggtcactntcacccggtatggggcatattttgaacctacccgtatcatgcgggactcgacaatatttgataaaaatcgctcgtccccgttacctttctctacttctatccatcatctcctctgcttctctacgctcaactctctgatgactccgtcgcacttctngtcgcactttacgacgtactcgtccaccaccagcctcacaccattataacacatgtaataatttatcttcttacatcaccgataactatactctatccatctctttctcttgctatgcaatactggtgccgctacaagcgactcgcacgcgcaatatcattatatctcatacatacatggacgtcataatgttcgtcatcatcacccgactactgtntgtctcgcgttcgcgtgccatcctcgcaggacacgcgtgcgttanactaatcatgctcaacatttgaccgatacgggacatacactctctaactcatcacgaaccacaatgcttagcctactaactatcgctatctcatgctggtactggtctgacgactctccgcaacacccngaatgctatgcttgctcaacctcgctctacatctancgtgattcacgtccggcatgantacatcacgtctacacgcgtgtcctctacttctcgacgcatggtaaattcatagtgtacatntgacgtnttctatcgctgacatatatctgtgttgtatcccgtgcgtttcgtacgtacataaccgacgatgatgtcttatcatgtctcgcaggacacngtgtcgtcaagacgtgcgcgtacatgcttgtgatcactgtacngatgnacatgtaccgtgtgctctactctangacatctgnctatactatatctggactgntctcattacagctagtcgtgcgtacacattagctcgcacgtctcgctatcgttcagtcgnatctcgttactcacgtacacnttccgtctnacgagtatgtgacgatgcgatcggctgtgacaggctangtcgtancntactgtgcgtatactctgctaagtctaactgtcatcacgaactacggctgtattctctgctgtcactactgcgtganctactcgatcggatacttcactagacacgcctantgcgcgcacatctgcgctctgggactcgangctgagcagngcgtcggacaacaactgtcatgtnattgcgtatgtcgcatctacactcgcngncactcttagcacgtacgacgtcgagactatactgtcgtctgngtagcgcacnggtacaatccgcactgggcactcgcgtggtcatacga

SEQ ID NO: 682173 - DNA, 196 bp, Homo sapiens
cctgtatttgtccttaaaatgcttgtttaaaacaatcttactatatatctagaattgtaagaatctcatctactaaagtagttcacccactaagaagggtacttattgatatccttcagcccacaggagacccttgagttaatttttctaagcacctggcttctttaagtggtatgagtctattgtgacaataagg

SEQ ID NO: 682174 - DNA, 176 bp, Homo sapiens
cagcattctcaaatgttgggagattccacataggcttaagctcaatttattactttcatatgcattatacattcatcccccaatgctcgcttacccatgctcatggatttaaattgctatacttatgccaatgattttcactttgtatctcttgaccagaatacttccctgagctc

SEQ ID NO: 682175 - DNA, 256 bp, Homo sapiens
tgaatggagaactaccagagcagagagtgttggttttctggatgtggtacaactttgatcataagtatcttaattgagggaaaacgaaaaaggataatgtggacttagataattacaggtttaattgggaacaaggtgtttggacttatttctcttcccgtggagcagaattataaaacccaccttttcatcttcccttttccccattcagttgcgtgtggaaaagggaaacccaacacagaacagattccctctt

SEQ ID NO: 682176 - DNA, 367 bp, Homo sapiens
taggctgaggaagacgggtaggctgaggaagagaatcgcttgagcccacacggtggaggtgcactgagccacgatggcgccactgcactccagcctgggcaacaaccacaactgaaaaaaaaaatctactgaggccagagtgggttgtcgcgccgagcatgcttagggggtcaggcttagccctagcatctcagaatcacactttcttgtacggtcctcactttatccacctgacccgcgcactggtctgacggtctgaagactgttgatctgaaggtcctaggcaaagacagtcacttgagacgccgatatattgaacatcacggaccgggcccctttcccaggcgactcatttcctagcactctc

SEQ ID NO: 682177 - DNA, 539 bp, Homo sapiens
caagagccagtacagatggatgaagccactgatggagagctggctgcacattcgtaacgtgggagccctgtctccaaggcccgattccatcccaagcccagactctggagtctcaccctaagaattcctctcatagttcttactcttacccggagaccgcatgcttacagtactgagctcttctttgttctcttgctgaggctcgttattttaaatgcaagtcacacctattctgcaactgcaggtcagaaatggttccacagtggagtgccaggaagcagggaagctgcaggagccagttctactggggtgggtgaatggaggtgatggcagacacttttactgaatgtcggcttttttgtgattattctagttatctccagaagaagaagagaaaaggagaatccgaagggaaaggaataagatggctgcagccaaatgccgcaaccggaggagggagctgactgatacactccaagcggtaggtactctgtgggttgctcctttttaaaacttaagggaaagttggagattgagca

SEQ ID NO: 682178 - DNA, 1026 bp, Homo sapiens
  misc_feature (212)..(212): n is a, c, g, or t
tggaaaaagtctgggaggccagggggtgggtttgaaaccagtcttgggggggtttcgattccttcctttattgggtctaaaatttaatggtatacgggttcttcgaatggtgtgggtagggtgggggggcatccatatagtcactccaggttatatggaggtgttctatctactattaggactttctcgctctcagaagcgaaggcttctcnaaaatcatgagaaatatttattaataataactggcgtggtataagaaaaatggaatggacgcctacagatggataaggatggttcccatggtgggtggtatggcatacgggggtaagtccagagtaacggtcggggctattccgggagataaaggccggaagacaagtggttagcgggggcagaaagacaatgtacaagaattcaccgcgccgagatgagaattcatgcagataaggggagacaatggcgactaacgagcgcgagaaagagataacgggcgaaaaagagggtgtgaaacgcccagagggaaccaaataagagggggaaacaaaacacgaggggaacaaaagcgacacgacacaacacatacaaaagaaaggggggcacacaagggacacgagcggcaccaagaaaaaagggaaacaagggaacacacaaaaagagagagaaacaaaaagggagagacaaaaccacagaaatgccaaacacacacaggaaattgaaacgcggaggactaaaccaacagcgcacaattgatacctaaacgcagcacgaggcaagaacaacggcaagctaacaacaaacaaacagccgacccacaagacatcaaggcggcccgacaggccggcaagcagggaaagaaaaaaaaagagagaaagaaagcaggaaagcgcagaagaagcggaggcgacaaggagaacgaccggacggcggagagagggaacctcacgagtaaacagacatcatgtgtgaggaataacggggagaggacaaaaaaggctatacggaagacagagaactaggagcggacac

SEQ ID NO: 682179 - DNA, 315 bp, Homo sapiens
  misc_feature (101)..(101): n is a, c, g, or t
  misc_feature (106)..(106): n is a, c, g, or t
  misc_feature (109)..(110): n is a, c, g, or t
  misc_feature (119)..(119): n is a, c, g, or t
  misc_feature (129)..(129): n is a, c, g, or t
  misc_feature (138)..(138): n is a, c, g, or t
cgtctcctctgtggtcccatcgcaaccagagcccctcaccctttcgaagtccccgccccctccgctggggcttactccagggctggcttttgaataccatnacagnagnncgagcgcanagcattggcnggaggggcnaggtggaacagttatctccagaagaagaagagaaaaggagaatccgaagggaaaggaataagatggctgcagccaaatgccgcaaccggaggagggagctgactgatacactccaagcggtaggtactctgtgggttgctcctttttaaaacttaagggaaagttggagattgagca

SEQ ID NO: 682180 - DNA, 123 bp, Homo sapiens
gtgttgaggcttaaaaaatcccctttcatggtcatattctctacttcctctttccccaactatgtgagccgccattgtaatttccggatccctaaatgaaggctccatggggtttcttgtcca

SEQ ID NO: 682181 - DNA, 355 bp, Homo sapiens
ccccaaaaaaaaaaatttgggggcccttttttttttttgggggggttttatagttcccccccgggggtttaaaaatttcccccggtttacccccaaaaagggccccccccttttaaaaaaaatttttttttttgggttttgggcaaaagggggggaatttttttgtaaaaaaaaaatggggaccccccccctttttttgccccccatttccccggggaaaggggttcctttttttttttttaaaaccccccgggggggggtcccccccgggggtttccttatgggtggggccccaaagggaacccccttgggggggttttaaagccccccccccccccccgtttgggggggggga

SEQ ID NO: 682182 - DNA, 179 bp, Homo sapiens
catacgtggttggagagctcatctggaattttgccgatttcatgactaaccagtgtaagtggcagcttagcgcatgggataatgtacccgtcctcattttgtcaggttgccttgcccattctggacacttctgtggtctgtaagcaattattgaatcacaaaggcggataactctggtt

SEQ ID NO: 682183 - DNA, 115 bp, Homo sapiens
gtcataacccttcatcaaaccctcatcaaaccctgtgaacctgcggaaagcaatataagaaggccccccaaataaccgcgtttggctgtagtggtcgggtttagggtttcgatga

SEQ ID NO: 682184 - DNA, 209 bp, Homo sapiens
gaactactaggagaagatgttggggatctcgggacattgagtccaaatcggcatttatgattcatcttcaggctggtgtcacctgagaaaaaagtctgaggagctgtgagtcccatttaccgtgtcttgggtatgtaaggagtacaagtttatgaattaaaggatcttgagtcagctttaaaggaggtcaaatttccgtgcttatgaga

SEQ ID NO: 682185 - DNA, 371 bp, Homo sapiens
  misc_feature (24)..(24): n is a, c, g, or t
cgaccccagaacgcccacttcgcncaatccaggacaccctaacacacctgaaaaggtagacctggatttaaaagcatatctcatgatgatggtagaggacataaagaaggaattcaataactcacttaaagaaatacaggagaacactgctaaagagttacaagtccttaaagaaaaacaggaaaacactgctaaagagttacaagtccttaaagaaaaacaggaaggcacaaccaaacaggtagaagtccttatagaaaaacaggaaaacacaaccgaacatttgaaggaattgaacaaaaccatgcaagatctaaaaagaaatagaaacaaaaaagaagtcggtcgacgcggccgcgaatttagtagta

SEQ ID NO: 682186 - DNA, 850 bp, Homo sapiens
gtatgttagagatccttcgacaccccggtcatgtacgtggccttccaggtggtgctggccctctacgcctcagggcgcatcactggccatcgtcatggactctggagtacggggctctaaccagcatcggtgcccatctacgagggctacgccctcccccacgccaatccatgcgctctggaccctggctggtcgtggaacttgaccgactaaacttcatgaagagtcctctatctgatgcgaggatagagtcttcatacatacaaggccgagctgggaaattcgtgcgcgacatgtcaacggagaagctgtgctaccgttcgtcctctggtactatcgacgcagtgatgaatggtacaccggtcgacattcctccttcttgcattctagggagtagaggagctacgaagtctgcaccgaatggccagagtcatcaccatgggacaactgaagcggtatccggatgtcccgtgatggacaggctgttccaaggcctattccatttccctgggtgatataggaattcctcttgacgtgccaagtcgcagcgacggatctcaacccttcaaacatcccaattcatcgacacgtcgttcgaacggtggggaaaccatttctcggaatataaaagtaccctggtaactgccactaggaccaccgtgtggctcgttcgagtgactgggtatctcaatcctaattgattaattctcaggggacaatgtgccagaacgagaggatcgccacgtataggaagaattcacccggcacgcgggacgtccccgaagacatacattgacaagatccaagaattcatccgcatccccgcagaggcgcccacgttactcgctgt

SEQ ID NO: 682187 - DNA, 143 bp, Homo sapiens
gagtgcatctgtgcctcagtgatctgctgcctgggcctcccgaagtgctggcattatagtctctctccttatgtgtgtgtgtgtgtgtgtatttaagagtcagggggtctcactgtggtgcccaagcaggtattgaaccccta

SEQ ID NO: 682188 - DNA, 141 bp, Homo sapiens
gtccaccggcacgatataacccaccagctgctggccgctcggccctggctgggcgatcaccgccacttccagtaccgggtcctgctccagcagacgcgcttcgatctcgaacagctcgatacggaagccccgcaccttcac

SEQ ID NO: 682189 - DNA, 185 bp, Homo sapiens
agagatttaaatacatggcagaacttgcaagaaagaaagtgaaatctttaggtgaaagaaatgaagaatgaattgaacacaggacaatgaggacatcagttgacctgcacaaggattaaggaggaatatgtatagtgtgattagaccagtaaagagatgctaaaggactcctaatggatgctgga

SEQ ID NO: 682190 - DNA, 144 bp, Homo sapiens
tgcagtcctaacgggtcgagtcccgtatagagaaaggatactaggactttccctaaagcatcagctgttaagggttagacacagaccagatctacaataaattaaataatacatttgacatgtttgctccctgtaggtactgca

SEQ ID NO: 682191 - DNA, 272 bp, Homo sapiens
tgtggtgatctagcaggagcttatttgcggctgcttttcccaatgaaagtagtatggaaaaaattagaaataattcatctgtgttgtatggacaaatggatcaggggattaggtttgcttaactggagttcaacctcgaaagattctcaaccaagaattctccagtatgaggtacacattctgtatcatgttgaaactctggcatgtgtaagcatgttcacagcacactctcacaaggacatgtggcccttaacgccacaaaagtgaggcca

SEQ ID NO: 682192 - DNA, 156 bp, Homo sapiens
gcctaatagtagacactccatgtgcccttagaaagaaatcggtctggtccccagcttcagtgcctccaaggcagatactcgagagacgttgttgaactgtcagcctttacatttatgcattactattgaaggcctggaataaatggatcgtgtttt

SEQ ID NO: 682193 - DNA, 784 bp, Homo sapiens
  misc_feature (115)..(115): n is a, c, g, or t
  misc_feature (168)..(168): n is a, c, g, or t
  misc_feature (189)..(189): n is a, c, g, or t
  misc_feature (198)..(198): n is a, c, g, or t
  misc_feature (213)..(213): n is a, c, g, or t
  misc_feature (216)..(216): n is a, c, g, or t
  misc_feature (222)..(222): n is a, c, g, or t
  misc_feature (240)..(240): n is a, c, g, or t
  misc_feature (252)..(252): n is a, c, g, or t
  misc_feature (255)..(255): n is a, c, g, or t
  misc_feature (268)..(268): n is a, c, g, or t
  misc_feature (288)..(289): n is a, c, g, or t
  misc_feature (443)..(443): n is a, c, g, or t
  misc_feature (450)..(450): n is a, c, g, or t
  misc_feature (469)..(469): n is a, c, g, or t
  misc_feature (473)..(473): n is a, c, g, or t
  misc_feature (483)..(483): n is a, c, g, or t
  misc_feature (486)..(488): n is a, c, g, or t
  misc_feature (490)..(490): n is a, c, g, or t
  misc_feature (495)..(495): n is a, c, g, or t
agcgggctcctcccctttactcctggctgcggggcgagccgggcgtctgctgcagcggccgcggtggctgaggaggcccgagaggagtcggtggcagcggcggcgggggaccggnagcagcagcagcagcagcagcagcaaccactagcctcctgccccgcgggctgncgaacgagccccacgagccgntcaccccgncgttctcagcgctgnccngacccngatggcgcgccctcccgnccgccagtcccnggnagcgccctcagtngtcctccgactcgccctcgnncttccgcgccagccgcagccacagccggaaggccacccggagcacaggcacagcacagcccccaggcatagcctttcggcacagccccgggttccggctcctgcggcagttcctctgggcaaccgggtcccttgcgccgaaattcctggaggtngggatgntcttgtccaaaaatcaaantcgnttgcccaacntgnnncngccgncgccctgcaacgacctgcagagcccaccacagcatgggctgcccgggcacaggaggacagggacgccccatgggaagtcagacaggtaacaaaggtgtggccgcttccatgtggcaagagcaggcttcgagctccggtctaactcagacgcatcctgggtcatcccgaaaactctgccgggtgggccatcaaaacacgtggagcagggaccgcgatttccgaccgggggagacagtgctaatgagcactcagcgtgcccactggaagtggttctgctgcccgacaggtg

SEQ ID NO: 682194 - DNA, 215 bp, Homo sapiens
agggaaggacgcctggagagagggatcacatgggactcatcatgtacccattattacaccaggcatgaattattcatgggtgcttgtgacctgtggtaggatgaatcactggacagatgcttggatggacggatggatggaaggatgattgatagatggtcaaacaggtgagcaaatgaatccctggttggacaactgtttggatgggtagacag

SEQ ID NO: 682195 - DNA, 935 bp, Homo sapiens
agcggacttcctgtgctcttgcggacacgcgcgcgtcgggttataacgcgtgtctgggccgcacgtaagcccggcctacgggcagtctttgactcgatgagccggcctataggcgcatggaagtgttcccatgagaaacgggaggctgccagacgggggcgcttggccgccgtgcttaaagcacagctcgacgttgccgtacctgaaatgctacctcaggatccgggagctaccgacttcgaaccgcaggtgttgaataaccgcgtcactgcatggaggcctgcaggcaccaaccggtgttccaggcaaacacagtgtcgggcgcgctgatacagcacgtcaatgccatgatcgagaacgaaactggaaccacttgatcacaggactgaagaccagcacgcggaccatgacccagagccgctctgccacttaccatactgcaccatttttcctgggatatacagtccagatgctcatcagttcaggcatccgtgagaccattcgctaccttgttgcagcacaacatggtggacggtcttgggtgatcacagctgagcggacgtggacggaagacctcatcaagtgcctggcgcgcataatacttgggcgagatttagcctcagggggaaggagctccgggagcaacgggatcaatagtgatcggaaatctggtggttgcccaatgacgaattacgtgcaagttgtgaggactggctgatgcgcaattctggagccagatggctgatggcagcaggaacaccagagggtggtaagccgtgacgccctctaagatgaatcgcccggctgggccagcggatcagaaacccgaaatccgcgtattactgggccccaaaaaaacacatacctgtgtttgagtccgcgctttacccaaaggtctctgtgccgaactgaattgttgtcattccataaagaac

SEQ ID NO: 682196 - DNA, 208 bp, Homo sapiens
aatcggctcggtccgcttttgctgaggtctcctgagagctgggtgttctcccctggctctgcccgttggaggccggcatgccagtgcggccctcagaccaggctctgggctcacgggacacgattggatggccggctttactgggttctcagcaggggagccccccgactgatacccactgaccctgttggcctccatggcgagtgtt

SEQ ID NO: 682197 - DNA, 184 bp, Homo sapiens
ccggcgcccggagcggggaagggcgcgggtgcgggcgcggaggacacacgcgggtctccggctctcaaccccgagctggccgggccgaggacctcagagcggggcagccccctcctcccacttcccacgccgggttggttttgtgtttgcttttccggacctcactctgccgtccaaaaagaca

SEQ ID NO: 682198 - DNA, 125 bp, Homo sapiens
tcccagaactatacaacaaaagagctccagacaagggagtgagaggcaggagttctactcttttttcttcttctttttttttagacagagtttctctcttgttgcccaggctgaagtgtcaacgt

SEQ ID NO: 682199 - DNA, 604 bp, Homo sapiens
gcgagagtgggacgaagagcggagcggtgtggagcagtactgcggtctcctctcctctctctaaacctcgctctcgcggtctacctttacccgcccggctgctcggtgaccagaacagcttccaccatgaccacctcagcgaagttcccacttgaaactagagaggcatcaagcacgctgtacatgtcccgtgtctcacggggtgagaaagtccaggccatgtatatctggatcgatggtacgtgggagaaggactgtgctgccgaggacccggacggcgtggtacgaggtgagcccaagtgctgtggcaagagttgcctgagtggacactttgccgagtggcctcatagctcacgtatgtacagctcatgagggtgtccgacaggtgacatgtatctcgtgaccctgcgtgccagtgtgtgtccggggaacccctttcgcgtacatggtagcccatacagcaagtcctggctcgttaatgtcgtagagtattctcaaagtgacacctgcgaagggcctggcacgcatgagcaatcctgagagcagcacctgtctccggctaatggacatggtgagcaagtcgaggacccctgggtgtggcatg

SEQ ID NO: 682200 - DNA, 123 bp, Homo sapiens
ctgatctagaggatctccctgggactctctggcacatcggagctcagcaatgatactgtggctccaagtagcccaataagtcagccacaggtggaagctgccacatgcatgcacccagggggt

SEQ ID NO: 682201 - DNA, 225 bp, Homo sapiens
cgaatcatatttacttataagatctttcatgaggcctgaccagctgtttcgagagaaaaccaaacacagtgattcacacttcataaacagaccttcaatctaaatgaacttggatcatatgtgaggtcactttgttgttgtttgttgttcatcttctcagcatctcttcgttattgccagaaaactttggtgtgcagcctgcatataatcagggacggaagatca

SEQ ID NO: 682202 - DNA, 608 bp, Homo sapiens
  misc_feature (134)..(134): n is a, c, g, or t
  misc_feature (204)..(204): n is a, c, g, or t
  misc_feature (461)..(461): n is a, c, g, or t
  misc_feature (465)..(465): n is a, c, g, or t
  misc_feature (511)..(511): n is a, c, g, or t
cgcgccggaataagctgaacaatagtgcctgaggaccggcaatcgatggtttgcggtcggggaataaggcagctgttgtgcgtgtgtatggacgtgggctttagccatgagttaacgtccatttccttggatantaagaagtccccgatttgaacaaagcaagagaaggatgattaaccactgttgtgtatcatgcgatcaggntgtttgctgtagaacaaggatgatgagttgctttaggtcgctggtttggttacagattggcagctgaccaatcgcccgtttctaggttggggcatccatgtatcagtaaacatactacatggtagtcaccatgactattcctgattgcttacctagcatttttgatttggctggtagtgacattgtaaagcaaaatccaaggcgaggttgcttcaaacagggctgtagcttccgtgcgtatggtcacttagagtcgntagnaaggccaatttggggcaatttggttgcaatttttcccaaaaatcgnaaaatttggaaataaaaatcgaaagaatttaaggggcaaaaacaaagggaaaaaggatcttttggaaaggcaacaagaaaggggctccttagttcga

SEQ ID NO: 682203 - DNA, 313 bp, Homo sapiens
  misc_feature (236)..(236): n is a, c, g, or t
  misc_feature (242)..(242): n is a, c, g, or t
aaattttcccccaaggatttttgcttccttaagcccttttgggtttgtttatggttttcattaaaagaataagcctaactttgtgggtagtcctaaggagaaccctttaaccccaaagtttttatcattgaagacaatattgaacaaccccctattttggggggattgaaaaggggggaataaaggcttgaaactttcctttgtgtgggaggacttggaggagaaatcccctggantttcantaaccctttgacaaactccccacacccagttgatggctttccgtaataaaaaaattgggatttccttttga

SEQ ID NO: 682204 - DNA, 151 bp, Homo sapiens
  misc_feature (115)..(115): n is a, c, g, or t
gagctacaatactactccattgtacccactaaaacactcaccaatgacctcacccctgacccccatgcctcatgatactcctcaatagccatctactgttcctgttgttgatccntctagagtctgaccttgcatgtgcatgcaatgcttg

SEQ ID NO: 682205 - DNA, 581 bp, Homo sapiens
  misc_feature (424)..(424): n is a, c, g, or t
  misc_feature (508)..(508): n is a, c, g, or t
  misc_feature (523)..(523): n is a, c, g, or t
ggagacgggggtctcacatgtgggctaggctgggtctcgaactccggacctcaggtgatctaccggcctcggcctcccaaagggctggggattacacgttggagccacggggccgggccgatctttcgtttcttttcagcataatttagatagtcagatttcagtatctacaaggcacatggaaaagggaaaggcttccccggcaagctgggagaaaataccggttcttcacccggggcattcccggtacggtaacagcacagactcaagacatttttcatcacaggggggccagaggccggtgaatccctcaaaatggtaggtaaaatcttaagagcaaaattgggtggatgttctcaaaaggaaggtgtgactttctagaagggttaagtaagaatatagctagtaaccttccatccacggnccccataatccccaagggtggcggtctccatgggggtatggcttaaatacgtggtaagagaaacatggctaccagatggcctgncacagggattcttgncccgaagcccttaaccgggaaagctaggggtaggggctgagaatcattcatcctaagg

SEQ ID NO: 682206 - DNA, 514 bp, Homo sapiens
tcaaatttttaaaagtatcttaagggggagctgttttttaaaatatccaatttatgcctgcataaacaacatagacatggaacctcccaaagagagaatatatgacgcttcttggaattttacaccagaggctactgcttagcctacataatagtttggaaaacaaggttatgaaataccgaaaccttttcaggatcttgaaaggctccatacacttttagagaggatcaccatagctattgctgagggaaacgtgccggaacacgacgcctgtactatggaggcttagggcacaggagaatcaccgtgaaaaccaacggaggctcttacaaaacacgggcgggaatcatgaacttgtgcgtcattgaacgtgtgacgtatccgctagcttttcagacggagaggctattagattctgatgtaaacctcagagcaggactgtctctgtgtccttttatgacaataaccagagacaaaacgctcaaaatggccaccacgaatcaactgctaaacg

SEQ ID NO: 682207 - DNA, 221 bp, Homo sapiens
ccacgctcgggacacctctggattcagcggcttgagaggcccagcctgggcctgctgcggtttaaccatttatagcactcctgagagccggacgtgcctcctacttgggcccggaagccagtccctccccctaagaccccgcgcctctgacggggcttggccccatgtccgcctgatgcacactccttacttggcgttccttggcgccccccttatcgggg

SEQ ID NO: 682208 - DNA, 1971 bp, Homo sapiens
  misc_feature (403)..(403): n is a, c, g, or t
  misc_feature (555)..(555): n is a, c, g, or t
  misc_feature (701)..(701): n is a, c, g, or t
tcaaactggtaggatgaggaccggctttaacgaagggcgagtccaggcggagacactatgaggtgagtacgcgtggagtatgagagagtagcaccagacgcgtgggccgtacactgacgagtagtagttaccgcgcagagggcaatcgcagtggagcaggggatcagccagcccgatagaatagtaggcacaggggagctcagaacgcgcccctgatagcacgtcttctggcgagtagagtcgacaggtcacagcataggaataaatagaacgtttgtggactagacgcgcaggtacgaccccaaaaaggtcttgagaggcacgcctctcgggatacaaaccgggaaccagtaggacatgaactcctaaaagggtaaccattggtaagagaaaggaattcctnactacctccctgtttccttcactcgtggacgccccaaatataataagggtagagtgcaaaggaagtatttcaattatgggattatgtacgtgtccgcatgggagaggcgctcatcccttgcatgccacatggggcattttgacatgagctcnttgtgggatagggtaccctataattgacctccaagacatgtccatgtaaagcgtctacagaaccctcctgttaaggacctgttgtcgcaccgacgacaggaccaaccgcggcgttccctacagagggtcacccctcttttgtgttntagccatacatttctagaggcgagagactttacgaatacctagaggaccgaaccgggatcccgaagggtcctcgggtggttgggtaacccaacgtttagcgtgtaccaaaaatagtgaccacgctgttggttgaaccccacgccagggacgcgtatacccaggatagctgtggtgacaccaaattccactaactcatgtgtgaaggcgacacggtcataacatacgccaaatgccggctaaccccaacaaggtttggcctggcaaacgagaagggtggctttaccacaaaggcgtgcggagaaaaaccacacgaaacttttaagcggcctaaaaggaccaaaccaataaccaacataggttccacttcattttggactatagggagatgtaacacattgcgagcccagcgctcgaccgcggtggttggcatcgcatgatctctgaagttacaggccccttaagatattgcccacgtgaaaccctctccacaagggtggggagggcacacttaagagggtaaaatacgaactggtacaccggccccattctttgtgtggcgtcctctgaaaaaaataaaaagcgtcggtttgccgattgcaattaggcgccctagggctcaactctggacatgcacgggtggcttaaataaaacaccattgagcccccacgtgaggtgtatgagaaattggagccaacccgatgggtgtccattgtttccgggccaaatgggacaaacccttattggaattgcccacatattcttaaaggacaccttacaagggaggaacgcgggacgccccaggaaagcatcctgtgcaacagcggagagcacaggcaatatcaacaccacagggatcgctactccgatataccagtgtaggattaaacgtggaggccaccccattcagtcgaatgaagaccgcacacacaagcaagataccccggaggaacacgggaacacaacgacaaacgagcgggtgggggcacaacccacaggggcggatgcaaaccgggagaaaggaaacgcgcaactcaagggggtcgacaaccaacagaacacagcgcggcgcccaaagaaacaccagcgggggcaacgaacaccaagacgaccagattgcagaacaggccacgacgcgagcaacaagaagagcgcgcactacacgacgcgacagacgaagagagacgatcaacgaagaaaacgatggaggtgatagaacacacgaacgcgcgagccaagacgatgagtcacgcaagcaagcaacgagccaa

SEQ ID NO: 682209 - DNA, 595 bp, Homo sapiens
tgggaggctgaggcggatggatcacctgaaatcaggagttcaagaccagcctggtcaacatggtgaaacactgtctctgctaaaaatacaaaaattagccgggtgtggtggcacatgcctgtaattccagctacttgggaggctgaggtaggagaatcacttgaacctgggaggcagaggttgcagtgagcagagatcgcgccactgcactccaggctggatgacaagagtgaaactccatctcaaaaaaaaaattataataacaacaaaacaaaatcaagcaattttgaagtgaattttaaaagtgcagtgttgccgggcgctgtggctcacgcctctaatcccagcacttcgggaggccaagacgggtggatcacaaggtcaggaggtcgagaccatcctggctaacatggtgaaaccccgtctctactaaaaatacaaaaaattagccaggcgtggtggtgggcgcctgtagtcccagctactcaggcggctgaggcaggagaatggcatgaacccaggaggcggagcttgcagtgagccaagatcgtgccactgcactccagcttgggccacagagcaagactctgtctca

SEQ ID NO: 682210 - DNA, 724 bp, Homo sapiens
  misc_feature (1)..(1): n is a, c, g, or t
  misc_feature (6)..(8): n is a, c, g, or t
ncggtnnntaatatacggctaggtacgaggctgggttgtgctcacctgccgcggcgactttcagtttcatttccacgggccctcctgcctgggcgcagccgccgccgtgatgcccagtaagttcacgctgccggcagctccgcggatgcgggccagtgtttcgagagtttcctggtcgttgcggggactggtcatggtgacagatcgcgagcggctgcggaccatttataaccgcgagttcaagatcagctttgggacccccgtaccctggtgttctcctccatgctgtatgtgaatgaagattgcaaatctggcctacgtcaccaagactcgggtcaggttcttcagactcgaacgctgggcctgacgtgcggttcccagaaaagaggagaatgaagctggcggtcagataatcaggcaaagaccacaagtcactggtagccaagatctttctatgacagggcttgagtatcttcatgggaaacatggtgtgggattgtggaagtccagggtgcccccatgaagcccgagatgggcagcgtccttattccgcctggatttgagccgcaaagagggtgctgaccctgaggcttcggaatggcgggaacccagtctgttacctcagtcacctcttccactctgccggagacccagttggtttcttacatgaagacaggagttgcctgtccctgtggcccggtgatggttgagcccctgtcgctgg

SEQ ID NO: 682211 - DNA, 501 bp, Homo sapiens
accgtggtcaaatgatattcacatgcatctctaagtatgggccacgagtcacaaaactgcatttaacgtgggaaacgtgccacataagcaaggaggtgatcccaacagtagtgggggcagatacccacaaaccaaagcgctgggacagtcaggacgagctgaaagggttcttcagtcagtttatgaactcgagtggagtgagacctctagactgacacgtacaacagagatgcagatccgtctaattggcaactgtcccttccattacttgctggccttggcttctagtcccatgcagcactgtgcgaccgacaggaataagctttacgattactgggccccagtgtcacaaattcatggttccgagacacttcacaacgctgggtaataaatcagctccatgaaggtaataagaagaccccaggatgtggcctatttacaatcaaccgtatccaagagaactcttgttgatctgttcttggatggctccgtattggcctc

SEQ ID NO: 682212 - DNA, 477 bp, Homo sapiens
tctttgttggattgggttaattcgaagaccttgtctttgagctctgaatttctttcttctacttgttcaattctattgctgaggttttccagagcattttgcatttctaaaagtgtgtccaaagtctcccgaattttttattgtttttttcttcaagctatctatttccttgaatatttctcccttcacttcttgtctcattttttggattttcttgcacggggcttctccttttcttgtccctccctgattagcttaataactaaactcctgaattcttattcaggtaaatcagggatttattcttggtttggagccattcctggtgaactagtgtgattcttggggggtgctgaagagccttgttttgtcatattatcagggttggcgtactgggtccttctcatttaggtaagctctatcagatgaaacgactagggctgaacactgcttttagattcttttttgccttggggt

SEQ ID NO: 682213 - DNA, 239 bp, Homo sapiens
gtcatagtagagagccctgtgaatgatggattctgttcgctgctccggtggcagcgagagggccgagagggccgtgtccacactgagaggagacaggagcacgttggtcgtgggtctcgtgctggatcgcacccggtccacgttcagctgctgaatgttggggaaggacggctgtctgggggcgtgcctgcacacctggcaagtgatgttctggagtatgcgggaggaccatcgtttgt

SEQ ID NO: 682214 - DNA, 1485 bp, Homo sapiens
tgctggggcgccgccccctcgtgggagtatgattgttgccacacaaagggagggggcgcgcttcttctttgcccccggcgtgtgtcgttgttttatattactcccctccaacagattttttgcttctctggtggatggaccacgctgtttcgtggcgattaagagtttcttcctccctctgtagtttttttgatggctcgcgcccccttcagatatgattgtgcgcccagttgttgttgcggcccccgccccagtggtggttgtgttccgccccgcttggttcttgttgttgctcccaccagggcggtatatatcatcacgtggtcttgtctgtcctgggcttttcctcttgtttgtgttgtgttgtgttgtagaaagaacggggcccccccacctgggccccccaacagggggggttaaaccattcttttcttaaaccccttggggtgtaacacacttgtgtggggggatgagaggaatgtcgcgataaagatagcccaccccttatgtcctacagcggggaagtgatcttatctaggattagtgccccacagcggtcttttcctttgtgggggtaattataggccccctccttttcccgttcgtcgctgcccccgtttataccacgtgggggtgggcccccccctcgcttatgtttgtttgagccgacattttgtgtcttggagggtgttgccttcgttttgtgccccgccccacgcttgcccctctttgtgccccgtctttcatatttctcggcctacggattatgtggggggcccccagcatgtcgtctcttggtttggcacacacccctgtggcggtgtttagatgtgagtagagctctctcttgcgggctatataatctcacaacgagggggtgaatacaccccctcctcatcatagataagagaggattgtttttctcttgttgacagagagactcccccccacacaagagggaaacaatcttctcacgcgctgtgcttctatagaggggtgtcccacatgttatatagcgcacttctcttataaaatatatttgtatatcttataaaaaaaagaaaaatatgacgcccggggccctcgtgttcttatggtggccacactataacgcggcccacggttccacatccactgtcttgagaatggagaaaagccgcgaggacctgccacgcacacctgttctccttgggtcttctctccctttggtcttcccactgagatggtggttggttcccctacaatctcctctccacatccacatttcaccctgttggtgtggagtggaatagcacgaggggtgatccaccgcacgtccttgagaggcacagtcctgtgtgaattccactgagtcacgttgtttttgtagtttttactatttccttcccaaaccacgcacgagatgtttggacaattaagggaaaaatttaattctcatcaatcggttgctgttatagtttaatccgtcaagatcttgagtatcca

SEQ ID NO: 682215 - DNA, 203 bp, Homo sapiens
ctacctctatccttcttcttctcttcatgcctcaggccgaacagctatcttccagctgcaggggcagacggggttcagccatactgatcactttacatcttctgaacagtgtatctcaacgtcttgctgtgtacagcttccaattttctgatacacttttctcacagcaccttctacatccacaatgctctctttgttgatgt

SEQ ID NO: 682216 - DNA, 325 bp, Homo sapiens
  misc_feature (251)..(251): n is a, c, g, or t
aaattttccaagtccccactatgattagctagacacgcgtttacaaacctttagctagacacagtgctgattggtgcgtttacaatcctttagctagacacaagttctccaagtccccgctagattagctagacacagagcactgattggtgcgtttacaaaccttgagctagacacagagtgctgattgggtgcatttacaatcctctagctagacataaaagttttcaagtccccaccaggttagttangatacagagtgctgattggtgcatccacaaacccccgaagcctagaccaggagagtgcttggctttgggtggca

SEQ ID NO: 682217 - DNA, 711 bp, Homo sapiens
ataagtcccgtgtccgaacccgtcatctactctagcatctgtgcaggcgcactcatcactgcgctaaagactcgggatgatcctgtctctgagtagggcttgagaacaataaccatgctaggggctagttccacgtgctgggcgtcaagctataccttcgtccctaggaagctgcatcatcgtgtttcctcactgcacagcattcagatctataatccttctaatagctatcctcttcaacaatatactctccggaccaatgaaccataaccaatataccaatgcaatactcatcattaataatcataatggctatagcaataaaagagctaggaatagcccccttggcacattctgagtcccagaggttacccaaggcacccctctgacatccggcctggttcttctcacatgacaagaaactagcccccatctcaatcatataccaaatctcgtccctcactaaagcgtcagccttctcctcactctctcaatctttatccatcatagcaggcagttcgaggtggattacacaaaccagtacgcaaaatcttagcaatactcctcaaattacccacataggatgactaatagcagtctacgtacaaccctaaataacattcttattacctatttatatatcctaatataccggatcctataatcaattaaatcagacaagaccctatatatctcgcgctgaaaaagtac

SEQ ID NO: 682218 - DNA, 179 bp, Homo sapiens
  misc_feature (137)..(137): n is a, c, g, or t
tgagaccaagtctcataatgtagccctggatggcctggaattctctctatcgatgagaatgggctggccttaaactcagatttgccttcctctgccttaggtgtgtacaaccacatctagcttagatggtttttgtnttatttgttttgtcttcttttttcttttggaggtctttgtgg

SEQ ID NO: 682219 - DNA, 929 bp, Homo sapiens
tatatctgactccttgaaagttatagctaattaaaccgtaggattgatctgcagcgtagctatccgataatctggcttatgatgtctagaatactacacaaggacagccaatgctatgtgacctagtgtgacgattcccgaggcaaagtgttgatacgcccgcatatggatcttccactttccgtgcgtctatgactagccacattgtagccatggatactattatatggaagcgctccaagttttgctagggcgttatgcatgaactccataaaagcgaaggtcgtaaacgattgctggttatgaagaggccttgatgtactggagtgctcatgagatgtcttgccacctgtttaaaatgaaccccaaactttggaccccgagcgaagacattggtccgggggatccatggcgtgggatgagaagacccttcaatgaaactgccctcggaagaatggtacgggaatgcacacgaagaatcgttggaatacgtcaagagtggacatggcattgtagacaaattggtcgtgggtgtgtccaataaaaggtcgagctagaaacgacggtggtaatctggagtcccggacagcacttattgctgggttgtgggcccttgaatttattaagctgggtgtggcgacaaagagtgatttttcacgggaagagattctttaactcaaggtgcatgcgtttcccagcccacaaggggaggggcatggcacgtgccatggaatgtgattcgccatataaccaaagaacttggttaaaggcgcatttggcggagcacaggtttcaaaagaaaattttcctccagattaccagattgtggtttaccattagaattggcttcaaagtggtcccccaaatgttcaccctgttccttaaaagggataatccagggcctcagacgggaataaggtcaggctaaa

SEQ ID NO: 682220 - DNA, 553 bp, Homo sapiens
  misc_feature (9)..(9): n is a, c, g, or t
tgagggtanatttaaccctctgggaggttaagtaacttggccaaaatcctcagtgcagtcgtgcattgggtcgtaaatagaactcggatctgctgaggggtctgggtggtgaagtcccgccctggggtcttcccaatgagacgcagacatccccttcccttagaacgggagcctgggacccatagctttaccgggcagaggcagggaaatgcctgactttggactccagcagctcgacacatcccgagccctggcccaccggcctgggtgtaaggaatccctccgactacccagtctctccgccctcccgcgcagcctcgccaggcggcagaggggacgcgcctcaggtggcctagcgccccggcccagctccgggacacatgtggccccgccctccgcggctcgccgggtccctggcctgccctggcagtccctgctctctgggagggcccccgggacaccgttctcaaccgacggaggaagacccagaggaagaaacagcccgggtacccccgcccgacccggtcaggaagccatgggtggttggcggccg

SEQ ID NO: 682221 - DNA, 219 bp, Homo sapiens
  misc_feature (43)..(43): n is a, c, g, or t
  misc_feature (60)..(60): n is a, c, g, or t
  misc_feature (91)..(91): n is a, c, g, or t
  misc_feature (95)..(95): n is a, c, g, or t
  misc_feature (121)..(121): n is a, c, g, or t
  misc_feature (143)..(143): n is a, c, g, or t
  misc_feature (154)..(154): n is a, c, g, or t
  misc_feature (164)..(164): n is a, c, g, or t
  misc_feature (187)..(187): n is a, c, g, or t
  misc_feature (196)..(196): n is a, c, g, or t
  misc_feature (203)..(203): n is a, c, g, or t
  misc_feature (211)..(211): n is a, c, g, or t
gttggttcaagtttaaatgactgttctgccccttttacatcanagaactactgacaacgnaggccgcgcctgctttttccatctttttatntatnttgctggcagggaaagaaagatcttncatgttggtgaaggtagaagtngggtggaagangttgggtggnacgacagttaaatctagagtaanaccaagctngcccaangtgtcctncaggctgt

SEQ ID NO: 682222 - DNA, 267 bp, Homo sapiens
  misc_feature (209)..(209): n is a, c, g, or t
gagatcatgccactgcacactccagcctggacgacagagcgagtccatctcaaaaaaaaaaaaaaaaaaaaaaggtggggaaaagggggagggagggcggggaagtgccccgggagctgagaggtcgggcagggtccagggaagatgagggaccacggggcaaaagtccagagagggattggtccagtatcgcgggaaataggggggtncgggggatagacacgtgggaagggtataaatgcctttggggcaactcagagagttgaa

SEQ ID NO: 682223 - DNA, 279 bp, Homo sapiens
ggaggatgattacggcttcactgtccgtcttgtttaatgagccaatgccttgctggatctccttgttactcggcatgtttagatagagcaggagagaggggcctccccagtgatctcattttaccggatggatctttcacacttaaaacacattttccccttgtttctttttctccaaagaagggcagcaggacaccgctgcttgtgtccagctcctgcagtgacagcggctccttcaggtgctttgtgtcccacagcgccacctgccgctcactcatg

SEQ ID NO: 682224 - DNA, 160 bp, Homo sapiens
atggtatcaaagctcaccgatgtggcaccttgatgagtggtaagctatatatatacccgtccaattccagtatgtgagcaatattatgttcgctaggacctcttgcatggtcggattcctactgcttctctgtgtcgtagacattttgtggatggatgat

SEQ ID NO: 682225 - DNA, 454 bp, Homo sapiens
  misc_feature (255)..(256): n is a, c, g, or t
  misc_feature (323)..(323): n is a, c, g, or t
agagttgagtgtcctgagaggtcagattgctgtcagacatggcccatgaacatggacatgagcatggacatcataaaatggaacttccagattatagacaatggaagatagaagggacaccattagaaactatccagaagaagctggctgcaaaagggctaagggatccatggggccgcaatgaagcttggagatacatgggtggctttgcaaagagtgtttccttttctgatgtattctttaaaggattcaaanntgggattgctgcattttgggtaagctgtaggagcctgataataccctggagtccttgaataaagatnagaagcatcacttgagattataccttgaaagcaattataatgtttcttaactcttccaaataagatttcttctctggaggctacttggctggtttattccttacaggatatttgtagagttaaccatttaa

SEQ ID NO: 682226 - DNA, 1459 bp, Homo sapiens
  misc_feature (726)..(726): n is a, c, g, or t
  misc_feature (1223)..(1223): n is a, c, g, or t
gtgcagagggatgtcggagagtgcaggatacgactaaagtacgaagtgctcagtttcactcttagataaaaagagctctagaagatgtaggtggtgatgaacaagcagcatctagagaagagcagtggttgacttgtcataagagatttcccaaagtctctcgaccgataatagtgtgagagtataaagggggttgtcaaaatgcattgcgatttctgacacagatatcatcaacagtcatggggattaatccgaattatccaaatgctgaatgagtaaacagtctctgaatatagcaaaaacaaaagcctacgaaaaagggtaactaagattgggctaagacctggagaaggaggtactatgaaaaaggcactgcgagtggtttaaaagtctttaacacatgtgaggtaatattgctaagcaatatgttgaaaggaccaggtagtttgggtaggggccaagcaccattatgtgtgtggtggtgtgtgagagaaagtagacctgtgggagggcccaacttatgggtctacagaaactctagtactaatccatgcacagctgaactcgacgtatcttgatctgcgaattgctttgccaggctggcagcagtgagtggcttagtttttccaatagattataattttgaaaatgctttggaacctgcgaaaaagcggggggggagggggggaaaggcaaaaatactttgaaaaattttggaaaaaaccnctaaaagccttgtgtgggtagcgacaatttgtaaagttttgcaactttcaagcaaattttttcttgtaaggatataagaaggttttattaactttgactgtaggtttaaaatttggaaccaaataaaccaatttgtgttgaactcggaggcagggtacatttataggcctggcagaaacaaaagtgtattgctaacggaaatttttgtaacaaaaattaaagaagtcctgaaaaaggttggggtggataacgtctgcgagtccaattttcctggtattataatggtgaactcccctataaagagactggcggggaaaagattttgacaaagggagggggttaaaccttggcgttaatatttaagtaaaaatgagagttctgttgggacagcgggggaattcccccccccaacttaaaccaggtgacacaccgaccttggggcaaacgaggcggtcccatcatggagctgcagaatgagtgtgtggcgaacaaagganccccactaatctgtgggcacaacacaagcgggcgagttgaacagaagaggctgccacacgaaacgaacaacaaacaaagacaaaaacacaaatggtgtggccgcggccgcgtgcccgcccagaacgagtatacaacacacaggatgcggggcgcgaccccacgagcatcgaacaagcgtgcaccgagcacatccagaacgcatgaccaaagagaaggaggggcacacaccaaacgt

SEQ ID NO: 682227 - DNA, 1058 bp, Homo sapiens
gagcgcgacgagaaggtggctcgccggcagtgcctgattctcctcgatgtcgtattcctgcccagatccgggaggaactgcaagagtgtggtgcatctgacttccaatatacttcccggtccggtcagcgattgagggggaacagcactctggcccagcgtcggcgcagtgaggagacggtcgtggacctccacgaatacccgccgactgaatataacatgaaacgtctctgtccaagacacgctaggcgcagccagtcgtacgaaggaattggtacatctaatcgtgcgagggtctacatgatattgacatcaccaccctggaaggaaggaatcgagtcccatcattcaaatttcctcaggcaagaaatggtgtgaactatgtcttcagacagatggtgcaagttatatgcagcagatacggaactgtatgtggtcaaaggaagtgcagtggtgtagcttgtcttgttaaggacaatccacagagatcttatttttctaagaatatttgacattaacggatgggaaactattgtgggaacaagagctataccaataactttgtgctcataatacataggttcccttagaggggattatttttcaattaggcccctttttgctgggaagatttaacttggttcaaaggttttgcgtcccttaaagtttttgggcccaatggaagacggaaaagaaagggcaagacaaactgacgacacgcgagccagcacaaccaaggcgaacaaccatttgttgggcgcccgcacatgggacgccatctcgagaaagaagccgttcagcgtgaaacacactaagttatgggggcgcggggcagccccagatgaagcgcagtgagaaaccggtggccaaggaggtggctcctctcgaagaagaccgcgtggggcaggcaaagagcgctggcgggtattcgcccgcgaatataaagaaggccccggggtggaacaccagcagcgtttcgcaaccaacaactccaacggtggagcctcgagaggaccatacacggaattctagaccgaggagcactgagcaagcccagaa

SEQ ID NO: 682228 - DNA, 185 bp, Homo sapiens
ggttatgacctgccgccgcgctggcatggtagagatggtagcgtatccactctggagggctatacactcgggtcccatcgaagtccgtgtcgacggtgtccttgagaagcgcccccgagccgaagtcgatgagcttgagctcgacgcgattgaggtcgataaggatgtctcagtccttgatgtcg

SEQ ID NO: 682229 - DNA, 959 bp, Homo sapiens
cgttagccctgtatgtataccaacactgccaaagtaaaacattaggtcaggcatggtggctcaggcctgtaatcccagcatttgggaggctgaggcaagtggataacttgaggtcatgagttcgaaaccagcctggccaaaacagtgaaaccccgtctctactaaaaatacaaaattagccagatgtggtggcgcacacctgtaatcccagctactcaggaagctgaggcaggaaaatcgcttgaacctgggaggtggaagttgcagtgagccgagatcgcaccactgcactccagcctgggtgacaagagcgaaactccatctcaaaaaaaaaaaaaaaccaaagtgaaacattaaaaattccctatagattttttccaggaaatattttaatggggctgatttaaataaggcggtatcatggatgataacgggaatcgattttatgtcttgggtataaaatcactggagtaaatcaaccatgggaaatcccattggacaaagattagcttggtaaaaaacagatactggggtagatttctagaaatgcgttcacatttaagacttctacatggataatagccttgtgtcatgagcatatgcgaccccgtatatgaattacgcatttaaggtcccaaatcaaggagactttagtctaggaatttgcagaaatattacggtgccaaggcacaaaagggtcttgtggaaactacatgcaggtcactagcctatgggagtcccttaaggtgtggactgaagggaatgggtgaagctggccagtgaatgggggggtgggatgaggttgtaacagtacgggggagtgacaaccagataagtcaatgattgaaaaagaagtgtaacatgttggtggagtgagatataaacagagaataatgagagggaggtcaaaaagaggaggggcaatacggagagaagtgaacttgatcatataaataaag

SEQ ID NO: 682230 - DNA, 611 bp, Homo sapiens
tgggagaacagaatctcactctatggcccaagtggagtgcaagggcacaatttgggatttacgggcaagctcaagttcctaggtttaaggtgattctccgtgacatcagactccaaagatagcggggattacaggacgtgtgccagcagtaccgggactagtgtaggatatatatgggatggaaatggggtttacaccgatgctgtgtcaaggcgtgggtcgtttagactcctgttacacatcgggcgaatcaaccacagctacaggacgtcccaaagatgaggggaataacaggcattgagccaccaggattggggcaagaaacttggacgacttttaaaagttctaacagttaaaatggtaaataaggggctagaacgatctaggggaacgaaccaatcactattataatacctgatggggtataaacagccagtagaacgttggggtaataaccgcctgttcataaagaagacagagttgtgagataaaatggtggttgagcaaacagtcaggtgtaacaagtagtgtaccatatgtccattagatttaaagttaaattcaccatatacaggggaaattagtagtgacacagagaacataagtcagat

SEQ ID NO: 682231 - DNA, 495 bp, Homo sapiens
tgtgtgggtccaggatcaccattagggaagacagagtagctcaaaaatcaacagtgaggaggaggacagcactttgagtggtatcttgctctaggagcattttcaagccatcagaagtgggactcttgaagactatttctgactttctcagcacaaattaagataataggagatggtggctccatttgaaaaacattttggttgtataatggttagcataaaacatacttttttcaagttaactcaggcactagagtatggggggcggagggaaatgtactgcagcattaaataaaactagagctgggagaatgtgtccctccttgaataaattgcaaatgcatgtgcaccgtatttgaccatgagggaaaaatgagaagccccttttccaaaaccagtggaagaagtttttcttagggacaaccgtttacttcgtgaacttactttggtgtcttacaggggaaagttaaaaaggtcccctgcctgttgtttgga

SEQ ID NO: 682232 - DNA, 198 bp, Homo sapiens
gagattgatacaagtatatgggattttgaacaggcaaagaggaaacaaagaattaaggtatccctgttgaagtggtgcaagaaaggagtgccccacccatagtgttatctacaataggtactccggggaaaggaccccaaggagtcagaccacaaatgtatgaccagcacaattctatgatcaaactctacctctagc

SEQ ID NO: 682233 - DNA, 1139 bp, Homo sapiens
  misc_feature (792)..(792): n is a, c, g, or t
gagaggggccgatgaggtgcggaggcgttggcagttgacttttgctgatggagcctctctgaagggcatattcaaagtacagctgggtgctgcagcgactggagtgcgaacttgtaggctgtggttatgaaggagcctcgtcagctatgcctttagcccctggtgaagcagttgccagtcacagtttgccaagtcaatgcggagaggcaagcagtatgtaagaccatgagcaaaatcaaatgcataaccaagctaaaccacggggcaatggagacacagagtttcattcttgtcaccctggctggagtgcagatgcagtggacattgatgatagtgcacatactaatttggcaattcctggagtctcaagccatcttccctccatgtgctctccaagtagctggggactacaggtcatgtgagcacacagcataaaggcagctgcccacaagccaggaagagaagcatcatcagaaaccgaccatactggcttcctgatctcagactttcagcctccagaatgagatgggggtgtgaaaggaaatgaaatcttgggaccctaaactcattaagccaaagggaaaagctgggccgagaactggatgatgcaacctgcttgcacctttttgcttcctaaataagatggctacaagatgaaaagctatacatctctgccatattttgcccacaaggaaattcctagtgagcttcaagatcttttaaggtgtttctgttaaaatttcacaatttcgccattgcaatgtaaatttatagcttatccttacaggtgcngtcatctccctgcccaccagacacaaaggcatatctgattgttctcctgccccattttgtctatgttatcttatgtaaaatacagataccctgcatttttcctctgccccatttgtctatatcaccttatataaaaaaatgcagagtcactgagccggacaaaggcatgaacgactatttttccctacccccgctcttacatgaaaattgtgtacttctgaatatcctgccctttcccctttaaatttggagccctcagaatcatcttcagagaaaggcatagacctgtctcccgggcatacatccttaactgtggcaaataaacctcctaaaatgataaaaaaaaa

SEQ ID NO: 682234 - DNA, 840 bp, Homo sapiens
gagaggggccgatgaggtgcggaggcgttggcagttgacttttgctgatggagcctctctgaagggcatattcaaagtacagctgggtgctgcagcgactggagtgcgaacttgtaggctgtggttatgaaggagcctcgtcagctatgcctttagcccctggtgaagcagttgccagtcacagtttgccaagtcaatgcggagaggcaagcagtatgtaagaccatgagcaaaatcaaatgcataaccaagctaaaccacggggcaatggagacacagagtttcattcttgtcaccctggctggagtgcagatgcagtggacattgatgatagtgcacatactaatttggcaattcctggagtctcaagccatcttccctccatgtgctctccaagtagctggggactacaggtcatgtgagcacacagcataaaggcagctgcccacaagccaggaagagaagcatcatcagaaaccgaccatactggcttcctgatctcagactttcagcctccagaatgatcattgcctgctcctccaagcccttcactgtagaatggacagcctgtgattttcctggcatcatgcattgactgagaaggtcagtgtggctaacttctgagctttcaacatcaggaaacccgtagttcttcacacttgaagcggctcctggcaggcacgagtcgatccttgggtacattaaaggctgatatttgaaacagaaaacaaagagaacaacaccatcaacaccactgtgtcgcgccgcccgcgccctctcaaacagttttaaaacacactgttgagagcgccggggccccatatggtagcacagtggcga

SEQ ID NO: 682235 - DNA, 204 bp, Homo sapiens
tcgattctacaggatcccctcttggtgaggacatacattcatgatggtcgatgccactaaccacatggaagcagttactcgcgatgaactttatgtggtcgtgacttgcataagtccagtccggaccctcctttggtgctggctgtgcgaagtaaaacagcccgatcacagaagaccctacctgtggtattaaattggtctcca

SEQ ID NO: 682236 - DNA, 118 bp, Homo sapiens
tggcctctgcaccagccataggtatactccctcacatccccctcttccagccagatacccgccttgacaaacgccctaatgcccgaggccctgtcaggatggccattcaacgcctccg

SEQ ID NO: 682237 - DNA, 335 bp, Homo sapiens
tgacttgttattgattagcttattgtaatttaaattttaaaaatgcagtccaggccaggtgtgagccatcatgtctggcccatggggtgtctaaaatagtcaaactcatggaatcagagagtagaatggtactggggctgaggggaagagaaatggtggggaattgctattccataggtataaagtcatagttatgcaagatgaataagttctagagaacggctgcataaaattgtgcctgtagttaacaatatggtactgtacccttacaaatttgttcagacggtagaactcacattaagcgctcttaccacaataaaataaaaattaggaaa

SEQ ID NO: 682238 - DNA, 199 bp, Homo sapiens
attaccgggctttgtagatgaagggagatatctgaagtgggcgttaaagtctagaagaatgtacagcagccgggtagctaggaaggagagaggcagaactgtaatttgaatgcataagacagcctcagaagaatttcccagtcactattccgtttaaatccagggatttaaaacccagtgtgtttttagcgtcacttgg

SEQ ID NO: 682239 - DNA, 241 bp, Homo sapiens
  misc_feature (10)..(10): n is a, c, g, or t
ccgaaagctnattatcctcacctaatttggcattttatgcttattttacaaagctgtgcaagcttggggtcctaggggtttactatggagtataaagttctaaacagaaagctcttctatcagattttggccgctttcagatagtgaaagtgctctgaaatgctgacgttacctttgaggagaaaatattagatgtcaccattttagcttaaattattggacacactaatttcaccagaat

SEQ ID NO: 682240 - DNA, 508 bp, Homo sapiens
  misc_feature (77)..(77): n is a, c, g, or t
  misc_feature (84)..(84): n is a, c, g, or t
  misc_feature (103)..(103): n is a, c, g, or t
  misc_feature (108)..(109): n is a, c, g, or t
  misc_feature (132)..(132): n is a, c, g, or t
  misc_feature (201)..(201): n is a, c, g, or t
  misc_feature (237)..(237): n is a, c, g, or t
  misc_feature (258)..(258): n is a, c, g, or t
  misc_feature (265)..(265): n is a, c, g, or t
agaggatccccgaaggtgtctgagtgctggtaaagttctgcatcttaaccctggttgtggattacacaggtctattnaattaanaaaaaactcatcaagtganaggtnnataagtgtgcttttcgttatatntcaataaaacatttaaaaacatgcattttatatatctgtttttatatatctggccatgaagtccatgtnggtcaaaaacactgagaagtaattatatgccatttngtaccttgatacaaatagctngtgtatnattagttccctaggtgaggtactgttttaatctaacttctttcacggatacaaataccctctagatactcccggggaaaaagagggggaaaagagaaagaaagaagggagagtgggtaacaggttggcactatgtgaattaccacagcaatttatttcctttccctaagtctatggtcaggcaaagggcttacctctaacaactcatcaactgctctgtttgaaggatccctggttagtaggt

SEQ ID NO: 682241 - DNA, 279 bp, Homo sapiens
ttcttagggagcactgacaggtgtttttagttagaatatgaacctaaaaagggtagactttctccatcctctgccaaatcaatgaaaaagaaaagctggttgccactaattactacagggtaggatttctgaactcagacttggaaaggtattttgatttattctttaaaactgtgcttttttcactgcctcaggagaaaagggtgttttcttaccttggtgacctttacctcccttaagttcctggaaaactgtttcttttctctccctaagacccta

SEQ ID NO: 682242 - DNA, 681 bp, Homo sapiens
gcagatggaaacaattctagtaattccactattttgaagggtgaatatgtattcacgaactgctgtcaatgagcagcaacctataaattttagctacctggtcttctgtagcatgtcaaagaatgtagaagactgctaatgcagcttctaaaactcatgttatatcttataagctatacttctagagaaaagtcataaattattaattatggcttgacaatgcgtacattctttcattatccgaaagtttaaagctagagaagaaggagagattatccaggattctatcagttctctatacgtatagctgagacagacttttccggagagtgccactccaggtatgcctttcattggcaggtaacaactttgtagtatcttggtattatctaagaggatccatgtgggtgtatgagaacatcgtctgggattgtttagtttagaaactgagattaagtaactttagcatagaccaggaggaaacagcatactcacgtgttatggctcagaaaaaaaagttcaaagatggaacattcgtagttccactttctttcattggccattacataatagtagtccttaatattctaagtatcatttgctggggagcagaatcgggtgcttgaaggacccataagcgtagatctgacaaaatctgacatgtgacacgaacctcctgca

SEQ ID NO: 682243 - DNA, 739 bp, Homo sapiens
gcgtaaaccagcgcaactcatacacctcgccacgcggcacgaaaaacgcggtttccgagaggttgttctcggcggcgatgttgtgcaattgctcggtgggcagccactcggtgagcgggcagacggccgccgggttgccgccaaaggcctgttggctgaaagcatcgacttggtagatgtccaatttcatcgcaggcgctccatgtgaggggaggctggacactagcagtggggttacggcagcgtcaaagtacagatggcgcctttttttcagcgcatgaaccctgcacggtccaggatcaaccgcgctcaacccaggcgcaacagcatcgccccgacggcaatgacgcacgcggcaacgatgcgaacgcgcgtgagaggctctttgagcacccaggctgaaatcaccacgccgaacaggatcgacgtttctcgcagtgccgaaaccgtggcgatcggtgcctgggtcattgcccacagggccaggccgtatgacgccacggtgcccataccggcaacgacgcccagccgccaataacgcgcgacgtagccacaaaacacggcacgccgtgtcactaacgcccacgcggcaagcgggatgccggtgagcaggaaaatccacagggtgtaagccgcggcgcgccggattgcgcacgccaaaaccatcattcagggtgtaaccggcaatcacaccggcgttgatcagcgcaagaacaagccctttctgtgccctgcgaag

SEQ ID NO: 682244 - DNA, 442 bp, Homo sapiens
ataaacctcgcgtcacctctcagcctcatacacatccttgctacgttgtggtgggaagactcagaagatccgagctctgagggtcacttaaccatcctacaaagcgtagagctcaggcccagactcacaacacaccaactcccagatggattcatctccctgaaatcctcaccttcttgcagttgacactggaccgatcacctgataagagctaccacaaatggatcatcaaacctatatacgtagtgctaacagtgtaaaatcactactgagtgaatactcagatacgtacttagtgtggtgctgtcaaaccatgacctcatagaccatcacaaccactccttatgaggcagatttaactgtccccattttcaaggtacgaaattgaggtaggtaatgtgcctgacccaggatcacacacccagtgagtgattgaactgag

SEQ ID NO: 682245 - DNA, 964 bp, Homo sapiens
  misc_feature (25)..(25): n is a, c, g, or t
  misc_feature (110)..(110): n is a, c, g, or t
  misc_feature (112)..(113): n is a, c, g, or t
  misc_feature (138)..(138): n is a, c, g, or t
  misc_feature (169)..(169): n is a, c, g, or t
  misc_feature (180)..(180): n is a, c, g, or t
  misc_feature (185)..(185): n is a, c, g, or t
  misc_feature (190)..(190): n is a, c, g, or t
  misc_feature (214)..(214): n is a, c, g, or t
  misc_feature (253)..(254): n is a, c, g, or t
  misc_feature (273)..(273): n is a, c, g, or t
  misc_feature (275)..(275): n is a, c, g, or t
  misc_feature (286)..(286): n is a, c, g, or t
  misc_feature (290)..(290): n is a, c, g, or t
  misc_feature (365)..(366): n is a, c, g, or t
  misc_feature (372)..(372): n is a, c, g, or t
  misc_feature (400)..(400): n is a, c, g, or t
  misc_feature (403)..(403): n is a, c, g, or t
  misc_feature (413)..(413): n is a, c, g, or t
  misc_feature (416)..(417): n is a, c, g, or t
  misc_feature (463)..(463): n is a, c, g, or t
  misc_feature (489)..(489): n is a, c, g, or t
  misc_feature (499)..(499): n is a, c, g, or t
  misc_feature (510)..(510): n is a, c, g, or t
  misc_feature (526)..(526): n is a, c, g, or t
  misc_feature (541)..(541): n is a, c, g, or t
  misc_feature (551)..(551): n is a, c, g, or t
  misc_feature (840)..(840): n is a, c, g, or t
  misc_feature (868)..(868): n is a, c, g, or t
  misc_feature (900)..(900): n is a, c, g, or t
  misc_feature (952)..(952): n is a, c, g, or t
agcatctggttacagaaagcaaaantggcttattgcagtgggacaaataaccagtttattattcaatctgaaaccaaatttcaggtgaacaatcacgtggatttagaaananntcccatggacacaatgttaaaccanttggttactaaaggcaactttagactaagcnactgtgttaantgggnaaganatgaaatcatgctggatgaaatanattcaaccatttaatgaaaactatcaagggcagaccatnnggtttcagaaaagtgaaantntcttaccagantggngatcactgcaaacatgtcaacccactatgtctgccttgggcaatatagtagggaaagttctatgttatgtcaggnnggggtnctctacattggggcaaagttgcgcaagnggnaatgggtgtnttnnattctctccatgttcctcttcagtgtccttcatccgtgtgtgtttnttggacaacatccctcctccccaggnactttgaganatatgtaaacnaagtggaccctttgcnaagggcttagatgcnattccgaagnaacagcccagtctctgtgctcctgtcgccccttctccctggtgagtgcctctactttcctccactcttctgcactcacaatgcatcttagcatctaaggatgcaaacctaagaaggagcttgatggagtgtcatcaagagagaaatcatacattttcctaaggcaagaggaaacatttgtgcaagaaatgtctggggtagggaggaaaagaaggaagggaggaagggaggaaggaagaaatctacagacagatttttggaaaaaaagggttttttttttctttactgcnctttctagtaggttagccagctctcctnaatgagtcatgaaaatttggtgtatgtgtgtntgtaaaacatatacatatttaatatatatagatgtaaaatacagatgccatntgaaaatgtaaa

SEQ ID NO: 682246 - DNA, 287 bp, Homo sapiens
gggaaggcaccctggctgcttcacctcccagccagaccctcccctgaccgcgagcgccaacatgagctgggcgtgtcgttgtgtgcagttcttgagtgctgctgtcagcgccgctgcggaccagcgtgccgcaccagcgggaggagccctgcgcgcggacgctgacgtgcagggccggagctgccggagatacattctgccgcgttcacgttatggcgccttttcttgcagcaagcaggtgcaccatgctaaggctgtgattcccacgggcgttggatgagccgggc

SEQ ID NO: 682247 - DNA, 95 bp, Homo sapiens
  misc_feature (31)..(31): n is a, c, g, or t
taatttttaagaatataaataattatatttncctattaagtaatatatagccatatatatatatatatatatatatatatatatatatatatata

SEQ ID NO: 682248 - DNA, 547 bp, Homo sapiens
  misc_feature (367)..(367): n is a, c, g, or t
  misc_feature (510)..(510): n is a, c, g, or t
gggattacaggcacgccccaccacacctggctaatttttgtatttttagtagagatggggtttcaccatgttggctaggctggtctcaaactcccgacctcaggtgatccacccacctcagcctcccaaagtggtgggattacaggcatgagccaccgtgccgagccttccttgaagttttttgttggttttgatttgttttgtttagttttgtttagttttgtttagtttttggggatggggtctcgctctgttgcccatgctggagtgcagtggcacaatcttggctcagagcaacctctgcatcccaggctcaagcgatcctcccacttcagtctgagtagctgggactacaggcgcgtgccgncaggcccagctaattttggtgtttgtcagagatgaggttttgccatgttgcccaggctcgtcttgaacaccggggctcaaggaatctggccatcttcgcctcccaaagttctgagcatggcaggtgtgagtcatcatgcccangctccttgaagtttactaaccaattgggataactgag

SEQ ID NO: 682249 - DNA, 382 bp, Homo sapiens
ctacaagcaatcctatgtacaccgcttataagttagctggcaaaagattagacattaggtcaacaatcttatttattagggctgagagtggtaacacattatagtaacagtattagaacaagtgaccctcaaggtgtatcaattataaagcagatgaaaacttgcatgacaaatatctagtaacattctctcgtaaccaagtcgatgcaagccatgctaacaaaataatagtgagaaagccatataactacagcagaatacatgttctaggctttccggtactgacagtaagtcagttgaaaaaatacaaatacaacagaacaattctagaatcggaataaatctacagtgaagtcttgcttgttccgctggggtaccgagc

SEQ ID NO: 682250 - DNA, 539 bp, Homo sapiens
ttcgagctgcattgcaagcagtgcatgtctgacacacaccatagattgtccatgaagaagcatctgtagggaatccagataggagcgttcatgagaggtgtacaagcccggaagaattacacaagcactgagctgtttattgcgccggaggatcccacagaacagcagtgagcctcaacttgtcaggcttagggagttgagcagctagacaccaattgagcgagtagtgatgtaaccagtagactaagttacatcttaccttacttctcagccgttacactagatttgaaatcactgtaaataccgtacattaaactgccaaccacaggaaacagcgaggagcagattctaagtgtaggcactgaccggcagagactaaatagagtcctcatgggcccaaggagcatccagaaaaggcactacaaagaggtaggaaggcagacgcatcagagagggaacaggatgcccaggcatctgtgacagaacacttgccgaagaaaaaaggctcggaagtcagccccatggagctgaacacctca

SEQ ID NO: 682251 - DNA, 238 bp, Homo sapiens
gtggccccatgattataatagcccagactatccttctgtgatgtctgtccctggaaagcgtagaacatccccacacagtgcccacttttgttctgacagtgttggagagcctggacacacccaccttcttcacctgggtctctgcgttatcccccgagtcttgacgggaagtatgacagcctaatactgattgtactcaggcagctgaagggtgcctgcatgagcgagcccagctcaa

SEQ ID NO: 682252 - DNA, 173 bp, Homo sapiens
gttacgacggatcttagtgaagataggaaaggcaggctcacccctttatgacatgcagttagagagacgggggcttccctattcactttggacgagtaaaaagaaggctctgaggtatcaacagcctgggctgttgggaaaaggacacagaatctgtgtatcctgcaacgcca

SEQ ID NO: 682253 - DNA, 667 bp, Homo sapiens
tgtagaaaaaaggtgacactcttaaaaagaaacccccccctttgggtttctagccccccgagaaaaaggcccccccaaatcattcttatattactttctcccgacgtatcctcgtgggcgaaaaaatatggtggcctctacaacagatagaagcggtggtcgtcttgtgggaagttattcctcctttcagacaaaatcttggttagataacgcccgcagttcgccccactctacaatgtgtgtggagacgcagcccccagttcttgtataaagacaacacaattcaccgccgcgcgtgtgttgtgtctcaccgcatcgaacacacaaagagtgccacacacacagtgtgtgtcacacagggtcgtgcgcaccacacaagagagatgagaacagcgccactcatagaggtgggtctacgcgcgcgccccacgcgacaccatgcagggcgcgtggggagtctcacgcacggatccccctccagagagacaatgttatagcccgcgcacacatctcgcggcgcacaactgcgagagaaattcctcacaaagagagagacagcgcggcggcgcaatgctcgcgcactactatatacgcagagagagagcgtccctataactaaccgcggcggcgccccccagaaacacccccgcaagcgtgcgtgacacgc

SEQ ID NO: 682254 - DNA, 1044 bp, Homo sapiens
gggacgcgtgggtattttctctttttaggaaatataaaaggtctgctattcatatttacaattgacataatggacacatgcacggcccacacggtggacagcgtggccgggggcccctttccccctctaacggcacggcccccctcaccggcaccaggccctcgtgtggcccccgactctagggcactggaaccggccctagctgcccaacatggacctgggggccaccctgctgagccggaggcgtcacggtcctctgtgcaggcacgtggggagggggtcccaggttccctgacagacgggaggcaggcacgggggagcctgactcacccagcgagacagccacggggccggcggcagcacagagcatgggaccctagggcccacgagacgcgcgtccagcggcttcccaccacccggggacacagggcccaagcaccgtgccacctacagatgggggtcgtgcaaggaggcagaaagcccctcgcgtggcaaggccgtcctcccacaacgccctgccgagagaatgggccggcgagggcccggccaaccggtgagcctcagccgcggcggtaaactcccgtgggatactgccggagacgcgtgcctccgcccacctaacggcgcctggggcgaaccaccaacagggcagagagagtctaggggatgagcccagaactgcgccccgcaaggaagccacagacgcagtggggcctgcgcgaggggggcaacacggcaagagagacgacccacgcgaaacccccccgggccaccccgcgctccagagcatcccgggcggctgccccgctagccatacaaagcaaacaaccgggcgaggaacgggcgccccccctgtggggcagccccgaggagaagcccctcccccaagtcggacacggcgccgccggccccggggggccccccctgggagcgggagcgcagcagaggcggggaacaggatcgcgggaagacacagggggagtggcactcctaaaggaagggcggcaccccagccagagggggacacccccctcagacgccaag

SEQ ID NO: 682255 - DNA, 538 bp, Homo sapiens
ttggaggcaaagaccggctgacctgccaagctggtggaggggctgaagcggctggccaagtccgaccccatggtgcagtgcatcatcgaggagtcggcgagagcacatcatcgcagggcgccggcgaagctgcacctggcaaatctgccctgaaggacctgcgcggaggaccacgccttgcatccccattcaagaaaatctgacccgggtcgtctacgtacccgcgacgacggtcacgtgaagtatgtcgaacgtgctctagcctctccaagttcccccatacaagcacaaccgggttgtacatgacaggcgctggcccttcccgcgacggccttggccgagggacaatcggataaaggcgaggatgtccagcccgatcaggaagctcaagccagcggcgcgcgactacctggaccgaaaagatacgagtgggacgtggctgaggcccgcaaggatctggtgctttgggcccgaaggcacccgggcccaaaatcctcaccgacatcaccaaggttgttgcagtacctcaacgagatgg

SEQ ID NO: 682256 - DNA, 274 bp, Homo sapiens
gatagatgcaacggaggaagtgtaagtttatttgtaggtgacatatatgttagtaaggtggcgtgattttgaagcacaatggaatacctttaaaacaggttcctatcttctggaaagaaatattgttgttgcccttggacacttgcagcgtgattggaaaggtgagggacagggcaaggcgtgacggatcaaagtcctctaatacttgtggagataggtaagggagaaatgcgtggggttagacgaggcaagttccagaggctagcgtccattc

SEQ ID NO: 682257 - DNA, 908 bp, Homo sapiens
  misc_feature (52)..(52): n is a, c, g, or t
  misc_feature (63)..(63): n is a, c, g, or t
  misc_feature (484)..(484): n is a, c, g, or t
  misc_feature (497)..(497): n is a, c, g, or t
  misc_feature (546)..(547): n is a, c, g, or t
  misc_feature (549)..(549): n is a, c, g, or t
  misc_feature (554)..(554): n is a, c, g, or t
  misc_feature (556)..(557): n is a, c, g, or t
  misc_feature (568)..(569): n is a, c, g, or t
  misc_feature (596)..(596): n is a, c, g, or t
  misc_feature (662)..(662): n is a, c, g, or t
  misc_feature (674)..(674): n is a, c, g, or t
  misc_feature (684)..(684): n is a, c, g, or t
  misc_feature (721)..(721): n is a, c, g, or t
  misc_feature (755)..(755): n is a, c, g, or t
  misc_feature (764)..(764): n is a, c, g, or t
  misc_feature (772)..(772): n is a, c, g, or t
  misc_feature (774)..(774): n is a, c, g, or t
  misc_feature (790)..(790): n is a, c, g, or t
  misc_feature (828)..(828): n is a, c, g, or t
  misc_feature (880)..(880): n is a, c, g, or t
cgggctccgaagcggctcgggggcgccctttcggtcaacatcgtagtccacnccctccccatncccagcccccggggattcaggctcgccagcgcccagccagggagccggccgggaagcgcgatgggggccccagccgcctcgctcctgctcctgctcctgctgttcgcctgctgctgggcgcccggcggggccaacctctcccaggacgacagccagccctggacatctgatgaaacagtggtggctggtggcaccgtggtgctcaagtgccaagtgaaagatcacgaggactcatccctgcaatggtctaaccctgctcagcagactctctactttggggagaagagagcccttcgagataatcgaattcagctggttacctctacgccccacgagctcagcatcagcatcagcaatgtggccctggcagacgagggcgagtacacctgctcaatcttcactatgcctgtgcgaactgccnaagctccctcgcncactgctgctatgtgcaattccacagcaagcccattcatgcactgggtnnanaaaancnntcaattacgcnncaaaaaagcacacagcccacccctaanactgctcagctctttctgggcagcaaagccctgccagccccgcgcctcaccctggcagcaaagggntgaccaaagaanctccacgcgngcaaccaaacccgcaatacaggcaagatcccaaatgnctaaaacctttcactgctcagcagctcggctganattccaggnttacccgngnaggatgatgggggcgngcattgtgtgctctgtgaaccatgaatctctaaagggngctgacagatccacctctcaacgcattgaagttttatacacaccaactgcgntgattaggccagaccctccccatcctcg

SEQ ID NO: 682258 - DNA, 639 bp, Homo sapiens
gagttttggcctcagtaactgaggtgcgatcactgagatgggaaaacttgatagagaaggtttggggaggaacagcagaagctcagcttgagacacctattggatatgcaggtggaaatgttgatagggaacgagttatatgaatctgaagtgaaaggattcagcctagagttacaagccatagggaatatttaagccatgaggagcctggatatgctgtcacataggaagagagtagatacagaagttggaaaactgagctctttatttagaagtcagggagtaaagagcctaaccaaggagatgggacaggaatggtcagtgagggaggaagaaaaccaggagagtatggtagctgaaagccaagtgaagaaaggagcatgtggtcagtgtgtcagcaagccccgttctaggttaaggtcaaaggaagacagaatcgaccactggatttagcatctctgtggaggctcctggtgagcttgatgagtggtcttaagtggagtggtagggacagagtctgactggaatgggtgcaaactgagaacagcagggagacgaatgcgagagagcaatatggcccagagaacggactccaccagaggtcacatagtgagtcaaggggcaacagcctggaccaga

SEQ ID NO: 682259 - DNA, 555 bp, Homo sapiens
  misc_feature (11)..(11): n is a, c, g, or t
  misc_feature (66)..(66): n is a, c, g, or t
  misc_feature (87)..(87): n is a, c, g, or t
  misc_feature (97)..(97): n is a, c, g, or t
  misc_feature (108)..(108): n is a, c, g, or t
  misc_feature (120)..(120): n is a, c, g, or t
  misc_feature (136)..(137): n is a, c, g, or t
  misc_feature (142)..(142): n is a, c, g, or t
  misc_feature (150)..(150): n is a, c, g, or t
  misc_feature (156)..(158): n is a, c, g, or t
  misc_feature (162)..(162): n is a, c, g, or t
  misc_feature (170)..(170): n is a, c, g, or t
  misc_feature (175)..(175): n is a, c, g, or t
  misc_feature (187)..(187): n is a, c, g, or t
  misc_feature (189)..(190): n is a, c, g, or t
  misc_feature (192)..(192): n is a, c, g, or t
  misc_feature (229)..(229): n is a, c, g, or t
  misc_feature (234)..(234): n is a, c, g, or t
  misc_feature (246)..(246): n is a, c, g, or t
  misc_feature (256)..(256): n is a, c, g, or t
  misc_feature (258)..(258): n is a, c, g, or t
  misc_feature (261)..(261): n is a, c, g, or t
  misc_feature (266)..(266): n is a, c, g, or t
  misc_feature (268)..(268): n is a, c, g, or t
  misc_feature (272)..(272): n is a, c, g, or t
  misc_feature (282)..(282): n is a, c, g, or t
  misc_feature (293)..(293): n is a, c, g, or t
  misc_feature (295)..(295): n is a, c, g, or t
  misc_feature (297)..(297): n is a, c, g, or t
  misc_feature (299)..(299): n is a, c, g, or t
  misc_feature (316)..(317): n is a, c, g, or t
  misc_feature (321)..(321): n is a, c, g, or t
  misc_feature (330)..(330): n is a, c, g, or t
  misc_feature (332)..(332): n is a, c, g, or t
  misc_feature (336)..(336): n is a, c, g, or t
  misc_feature (345)..(345): n is a, c, g, or t
  misc_feature (410)..(410): n is a, c, g, or t
  misc_feature (444)..(444): n is a, c, g, or t
  misc_feature (459)..(459): n is a, c, g, or t
  misc_feature (474)..(474): n is a, c, g, or t
  misc_feature (486)..(486): n is a, c, g, or t
  misc_feature (522)..(522): n is a, c, g, or t
aggataactcnatgcttaagaaaatgattagctttctaattatgccattaactatgagatttatancggatgtttccacatttactnaggggggttnaggtagtcaanaggctctgtgantccccccccgagccannccgcnacccgccnaggttnnngcanctgcgcgnccccnccggccgcgccncnncngccggtgtcccccccaggcgcgcggggtccccccccnttacnccccctcccganagcccgcccngnttngcagncntctnctgctgatgnagagccctccncngnangctcagacctcccacgnntggngtgccagtngntggngtgaaagangggtccagtccgtcaacatcaaaacttagatgaattggccttttctttcttcctagtagatagcngagtgtttcttccatcaccttgccaattcctagnctgtccacttcagtnattgaaaagtatttnatgcctagagtnttcaaaatgtagtgttccccagggtccacgtctctnaagccaatatacacaatatccttggcagatata

SEQ ID NO: 682260 - DNA, 229 bp, Homo sapiens
catacatgatgacctgagaggatggacacagagactgactatgggcaaatccatcaaccaaacaagaaaggggagacatagccatgccacatgaagaaacaggtcatgaaggtggagactagctctccaaggggagctactagacaaggggagctactgaccaaagggagctactgccaaggggagctctgacaaggggagctctgccaaggggagctctgccaagggg

SEQ ID NO: 682261 - DNA, 597 bp, Homo sapiens
agcgagtaagggccagagactctccgaggcggcggtggagcacagaagagcggggtcgtgggccagtgctggaccaggaacctgggcgagcagtgaggggtggcccgaggtgatctgaaggaagatttccattaggtaagtttgttgaatcagtgcgaagcgaaatgaagggaaaatggttgtgagaattatgagcagatactgaatgtaaacgcgtgtagatcctgataacttaagtgactctcatgttttccggtgatggaagaacaatgttgggattgaggaagtaaagaatgaacataaatggatcttggatttcatggatcctccagttaacgaagctagaattagatgccgaggcaaaaaggcgactaaggaaaaactcatcccgggactctggcagaggcgattcggtcagcgacagtgggagtgacgcccttagaagtggattatcctgttgccagacgctaagtcccaaaaaggggcaaagggtttgtctggatatggctgatccgagatctgggattgggacacggggactacctatagaccaggtggtgcaggaggcacaggtgtctggggtacacctggacaggt

SEQ ID NO: 682262 - DNA, 272 bp, Homo sapiens
cgacatgttttcgaccaaatactcatgtgtctgggcaacccactcgaggactgtatttgtgactacatgtataacaggttattttcgtttctgttctgtggaaagtgtacagcattccaacaaagggttttactgtcgcttttttttttggcaccccacggctgtggactggctacaatgtaccagtctgactcgtgacgctgactctacatgtcttttttttttttttttgtttttttttttttttttttttattttttttttgttttttt

SEQ ID NO: 682263 - DNA, 589 bp, Homo sapiens
ggcacacaccagtgatcccagctactcaggaggctgaagcacgagatatgcttgaacctgtgaggcagaggttgcagtgagccaagattgcgccgctgtacttcagactgggcaacagagcaagagccatcttaagcaggtctgttttctcctatgccctgagttttctgaatctctgggtttgctttgttggcaaggagccagggaattctgacctgagccagaccttaagctctatgggtatttagctggccattcaagtataaggcaaggtggtgtacctgctggcactattcagatggaggcaccaaacacccacatacctgtgccaaccagacattttccgtgagccacgcaaaggttgtcatctgtcaactgtgctactcatattcctctcagaccttcttgtgggtaagctgagtacctgaaggacagctgaacccctgtggtagcctcctatacaccactgtttaagagcctatgggaatgtgggtctgcacctttggccctcatatgatgggaccgcatttagtgcacagaggccccatcataggctgtagactcatcattttcccatatggacctgggc

SEQ ID NO: 682264 - DNA, 684 bp, Homo sapiens
  misc_feature (457)..(457): n is a, c, g, or t
  misc_feature (464)..(464): n is a, c, g, or t
  misc_feature (469)..(471): n is a, c, g, or t
  misc_feature (480)..(480): n is a, c, g, or t
  misc_feature (496)..(496): n is a, c, g, or t
  misc_feature (499)..(499): n is a, c, g, or t
  misc_feature (513)..(513): n is a, c, g, or t
  misc_feature (515)..(515): n is a, c, g, or t
  misc_feature (521)..(521): n is a, c, g, or t
  misc_feature (528)..(528): n is a, c, g, or t
  misc_feature (539)..(539): n is a, c, g, or t
  misc_feature (546)..(547): n is a, c, g, or t
  misc_feature (549)..(549): n is a, c, g, or t
  misc_feature (570)..(570): n is a, c, g, or t
ctatgcttttatcttttctttttcttgtcatgcagctcttttattgggttgttgcgttttgtgttctgtgtttgcatcattgtgtgccgtatggcctttatctcttttattagttgtttttttttgccttgcctcagtatgtttttatctatcatgttaccttaatgttatgatagctgtacattgtctaatcgtgttaagatacctgctgattccaaatgttgagtcatcttcagtggctctcttatcttttggaccttggagcacccccaccctgccccccaccgtgcccgtggcctgccacccagagccaagagggtgctgctcagttgcagggcctccgcagctggacagagagtgggggagggagggacagacagaaggccaaggcccgatgtggtgtgcagaggtggggaggtggcgaggatggggacagaaagcgcacagaatctggacnaggtctntcttnnntgtcccccngtttttctccccatgnccnacccctgtgccgcngnccctcncctgccncgttggtgtgnttatttnntntgttagatgtggctgttttgngtagcatcgtgtgccaccctgccctccagattccggagccgtcacctgatgcaatgatgccctgcccttctccattctataatttatatagatcatattgtacggctggtaata

SEQ ID NO: 682265 - DNA, 749 bp, Homo sapiens
  misc_feature (457)..(457): n is a, c, g, or t
  misc_feature (464)..(464): n is a, c, g, or t
  misc_feature (469)..(471): n is a, c, g, or t
  misc_feature (480)..(480): n is a, c, g, or t
  misc_feature (496)..(496): n is a, c, g, or t
  misc_feature (499)..(499): n is a, c, g, or t
  misc_feature (513)..(513): n is a, c, g, or t
  misc_feature (515)..(515): n is a, c, g, or t
  misc_feature (521)..(521): n is a, c, g, or t
  misc_feature (528)..(528): n is a, c, g, or t
  misc_feature (539)..(539): n is a, c, g, or t
  misc_feature (546)..(547): n is a, c, g, or t
  misc_feature (549)..(549): n is a, c, g, or t
  misc_feature (570)..(570): n is a, c, g, or t
ctatgcttttatcttttctttttcttgtcatgcagctcttttattgggttgttgcgttttgtgttctgtgtttgcatcattgtgtgccgtatggcctttatctcttttattagttgtttttttttgccttgcctcagtatgtttttatctatcatgttaccttaatgttatgatagctgtacattgtctaatcgtgttaagatacctgctgattccaaatgttgagtcatcttcagtggctctcttatcttttggaccttggagcacccccaccctgccccccaccgtgcccgtggcctgccacccagagccaagagggtgctgctcagttgcagggcctccgcagctggacagagagtgggggagggagggacagacagaaggccaaggcccgatgtggtgtgcagaggtggggaggtggcgaggatggggacagaaagcgcacagaatctggacnaggtctntcttnnntgtcccccngtttttctccccatgnccnacccctgtgccgcngnccctcncctgccncgttggtgtgnttatttnntntgttagatgtggctgttttgngtagcatcgtgtgccaccctgccccttcccggtgcctgtgggggcgccccatgtggaaggtatgcgccttgccccttccccacagtgatggtttatatatataaatatctatatgatgattttgaggggacatcccaaccaaaaccaaccaaacaaaaacatcctcacaactccccagg

SEQ ID NO: 682266 - DNA, 158 bp, Homo sapiens
tactctccgtgcccgtacactgaacattatcagacagatctgcccagctgccagctcccactttgctacaggggcccttccttaggagtcacccagcatgcggcagaagacaatggcatcagaattccgacactcgtcatcgcaaattgtcccccagg

SEQ ID NO: 682267 - DNA, 761 bp, Homo sapiens
  misc_feature (106)..(106): n is a, c, g, or t
  misc_feature (117)..(117): n is a, c, g, or t
  misc_feature (199)..(199): n is a, c, g, or t
agaaatccattcctcaggaaacccttaactgagccgagcattaacgacgttattacctgcgcactcactcaaggctctccttgtatgcaagacttgattcatgctncccagtcgttnatggacatcgtccacgcatggcgtcagccttcagcattacacgagtctaccgagtctaggagtccgcaagggtcagcagtgnaccctcgatcatgagtgttctctgtcgtaatattcgcacaaagctgccatagctgaatgcatcagcagccacggaacgtagtgactggcgacaaacagcaagagctaatcctacatgctgtacgatgcgtgacccagcagcacatccgcacctgtggtctgacaataactctcgtggccatcacagacggtggtcagctactccaagtcagcacgcacagcgtcaaatccgcactggaggctgacggtatcgatgatcgtctcaatcagccctctgctctccgttacctcgtcatgtgcacgtgtgtactgcatctagacttcaagctcggatactgcggtgtctgcgctccctcgtccatcgattcgtacgaccttctatcagctgctcggatctctaccggcctcagaactccatccggtccgtccgtgtctgcagctctcagtactcacagtcctcacagtacacgtgtgcacccacagtgtccacagcttggccagcagtcgtcactcctatctgtcgttccaagctggtggtggtcttgatgcgctcgccattggac

SEQ ID NO: 682268 - DNA, 149 bp, Homo sapiens
cggggagactatagaatatcccccagtcatgtctgagacaggcgcttttgctgagaccagcaattcgagacagggcctgccacgtaggggatcgtttgtcaaaagtggccccagactgatcttcggtggagtcagcctcatggatttgg

SEQ ID NO: 682269 - DNA, 215 bp, Homo sapiens
cccttttgggggggcccccccccccccttggggggaaaccccccccatttgccaggggggggggttggggggtgtagggtttttttcccccccccagcccccccccaaaaagggggcccccccacccccccccccccaaaattttttttcccccggggggggggtggggggcaaaggggtttggaacctttaaccgtgatttttccccttgggta

SEQ ID NO: 682270 - DNA, 106 bp, Homo sapiens
accacttgtgttttcgtcaccacggacgtctttgtcactgcttgtccacgttgactgtcgactgctcacctgctatctgctttttcttatctttttacttttacac

SEQ ID NO: 682271 - DNA, 1682 bp, Homo sapiens
tggcgtggtggtgcgctgagtgatcagccgcttcctgcctggattccacagtcttcgcgccgtgtagcttgtctgccccatcccgtgcgctgcccatgcctgccaaggcatgctgtgcccctggttgcatggctgtcagtgcacgctgtggctgctgaccccagctgctctgtgggctgcgtgctgcttgactcttgacttgtgtgcttgctcctgctggtgcctgacgtgattgtgctgctggtgctttggctgctgattgctcagtggagggcttttgtgcgtctcctgtggagtggctgcttggagatgcctgttgcggacctgctgctgttgctactttgtgcgccattgtggcttgctgccgtcctgacgcctgccccagtggttgcccgcggggacgcttgtgttgctgcagagggccctgtgggccttggcagtgcattgccattggactgtgtaccgttgcctgcaatgtggatggcggacgtgcgcccagcgcacctgtgccagtggcagagtcctacgctacacagaaggcctggcttgtgggtgggcttccgtggtgccccttttcctggctgtggcccagcggcccgtggtccggcgcgccatgacctgcatgtgctgtcttgagcgctgctttggccattgtggcctggcttgtggcgttgggcacctgggtgccttggcggtgggcgctccctttgcttgttccgaccgtgcgttcactgttgccctgggtccagggaagccgtatgcatttggcgccgccttggcccgttaagcccgattggcttatgcacagaggagcatagcccaggccccacggccgtcccaatgtggacatacgtgtcctaatggatcggaaggatccagagacaggcgcacagctgaacgccgagtcgatgtgtgcggcccctggtggcaaacactttgtttcggacgcaatggcacccgctgggataccccggtgtctctttccccgtggttagcagctgggccagcccctgggggaggttggttcagttggacttccgccgagtaaggggtttcccaagcgtcgcccgcgattcgcaaagatattgcacaacacggaactaacagcttcacattccaagttccgaacggcaccacacgtctggttcctgtttgcctgtaaacgtggaacacagtgagccagaggcggctctacacaaagcaagtatatgaacggttcgccgcaaggtttcttcaacgaatggcccacagggagattaccccaagaacagcctatacattcctttccggacaattccaaaggactggagcaatgagacagcgacaagctaagttgcgttcccccgttgccccggacagtaggcaacacttggtgacagccaccgcgctgtggaacttgcaggccttgaaagacatcaccttccacatggttggcttcgtgattcccccgacggggggtttccaccaatattccccccaactgtggtgtaccaacgagtcacggcgtacatcatgttcagcgagaaaacaaaagaccaggtgtttcgagacgctctaccagaaaggtgatcgggcacagacgacgagactcccgtcatagagctcagcgggcagaacgacgtaatgtgcgaagatttaccttcacacctgatgaccaaaccacagcgggaacagatcacatc

SEQ ID NO: 682272 - DNA, 365 bp, Homo sapiens
tacgtatcgccaatctcggcgagacgacgcaggaaacgctcaacgcgcagcagtttgcacaacagaatggccagcagccgatgcaacagtatcaggcgcaacagtcatacgcgacgcagcaatatgcaggtcaaccggtcaacaacactcagcctgttacgcgccccgtgccagtcctgccggtcaatgccccggcacccattccgcagacccatgccgcaccggcgagagtgccctcgaaagccgtcagcgtgtcatcgcggagtgcaaggccgcagcgtggctgctcgaccacggtcgatcccgatgatctgccgccgggcacggcgctcagccgcggctggtgcctgatggagctcaatcgt

SEQ ID NO: 682273 - DNA, 88 bp, Homo sapiens
tacatcctccgagctggtccagtgtgcagcagccgtctgagggggtgtgaggtggcgctggccgaaatctccgctgagctcattcgct

SEQ ID NO: 682274 - DNA, 262 bp, Homo sapiens
gttcttgaagatcctccaccatggtccgtgcatgccatctgagctctgagtccaggcggccccaattccccgacaaatgctgtccagctgcctcctgaggatgttgatgtacttgctcgaacaaaggctccaggttctgcctcacagtcttggtgccctgctcctgcagaacggtccactttgtatccagaaccttgtacctgctgctccaggaaccgcaccttgtcgataaaggaggcacacttgtagtagagggtctaga

SEQ ID NO: 682275 - DNA, 943 bp, Homo sapiens
ggcgttctgtagtggcagtctgcttgtggcccttgagcggattgtaatctgctggtattgcggctgctgaacgagtcgggagagggttcggcattttcgtgcgggatccccgcgaaggatagagctgcgtgccagagagtctcacccgtatggtgtgaagtgttcagatctccccagaacgacgtagtctgggaatctacgcaattcggtgatggcagccagacttgggtatatggaattagagaatagcataatagtttcttagagacttcatgggtgcggagtagatagagatagagaccatactggtcgtcttgggttacttggaggatcacaaatcagaatctcacttccgaagcgggggagaatgactagcaagtttgatgagggaactggagtctcccatatcgagcagggtctggacggtaacttctcgagggcagatactcgtgcgtacattgtgcgacttggcttcagtgaggtatgaagaccgtgatggacgaaggtgcttgtggctggacgatgatggatgatgacgatgatgattcactgattctgtaagttcacatgattctgcacatgcgattcagagtcgcagacaccaaggatcttgtgagaagtccatgctgtgacacctgccggagttggaggtcgcataatagggaatatgtggaagggcattttaacttgtgtcggacctccactggttcctggtccaaaggcaaatgatgatgaaggaagcctatgtcattgcagtggcgctgctttaaccgcgacgtcgttctaatttcaccggctcaatataacagcgggtggcacacagcacggttcgtatgacagataccttggagcggcgtgaaaacacgcgacccatgtcacacaacacaggggataagggataacacacgaacagacgccacacagaaagagagagggatgataa

SEQ ID NO: 682276 - DNA, 1333 bp, Homo sapiens
  misc_feature (1079)..(1079): n is a, c, g, or t
agcgggctggggcaatgcgctccatgacaaggctctgcagaaagcgcctgaaacaccgggctggcagacactgcgtggcgaggtaggctggggtcacccgagtcactgagcccccatccattggcggaggtgcgtcccgagtcacccagctacagtgacgggcgcgcgagcgaacggtaaatgagacgcactgcgacgagagcacgcagtacggcaagacatgcgagcgatcaatggatgtctgtcaggaacccgtggtgatgcatgtccacgcctggggatggaatgtcgtgtctcttctacgcttgatggtctcgacaagggaatagtgcaaaccgagagtacctcgtactcacagctggaggtatgcgctcacttgctacgtagagaaggtccaccatgggagcttgctaatagctagtacaggtaatcaattccgcgtcttcctcggaaggaaactgccattgcaagacggaatgtagttgccaacgcggactggtcgcgttcccagaaggacgggcttccacggcatacagatggactgtggcgcgtacttgggggaccccgagtgaattctttcctctgcacggagaaatagtctgctgcgtgggacgggccagcttgaattcacatgtgcaatgggcttcgcatgggaggcccaagcgcccaattgtaccgcgcagaaacgggaacgtgtaatagggtgcgaggtttcgcgcttgcaaattttattggcattggtgaaacttcttgggcgaggtggggctagattggtgtgcgaaattcgagatacatctctcttgtagcatgtggagattgatctagccattgacgaggatctacactttcggggaggggcgataaatcggttaggacagaggactttgaggctaatatttggcccttctgggtcggattgtcgacctaatgatgttggtacaaaaaaacttcgccaaatgtagcaccggtgggattggggcggcgttggatctgtgtcccctattagatttggccaactgtggtttgtagaacattggagatcgaaattctggggccaccgcgtccatggcattgtgggnaccttaaacagcaaaccgaacaggagtacctcgcgagtctcgtaagtttctatgacagtgtggccgctgaatgtttgcacagagccccacagtccctaggccataatgtacgcgctggacctccgcatttaccacagtctagcgccctttaaacggtctccttgggaacggtaagcgggttaccacattcccaagcgtaaatgtgtgggacgcggcgcatggatcgcccatagggctttagtggggcgatagag

SEQ ID NO: 682277 - DNA, 547 bp, Homo sapiens
acaggtggggcatctatggtgacagaactaggttccaattctgtcccttcacctgtcccaggttcctcatctgaaaactgtgacccattaaacctaatttcatgagcagctttcattaaaattgaaataatggtggaaaatgccttgtaaccgtgcttgatgtacagtagttacttagccagttatttcctctcttgttcccattcctaacaaaatggaaaaacgtttggttgctaggaaagagccttaaggggattttgttgttgtttgactctatcgcccaggatggagtgcaatggcacaatctgtgctcagtgcaacctccggcatagacaggagccaagcgtagtggtgtgcacctgtacgtaggttcagcctgttatgatgctgaggcaagacgattgtttgttgccaagaatttgagtctggcttgggcattaaatttgaacccttgcctttttaaaaaaaagaaaataaaacccgggggggggcccgggccccagtattccctatggtgggttttttcccggccccattggccggggtt

SEQ ID NO: 682278 - DNA, 319 bp, Homo sapiens
  misc_feature (56)..(56): n is a, c, g, or t
tggggccccccccaggggggcccctggtccccagaagcgggccttgggtttccagntgccttcccccccgggggcaatgggggggatgccccccggggtcctccaggcgggggttgggaaaggcctggcccccgggtggcctgggggtttgccaaaccccggggggggggggggcccccggccccccttcctgccccccgccctcaaagggggggggggccctttccccccctgggattttccccctgggagggggttccccggggttttatttggttttcccaaagcccccccctttaatccaaacggtttttcccca

SEQ ID NO: 682279 - DNA, 252 bp, Homo sapiens
aattcggcacgaggcactgcaggatccaagatgcagggctggtgttggcagacacgctccggaaattcttattcgatctgagtgtggcctagcagctgttggttactccaaagctgatatccccgccactagtgaaagggaacgctgcccccaggaaaggggtcaccaagcgttgcaccccggtcccagtcagaaggggggtcttgccttcctcttttttaaggcttcaattgaaacctgtattaattggta

SEQ ID NO: 682280 - DNA, 322 bp, Homo sapiens
taagcagcctgccagaaactcctgtgtacccacgcgcaagtgcccagagccatgtccacccccgaagtgccctgagcgctgccgcatcaccaacagtgtacacagccctgcgcaccatcagcagtgccagacagaaatatcctaccagtgacaccttccccaccctgccagccaaagtgtccatccaagagcaagtaacagcttcaggattcatcaggagcatgagaggatacggataattggctcacctcgttccacagctccacttgcatcttctcaccaaagccttccatggatgcacagggagcttctatctccttaa

SEQ ID NO: 682281 - DNA, 861 bp, Homo sapiens
gcatgccagaagcgatgggacgcgtgtgtgagcagcagccaaccagccgcggcccgaacaactgcgtgggaccacccttttaggggggccggggtgcatcccggcaagacgcggcccgctataaacgggggcgctaaactctggctttccgggatctcccgccgcaggacacccaccgccgcggagtgggtaagacagcggcgggtctccgtccaaatgttcggcgcacacatgcgcgctgcacgggtcctttcaaacaaaaatggcgggcgatgtgtgcaaaaaaacgcaggacccgtcgaaatgtgtgaaccgggggagtcgaccaaacagtgtagcaacaggagcggctccccaaaagcgagcgactccttgctatcccaagtcacatgcaaaccgccactgctctcaggagagccacaaagcgatggtgatcttcctcggcccacaacggggccaggggagacctctgcgcaggtttggcgcaccacgcggtaatcaagggctccccgggccccctctggagccgggcaaataaaaagttgcgtgaatttggtagttcagacacaggagaagagggctcgcaccgccaggagcagaagcgccagtgcgactcgccagccccggaaaggaggcctcatgtctcccgggcgcacctcggtcaccagacgtactcgtgcattgggtgtgttttgtgcctccaagaaggattcctggtattggttagttagatcacattccggaacgcacatcaggcccaaaaaaaatacccgtgctagaaatggtgctgtcgctttaccaaaaagacaggacccccctcccgtgacacactctttaaaaacattttagccaacaaataaa

SEQ ID NO: 682282 - DNA, 463 bp, Homo sapiens
actatagaggatccaggacagtcttaaacagcagctctcattgctctgcgacaggctgcagagggcagcaccaggtcagcacgcaggagtgagaagcacagtccaagtcacagaatgcagtctgagctggtcctgccacccggagagtagcgaggggcactggctgtgaatgcctgtctctggcagtggatgatttcctcgttcttctacgatagagactctaatgcctctcaggcccctgatggtctacaggccgggtgacgtaatcccaatgagggtaagaaaattattcctgcttttctccaggttataactggtgattatgtaggcttgtctgctttaatcttcttttctcaaagtctagtagaacacctgcttaacaacttcctgcccacccatcactcagacaaaaatgcagcgtcccaagaacaatggagagccacctccgcagccagacctaggg

SEQ ID NO: 682283 - DNA, 469 bp, Homo sapiens
caaggaccacattttaaatagcaaggcagtatataatttcagttttcaacctttccaagttttaaaggacttgactttctcgtcatttttagtgcacacgattaaaagaaacacattatttgccattttataatctctataatgcttacatttatttcaaatcttttctttttaaaagcaagctggatgcgatcatgttttaaactcaaaagcccggagagataaatgtggggtttgtggtggcgataattcttcatgcaaaacagtggcaggaacatttaatacagtacattatggtaagaatctgctcctaagaaccatgagaaggaatatggtcaaagtttgaaaattgttaaccacatgtaatatgcaaaaatattaatgtcgagcataaaaatcagtctcgttatggtggattatccatcgactagaaggcacctaatagaattatatgagaattatattctaa

SEQ ID NO: 682284 - DNA, 313 bp, Homo sapiens
tgtgctgggtcatctaagactctgtgctcctctcagaacagaatgcatcttgaatcctcttttgtagctaaattgaagtacgcgggatgtggctgtaattccagcacttgggaaggcaaagcaggcggatcacttgaggtcaggagttcgagaccagcctgggcaatatggtgaaaacccatttctactaaaaaacacaaaattaagccggtgtgatggcacgtgcctgcaatcccagctactttggggaggctgaggcaggaaaaatcgcttgaagaggggaggcagccaggggtaccgaagctcgaaattc

SEQ ID NO: 682285 - DNA, 435 bp, Homo sapiens
atcactcaaatagggatctcaacatcttctgtgtcaataaaaggtgtggaattagtagattcgatgaagacctgttagccgtgccacatggacttccagacgccattaggatagggtttagaagatggggaaatttagaagacgtttctgggcctgagtctcttaagagtagagatgcagaagagagagtgagaccacgaagagactggctgttgactgcagggcaccaccagccgccttggtggtggcattagttggatttggggccaacccagagttggaagtactctgggaggagttacttgaagttccagttgttgtttcactggaataaatctgcgtgggtaggagcagtgccagcagcagcagccccagcccgagcctggccaccattgctctgcccatgtcccctccgtcggtgcgcggcgcgtctag

SEQ ID NO: 682286 - DNA, 387 bp, Homo sapiens
  misc_feature (228)..(228): n is a, c, g, or t
  misc_feature (383)..(383): n is a, c, g, or t
gccaatctgaagtgggagcggcctctgcctcccgggttcaagctattctgctgccttagcctcccgagtagctgggattgcaggcacacgccaccacgcccggctggtttttgtatttttggtagagacggggtttcaccatgtcagccaggcttttcttgaacttctgatctcgggtgatcctcccgcctcagcctcccaaattgctgggattacaggcgtgacacncaacgcccacctgtaaccaattattttttaaagattgctaccaattggatagttctggtcatgggtccaaactttttgggatatttaaaaattgatccctggtggtgggctaacaggaattaaatggtttccaaaaaatggttggaaaattaatnatag

SEQ ID NO: 682287 - DNA, 114 bp, Homo sapiens
gtgtggtaacttttgtacataccaggatctagtggagctgagtgcaagcctcctccccatgccatctgcagagcctgtttggctaagatgggatgccagcgcggtatccatggc

SEQ ID NO: 682288 - DNA, 321 bp, Homo sapiens
  misc_feature (40)..(40): n is a, c, g, or t
  misc_feature (59)..(59): n is a, c, g, or t
  misc_feature (90)..(90): n is a, c, g, or t
  misc_feature (97)..(97): n is a, c, g, or t
  misc_feature (137)..(137): n is a, c, g, or t
  misc_feature (187)..(187): n is a, c, g, or t
  misc_feature (210)..(210): n is a, c, g, or t
  misc_feature (243)..(243): n is a, c, g, or t
  misc_feature (265)..(265): n is a, c, g, or t
tcctaaatttatatggaaatacaagaatctagacaagccnacaacaggtttgaaacagnatgagttggagggctcaggctgcctgatttnaaaactnactataaagtgtgagtggcaggccaggcatggtggctcanacctgtagtcccagcactttgggaggccgaggcagggagatcacaaggtnaggagttcaagaccggcctgggnaatatgctgaaatcccgtctctactaaaagtanaaaagttggccaggtgtggtgncgggtgtctgtggtcccagctactcgggaggctgaagcagaagaactgcttgaacc

SEQ ID NO: 682289 - DNA, 353 bp, Homo sapiens
gctcccatgattcccagcgttgtgcgagggacccagtgtcagataactgaatcatggaggcgtcttcccccatgctgttctcatggttataagtctcatatgatctgatgatcacataatgggtttcccctttcacttgattgtcattctctctcgcctgccaacatgagacatgcctttcagcttctgctgtgatgataaggcctctccggccacatgaaagtgtgtgagtttattatgcctctttttcatagtaaattacccagtcttgagtatgtctttatcaactagtgtgaatcatggactatgacaccctgtccccatcatctctcttgtccaatgctgcatcttta

SEQ ID NO: 682290 - DNA, 1814 bp, Homo sapiens
  misc_feature (625)..(625): n is a, c, g, or t
tggttgtgttgtgtttcgttatctgtggattcgtatgttggtgtgttgtgagtgtgtgagtgtaggtgtattgtgtagtagctgtgtgatttttgtagtgtgtgttgtttgtggtgtccagttgttatatgagactgggagtatgtgcattgagtgaagtagtgcatttgtgctgtgagatattttttctgtatagttcatgcattgtgagttatgtctataattgattggttgttatgtgattgtgttgtgtgtagtgtatcgttattgtggtattgttgcttgggtgggattcggtgagcttagtaatggtagtatgtgcagttatatctggttgcgggtttgtcgcgttgtgtggacgtttttctcgtcgtctcctgtttgtcgtccgtatagtggttcgtctattgttagctcatcctgatttctgttgtcgcgacgggcgctctcgcctcgtagcgtacctcgtccggctgtctacgttcgatcgcgctgcgtgttgctgtacgggcctcgattgctgctgttcctctcgttgtggtgtgatagttgtctcgtttgttgctgctggatgtagttgagttatcgtttgtctgctcttgtgttttgcatgatgtctgatatntagattattttcagcgcctgcgagagttgcgcgtggacgcactgttattgtgcgggctactcgttggtatctatggtcgcctcgtgattgtatgtatcgggggccgcccccccaggggtgtgactcgggccgtggttcctcttcttcacgtgcgataaggcgtggttgccactaaccagggggggcacccaccttaaattctggccgttgccgggctgttggtgggccaccccgcggaggccatgctgcccagctgtggtggtctcccacgccctaggctttttcgggcttgcgtggtttgcgaggcgccttcgccccctctggggacgtttgggtgtcctgtgtgtctcccgatctttgtttccccgccttttcctggtgggttgcccacctctcccggtgcgcctcgccgtgtgtgtccggggccccatcgagatgtagtgggcttttgggttgctgaagccccattgctcgaggaggatctgctgctttgggagttgtgcccttgtccgggtgtctggtctcttcggagcctttcgccccggtttcgcccacgcctctcaggacccctgtctttgggttttagaagagcccgagtttgtggggaagaaccgcaggcgacccagcctttgccagaccgattgggtcccgttttagcgcctgttggaccacccagcctggggggatcccagggtctcaggcgcccctccgtcggtcccccagatgttcgccgtcttgcttgtgtggttttgggcgtggttctcagtagtcttctccacccacgtttaaggatggtcttttaacccgtggacgttccagagatagatagctgggggtagctcctgggccatggcccaccatgtgttacatagtgaccagaacatttgttgtaccagcgcaccaaattgtaagtgttataataaaacccccagtggactggtgattgtaatagctgatcgtgactgattaaggtgattttataattgtataatgacttcagagacgcgtatgttaataaaaggaccgccctccctcccagtggtgccacatcccagttctacccccgagggtcgggccggttgaccatatttatttttgtctattttgtaggcttcccagtccccgaatcctgcttaaggttttagggtacccttccagtactttttgccaataaaagtatttcctatcc

SEQ ID NO: 682291 - DNA, 182 bp, Homo sapiens
  misc_feature (23)..(23): n is a, c, g, or t
  misc_feature (42)..(42): n is a, c, g, or t
  misc_feature (99)..(99): n is a, c, g, or t
  misc_feature (139)..(139): n is a, c, g, or t
  misc_feature (158)..(158): n is a, c, g, or t
  misc_feature (177)..(177): n is a, c, g, or t
acacccatgcccgggcaagaacncaggacgctgaatggctcncagatgctcctggtgttgccggtgctctcgtggctgccccatgggggcgccctgtcnctggccgaggcgagccgcgccaagtttcccgggaccctcngagttgcacaccgaagacnccagattccgagagttgcngaaac

SEQ ID NO: 682292 - DNA, 280 bp, Homo sapiens
aaattccagctcggtttccttcccagtcctgttgagttcacgccattcttctgcctcagtctcccgagtagttgggactacaggcgcccgccaccatgcccgactaattttttatatttttagtagagacggggtttcactgtgttagccaggatggtctcgatcttctgacctcgtgatccgcctgccttggccttccaaagtgctgagattacaggcgtgagccaccgtgaccggccagagagtgcactattttttttttttttttttgaaacggatt

SEQ ID NO: 682293 - DNA, 458 bp, Homo sapiens
cagcctttctccccagcatacagtgagctgccttttggggagcaatgccatgatcaggagcatacgtgcatgttttccgtactttcagaatagagtgccttagctaggccagaggctcgtattgtgtttctgctgaccgcagttgcatacacctgttagaagtgtctttttaggttatggtattacagaaagtcgtttcaggcttatcagatgatacttctcctatatttgaggggggcctgggattaaaagatttaatactacctggatagagaatggcttatgcggccgtttgcgctcctttaatcttatccatgcttttatttagtccagtacacattttgtcattgccacagtttactgtgtcattcttccccgaataggtaattgatagagtttatgggttttagtattaagggtaacagagtgaataccttccaaataaaaagataaatatt

SEQ ID NO: 682294 - DNA, 654 bp, Homo sapiens
  misc_feature (19)..(19): n is a, c, g, or t
ctgaccccaatgactgtcntgctacatgaagtgccccacgaggtcggagactttgccatcttggtccagtctggctgcagcaaaaagcaggcgatgcgtctgcaactactgacagcagtaggggcactggcaggcacagcctgtgcccttctcactgaaggaggagcagtgggcagtgaaattgcaggtggtgcaggtcctggctgggtcctgccatttactgcaggtggctttatctacgtagcaacagtgtctgtgttgcccgagctgctcgggaggctgaggcaggagaaccacttgaacccaggagctgaaggttgcagtgagctgagatcatgccactgcactccagcctggacgacaagagcaagactctatctcaagaaaaaaaaaaaaaaaagaattcaattgtattagtctgttctcacactgctataaagaactgcatttcatttatagcacagtgctttggttttgctttgctgaaaagttcaatttttaaaaaatgtaccagaaagtggcagtatcttggctcactacaacctccacctcctgaggcaggagaaccacttgaacccaggagctgaaggttgcagtgagctgagatcatgccactgcactccagcctggacgacaagagcaagactctatctc

SEQ ID NO: 682295 - DNA, 334 bp, Homo sapiens
  misc_feature (52)..(52): n is a, c, g, or t
  misc_feature (56)..(57): n is a, c, g, or t
  misc_feature (59)..(59): n is a, c, g, or t
  misc_feature (78)..(78): n is a, c, g, or t
  misc_feature (80)..(81): n is a, c, g, or t
  misc_feature (282)..(282): n is a, c, g, or t
  misc_feature (319)..(319): n is a, c, g, or t
tgctgcctcggacttggacctgctgctgacatgaacaacgcgcgctacctgngggnncngactttgcgcgcgtcaccntnnacccgctgcgggtgctcggggcgctgagggagttgcgggcgacacggtctggcggcctcgtgcgcgcgccaccgccgctcgctgcgcctgctggagcccttcgaggtgcgcacccgcctgctgggctgggacgaccgcgcgttctacctggaggcgcgctttgtcagcctgcgggacggcttcgtgtgcgcgctgctgctnttccggcagcacctgctgggcaccttacccgagcgcntcgtgcagcacctgt

SEQ ID NO: 682296 - DNA, 1104 bp, Homo sapiens
ggagagagaggaactagtctcgagtatttatatgtttctatgggtttataaaccctttattaaggtgattccggggggtaattccccacctaagtgcacagataaaagcgaggtattcctgggtataatggcacggaggccagtggggttacatgggtgtctggggcactgtggccaaggggcgatgtaccaaggttttctagagtcagacccggccagagaccctgcgctgaagtgtggactattgtcctaacattgcccgctgcttactcctcacagttggccacagccgacaaggacattctctttcaacagtataaactcatttcagccgaagtgtttaggggaaccagaccgttaacacgcaattgtgggaaggctggtgctccgtgggtgcggcctcagacgtgatggcgtgacttacaataagttcataacatagcatgtgtggtaaaccacaagagtttgtcagagacattagttcgcagtggtaagccaatgtaggagcccacagaaggccgaatacaaagctcgtggtgatcatttcctcgccctacgagtggacgcctccttgtggccgtgtgtgtcattcccaaattaccgtgaaattccccagtgttttataaagcaccggggtgggaactcccgtgacgtgcgtggcacgttcttccagtggcgcactaccacagggaaacagacgctcttttctcccggaattggcaccacagaagctatctctgtgggccttcccaaggaaaatttccccatttcaaacggagaatatttccctcgttggcagttgtgagtgggactcactccaaagagaccgaagaagggctacatccatgagatagcgggcagtaacacctccctcgtgctcgcaacaaagggagcgcctattacgaccccccttgaaacacaagtgtggcccctaaatgcggacagggccctcacattttaaaggaacagcatgcggcaacttaacacaggccaacgcccgacaatgtgtgcaaatcacccccattcgtgggaaagacgaaaaactccccagaaagatcaataagcttcaacactcttccactcattggggggggcccaaatcaa

SEQ ID NO: 682297 - DNA, 739 bp, Homo sapiens
  misc_feature (655)..(655): n is a, c, g, or t
  misc_feature (683)..(683): n is a, c, g, or t
gacagagagactgcaagcgaggaacttgataataaaagtgtagcagagattatgaacagcattcctcctcccccgcctacagcattgaccactgaagctggagctcctcggcttatgataactcatatcgtagaccagaacttgatatcctatgctggggagaaataactgggaccgttacataagcgcttttcctgtattatcagggccacatgggagaggcgaatccaatgtgattgatactatgctttctgtgtctggctatcgagcacaactaataagatctaaaaaactctcagtgttaatacatacttctgatgaacacacggacattcatagttgtacacgagaaggtcatcttctacagataattgataatgaaaaggatgattatgaagtcattcctaacactgagatctatgtatccagagcgacctgcagagaaatactcctgtctatcacataagaggaaggagaaagacatttaaggatgttgtaaatcttgttcgaagccatgggattgacttggaccatactagatatttaattctacagggtgaagttgaacaacttgctgtgatgagaccaaaaggccagactgaacactatgagggcatgcttgaatatttagaacatataattgcttgtggacgcntaaatgaacctatcttaagccttgtgtnggagagtcgaaatattaaatgaacacacaggagaggttcagggtacagtggttggg

SEQ ID NO: 682298 - DNA, 130 bp, Homo sapiens
tcagtagcggagcacgcctgctggggtatgttgtgttgttcatgtggtgggtgagtgagccccattgtgttgtggtaaactatgtcgagggagtatagggctgtgactagtatgttgagtcctgtaagta

SEQ ID NO: 682299 - DNA, 109 bp, Homo sapiens
cccatgcatataacataccgagatcagacgagatcgggacgcagtcagggtggtatggccgtagacggcagaggcaggaaggcttccatgcttctgcccctcaccaaga

SEQ ID NO: 682300 - DNA, 1057 bp, Homo sapiens
gagcagatcttctgctcttcccagtagcatcagttaagacatcctcgtgatgtcctgctgcactctacaggcaaggatgagctcatacacttgaacagctttactacttgcgatcctgcatgtctgcggtcccaggcattctccgttagactcgcgaataatggctgacagcgcaatgcatccgaggagtaggcgcatggcgtgccaaacgaggctaggggacctcttcagcagtgatgattgcggaagacgatgttctaagcaagatcacgtgttgcgagttctccctgtgcctggagtcagtaccttaggcctcggcgagcggcgcagtgtagcatgtccctatagtacgttccccttgcgagcaagaaagcatcgccacgtagcgaggcaccatggagaggtgccacgctttgcattcaacttattgggcccttgaggggaccaagatcgcatccttgactgccaatagacgccggtcaaaggtgaacccatagcttagttggcccccccaggacttccagaagcctgtgaagttgtgaaggaaaacaccaggagaagacatcacgttctaaaaggttcgacccccttcgatagaggttacctcgtgaatagcattgcctagaattagcacaaccacccaagcgacaagagacacggaacgcgaggaaaccggaccaagaggcccctagtttgaaggcccacccaagacacaacagggttcctagatcagagttgggtccccaaggtcgtagcggcaacagtcttagccccccgttggggcctggagtcccagaattctaaagcattcccttggacttgaagtggaactcgtagaccaagcgtcaattagcccttttaaggccgaaacctttggatttgaaggccctccctttggtggtcaccccttcccaataccggattatccctgtggccttagttcactagccagagggacattcccgacaaagcgttgggtggataggtttgggtcccaaaggggcacactagggggtgggtcggaaagaggataggaccatcgctgattagccccaca

SEQ ID NO: 682301 - DNA, 940 bp, Homo sapiens
ggtaaatcgcccaggaagcaactggctacaaaggccggctcgcgaagaggtgcagccctcatagcatggcaggggtgtaagataacctcatcgtttaggcagagcactggatactgtgtgacgctctcagtgtaaattagtatgttctcatgaaggttccatcatgaatcttcgtgaatgcgctaaagttcccttccagacagttctggtgcgcaagaagttgcttcaggacatttataatgcaagatctgcgacttacctagagatcgcgcgcataatgcggtggcatttgccgggcagcgtcaacgtgatggacgtatcgtgtggtagagccatgcttggatatgcactggcagatcctagtgttggttattccaatagaccaaaaatgtggtagccaaatgtgatgcacagagggaccatccaatgcatatgacaccggctcggcaaatagacgctgggagcaaacggatgacttaaagaatgtcccagcctcaatgcatgggggaagactaatttacgtttccatccattaaaaaaacgacttgtaagggtgcaatttcacaaaatacctttttgtagaggggcggatcctgtgcgtaccccccaggagcaaattcactgcgaaaggcccagcatctcatgtgaggcacccgttggagaacctccccatggatcggccagggcgcagcacactttcggcgcgtctccaagtttagagatggcccctaaggagtgaaaacgccgtttggtacctaaagaaccggttcgtgaccggaggagatttgcgaccccgcacctatactcatgcagaaggctggggtaggggattgaaccacaaagttttgcgtagaaaaggcaattcccaccacctttggtacagtgttggtcaacaaggtgtggaacgagcgggactgctaccccggcacagggcggaccc

SEQ ID NO: 682302 - DNA, 410 bp, Homo sapiens
tgcactgtacactggaaaatgattaagctgtttctcaggcagaaggctaagatcacgtgcaaaaatggataaaaatgataaatttgacactatatatatttaacacaataaaaatctaaatgattaaaatggtatatttagtgtacgtatattttacaataaatttttaatataaaaaagtggggaaaagagagagagagatgggacagtcattgtgatcacatagacatacatgaaacaaaatttctctatggagagacttgaacatggaagtctgcaaactcctagctggatctgacgttagatctaagttgaacaagtttctggttattagataatgtcttgtactgaacaaaagaataactcagagtgctaaattgctgccctttgcagctcctcaaaaagttaaa

SEQ ID NO: 682303 - DNA, 422 bp, Homo sapiens
ctactgaacaaaatattatgtggagaaaagctgatggatagattgtcccagcacatcactctctattattttatatgtgcggtccgttggctgtcaaaagggaacatgctggggccgcaaaatgaaatacttgtaaatgtatattgtaaaatgttttgtgaaatttattatagaaaaaaaatcttactacattaaaaaaaatctggtgtgaacatcatacgactttccttatcctcaaagcggtcgaaatcacgcagccagaagcacacaataaaggaactgatattttgacattgaattaaggatgttaactactacttctaggggggggggtcaactctcatacatttttcgatatctctaaccgtttagctgcaacagccatatttgtcgcaaaagtcggttgaaatcacgccgtccgg

SEQ ID NO: 682304 - DNA, 189 bp, Homo sapiens
acatcagaggacaacgatagcctatgagtgcgacacaaatacagcttgctctatcggtaaatccatgctaactcctagcgagagcaacataaatcctcacactaaaggctctactagcaatgcaaagaaaaccaaacccagctgggcgagaggcctcacacctgcaaccccagctgctagagaggctga

SEQ ID NO: 682305 - DNA, 793 bp, Homo sapiens
tacgtgaaagtatatcgtatggcatagcttaaacagttatcagcggtagctagtgtatatcctctcgtcacacagatctctgatagcaacgtgtcagctcttctagagagaggtgagagatcttccataaggcttcagtagctcgtatgacgcgtgagcgtgtgttcacgagatcggagagacacgtaggtgtgttgattgatctctcctcgccagagagtgtgcatatatgtgcatctaaggttcatataacagcgttcaactctaagtgaaagtatgatcatcgtcttacagagctatgtagcatgatcagctctctccagtcattgtgctcagtatgtcgcatgtagtcaatggcggatatttgtcatgcaacactgagccctgttagagtaacatgtatctatagtgttgtgcacagcgcatcagtctgttcagattgttcacaacataggatcacacttatcttaggtgtttgagtcatatacatagagctgtagtatacacttcgcgctatgtgtaggtgtagccagataatagatcattatgcgatatgtgctctaagatatgctatgatagctcactaatttgtgtcatgagatatgaggctatccacaagaggtgttattgagtgtggtgagtcatgcaagaattgtgatagtagtattatgcctcagagtcacaggcaggctgctattcactcatctggacagtcatcattcgtatatgcttcatagtctgagccgcatgaatagatagagatcaatgccgttatgtcacgatacattcggcc

SEQ ID NO: 682306 - DNA, 355 bp, Homo sapiens
  misc_feature (1)..(1): n is a, c, g, or t
ncattatacgattcgtgctcggtacccctctgatcaggctgatgctcacatgctcacttgtctattctccacgaaatttagttttattagtagtcctaaagtgttgatctcaaacaagtacatcagaaaaatcatgttgctttctctcatcttactttttcttctcagatttctcccttcctagaacatttctctctgtttagcactaatgttcacctcgtattttttggaagtgcaaaaatctcaatttgtgtctgtttacagctctctctcctcactgctcacagcaaggggttctgtatcagtggatttcattttgtagctgctgagatgttaaggcaagcctcagcatctg

SEQ ID NO: 682307 - DNA, 240 bp, Homo sapiens
gagccggtaccgaatctcgacgagtggtgcctgtttcctggctgtgtctatcacacttcgtatatatcaccttcacctctctgtgttctatagatttgtgcaaagagcgggatcgatttagaagggttatcaaagaagctgttattaaattgtggtagggttgattattattctcaagatggtattgtttaatgttgaggtggcaactttctcctctatggcccttagagcgttggcctg

SEQ ID NO: 682308 - DNA, 645 bp, Homo sapiens
  misc_feature (11)..(11): n is a, c, g, or t
gagcagaagancgacgaggatgactagacagcaaaaaaggaaaagttacactaaaaaaaaaaaggccgccgtgacctattcaccctccacttcccgtctcagaatctaaacgtggtcaccttcgagtagagaggcccgcccgcccaccgtgggcagtgccacccgccagatgacacgcgctctccaccgaccccaaccccaaacccatgagaattttgcccaaccaggggaaggacaaaaagaacctaaaattccaaggccctgcttttatttcttaaaagtactttaacaaaggaaatttggttcggtattccttctattatcacattttatatataaggtacatcatcgttcagggtcagccattttaaatgatctcggatgaccaaaaccagccattcgcgagcgtcctctgtccctactgtctgactttactcgtggtgtggaccatgtccattatcaatctcaaaggagcaacccaaacaccctgtgtaaaaacaagccaaaacatgaccaaccgacaaacaccatcttattccgagcataccagacaacttcgggggtatgtaccttagctggtcactcatacaacatagatagcggcagcactagcagccatggttactacaggccacaacataacag

SEQ ID NO: 682309 - DNA, 381 bp, Homo sapiens
gaaccagttctacaagtgactgtgttttgtattactgcgaagatatggaaaatgtagtgcattaccaatttaaagtaattgtaataataacgtcttgatttctacattccttttctgaaccttcttggaggtttcctttcagaagcaacttttccatgctcttactacaaattcctttttagtaggaatccagaagtgttagattgaatgggaaagcgcttaatgcatccgggcttggggtcacagatcgaaatgtctcctgtgtcacatattctggaggttacatctttctgtgacaacagggagtttccttatgcattcttcatttgctgctgtttaagttgacaacttccttcccaataaaaattcacttacacctcc

SEQ ID NO: 682310 - DNA, 623 bp, Homo sapiens
  misc_feature (553)..(553): n is a, c, g, or t
  misc_feature (579)..(579): n is a, c, g, or t
  misc_feature (581)..(581): n is a, c, g, or t
  misc_feature (601)..(601): n is a, c, g, or t
  misc_feature (613)..(613): n is a, c, g, or t
aataccccctttcttggtttctctcttccccctaaaaaatcatttttccccggttcccaattgcttcttgtctccccaaaaaagaactttttttcatttatccccccctcccgttccccctttacaaatccccttcctttcttttcattctcccacatcccattccctctcagccttttcattttcggaagcctccttggcaaacgcctcccacttctcttctccagtaacaggttgtctctttcttccatttccaattctattgctgcccctgccactctctccatcagtacggtgctcttacatatccttcatcctctattgccatcctattctctctaaggtaatcctcctcttcctcttccaccataccagcaccctgatcccttctctccccaatatccaaatttctccttgtttctcagctgttctcttataaacattgtttctccctgtacactgccctctccaaatcacatgatggctttgtctttcctcctcctcgcaaacaactccatcccatttcaatataaataacatcttattttttccntatccaccccgcagggttccaacccngnccgttcagtcatcattaacngccgccgcctgnggattgaata

SEQ ID NO: 682311 - DNA, 391 bp, Homo sapiens
tcaagtgatcctcccacctcagcttccgtagtagctgcaactacaggtacatgccaccacacctggctaattacttttaagtttattgtagatatcaggtcttgctatgttgcccagactgatttcaaactcctggattcaagcgattctcatgcctgaggcgactctcatgcctcagcctcccgagtagctggaattacaggcatgcaccaccacgcccggctagagtccttgtctcttttaaaaaaaaaaaaaaaagaaaggcctggagcagtggctcacacctgtaatcccagcactttgggaggcctaagaggcaggatcacatgaaaccaggagttcgagaccagcctgggcaacatggcaaaatcccatctctacaaaaaagacc

SEQ ID NO: 682312 - DNA, 985 bp, Homo sapiens
ggagagagagagagaactagtctcgagttgttttttttttttgggtggcgttgtttgtttaaactgaccacttggaaaaaaccccgtggttatctggtggattttcattgcccgttgctcccgtgcctctacccccacccctttttgagtcgggtgactcatttttctctgtgctagagactcggtggcccaggcaggaggtgaacagcatgccactccggaaggcccgtggggacccttgtgcctgtgctcgccttcaggtcaccagctgagctgcgataggaacaactctgatatggatgtcagcaaacagccaaaacaaatctttccccacccggccctgtgctttatgaagtctttcttcccccaacttcttgaacgatgatgattattcagacaaagcattggatgcttatggacagcacaagaaagaaacaacacaaaaaatatattatattatgtccaaaaacgagacaaatccaagggtgtgaggtaccacgagtgtctgcatttagattcccacaaaaccacaaatccatgttgcaacaagagttcaagtccgtacacgtgtgacttttggggtagacccgtgtgtgtatagacatgaagtgtgtgtgcctcaagccctgtttccctgtgaagatacttacgagtgcgcaaccatatttctccaggtgaaccaaagcgtctcgaagcacaagacaggcctctcaagggccatagactctcacgctattcacgtggttaacccggaacaaatgtcatgaactgtcgtaccccggtggtgtctcccgacgcattttggtctaccttgagccgcccccttgtgttttgccccagacaaccactggggccccaacgtagaggttttctactcttaatcatctccagttgaatatcccccatttgcaccggtgagacactcgaggggcctacttctctgccccctttacattgacggctgtctcggcacccgtttgctcct

SEQ ID NO: 682313 - DNA, 416 bp, Homo sapiens
  misc_feature (8)..(8): n is a, c, g, or t
ccacgatnccctctccctctttccacggtctccctctgatgccgagccgaagctggactgtactgctgccatctcggctcactgcaacctccctgcctgattctcctgcctcagcctgcccagcgcctgcgaccgcaggcgcgcgctgccacgcctgaccggttttcgcatttttttggtggagacggggtttcgctgtgtcggccgggctggtctccagctcctaaccgcgagtgatccgccagcctcggcctccagaggtgccgggactgcagacggtgtctggttcactcagtgctcaatggtgcccaggctggagtgcagtggcatgagaggatgatgggaatccctggtcgcccgtgggccctggcaagaccccactcccagacctcactaaagtgatcgtggggttgtaa

SEQ ID NO: 682314 - DNA, 865 bp, Homo sapiens
  misc_feature (322)..(322): n is a, c, g, or t
  misc_feature (340)..(340): n is a, c, g, or t
  misc_feature (354)..(354): n is a, c, g, or t
  misc_feature (364)..(364): n is a, c, g, or t
tcctgggactgggtgagtggcgtcgtgcccaccatgcacttaactatcgctgagggcttgtcaaggccaccacagtgggccagatgggctgtgcttcctcatggtctgtgatgtacatcactggagctggcctttatgctgctcgaattcctgagggcttctttcctggaaaatttgacatatggttccagtctcatcagattttccatgtcctggtggtggcagcagcctttgtccacttctatggagtctccaacttcaggatcgtacggctaaaggcggtgtacgatgacacctttctctgagcttccacctgcggggnggaggaggaacttcccangtgctttaaaatantcttgctgangtgagagacgagtctgatgtctgttctagaagaactctaagaatcagtacaacaagcttcagccattcacacccatggcaataattccattccatctcctactggggatggggctggcaacttagcatcccctcctcagaggatctaccgccctcacagagacgattgaactcatgtgagattacctctcctcaccatttggaaatatggaacggactcttcgaaaatctgtctttcttctgagaacatgtccctcccttaccctatccttaacttgtatcctggcttataacaggcatccattttgtcagcacacttttcacacaacaattatatacccggtcccatctttctagggcctggatctgcttatcgagccaggaagaatagagccaccaacttttagcttagccgggctaatcatggaacgtgtgtcccacggttcaaggtaaccttgagtttaaaattgttctattggcagagtaatgtaacatttaaagg

SEQ ID NO: 682315 - DNA, 549 bp, Homo sapiens
  misc_feature (474)..(474): n is a, c, g, or t
  misc_feature (476)..(476): n is a, c, g, or t
  misc_feature (480)..(480): n is a, c, g, or t
  misc_feature (499)..(499): n is a, c, g, or t
  misc_feature (504)..(504): n is a, c, g, or t
  misc_feature (520)..(520): n is a, c, g, or t
gagatgtgcggcggaaacgctgctgtccgagttatgttaggactgctgcttctgggactcctgtatacccgcgaagtctgacctggtggtgtcgtggagcctgaatcctggaggagctgagtgagatgcgttatgggatcgagatcctgccgttgcctgtcatgtgggacgtggcaagagcgcaatcttcaggacggtgtgtgattggtacgtccgtctaagtacaaacagcgctatgagtgtcagcctgccagactggagctattcagttccagcgtgacagggaggaggaaacaacctgcttaccaagggcctgggatccctgaggttgttgagcccaatgagagatgctccctgcttgctgaagacgaaggactggtggacatatgaatactgtaatggacgccacatccagcaataccacatggaagattcagagatcaaaggtgaagtcctctatctcggctactaccnancagncttcgactgggatgatganacagncaagcctccaagcagnatcgtctatacgctacaacagccagacct

SEQ ID NO: 682316 - DNA, 141 bp, Homo sapiens
tctgacgcagtcgcgtggcatgcatagtcgtggctgtttgtgagatctgccacctgctcctggttcaattcatccatgtccacctccacgtcgatgtcggggatgacctcatcttcgtccgagttgcgctcctcctcagct

SEQ ID NO: 682317 - DNA, 168 bp, Homo sapiens
actgcatccaattgcatgccattgcacgccgggcagcttcctgtgaaaccaaagtctttggtgttcctggggggagtatggtatgcaaatgctgaaacttaaatgtgaattgactggaatgtggcaccaccatgtgatgatggatgcctgctgtgctgttgataagca

SEQ ID NO: 682318 - DNA, 310 bp, Homo sapiens
  misc_feature (46)..(46): n is a, c, g, or t
  misc_feature (142)..(142): n is a, c, g, or t
  misc_feature (229)..(229): n is a, c, g, or t
  misc_feature (279)..(279): n is a, c, g, or t
tttaaacgttataaataaaaatactatgctgcccgggcgcggtggntcacacctgtaatcccagcactttgggaggccaatgtgggtggatcatgaggtcaggagttcaagaccagcctagccaagatggtgaaaccccgtntttagtaaagataacaaaaaattagctgggcttgatggcatgcgcctgtaatcccagctactcgggaggttgaggcaggagaatcgnttaaacccaggcggcagaggttgcagtgagccaagatcgcgccattgcantccagcttcagcaatagagtgagactgtctc

SEQ ID NO: 682319 - DNA, 117 bp, Homo sapiens
  misc_feature (2)..(2): n is a, c, g, or t
antactccttgacgttccgtcgctggtatcgcagcgtggcggctcagcaagcacaatataaagaccaggtcgctttctttcacggctgcttcgttaactacaaccatccgcagttag

SEQ ID NO: 682320 - DNA, 460 bp, Homo sapiens
  misc_feature (91)..(91): n is a, c, g, or t
  misc_feature (167)..(167): n is a, c, g, or t
  misc_feature (202)..(202): n is a, c, g, or t
  misc_feature (291)..(291): n is a, c, g, or t
  misc_feature (296)..(296): n is a, c, g, or t
  misc_feature (425)..(425): n is a, c, g, or t
  misc_feature (453)..(453): n is a, c, g, or t
  misc_feature (460)..(460): n is a, c, g, or t
gtctggaggatgcctctcttcgaacattatacaagacaggttgtagattgcagctgctgatgttaacaacattggaaaatacagatctgcnggagcatgtacagctgcagcattcctgaaagaattcgtaactcatcctaagtgggcacatttagacatagcaggcntgatgaccaacaaagatgaagttccctatctacgnaaaggcatgactgggaggcccacaaggactctcagtcatgcctttccgtagatagggaaaggcatgactggggaggcccacaaggactntcatngagttcttacttctttcaatcaagacaatgcttattcagatactcaaaaacgtttcactctgtcttaaatgaacaattgaatttaaaagtttttgaataaatgatgaaaattttttaactggagaccanaggatggtattttaaaaaattgtaggancacaatn

SEQ ID NO: 682321 - DNA, 105 bp, Homo sapiens
agagagagagggaggagggaggttcctcctgtcccagaaacccttaagagagagcgagggaatttcgcagagctgtaggatgcaacgcgcctatagaagagaggt

SEQ ID NO: 682322 - DNA, 401 bp, Homo sapiens
  misc_feature (91)..(91): n is a, c, g, or t
  misc_feature (167)..(167): n is a, c, g, or t
  misc_feature (202)..(202): n is a, c, g, or t
  misc_feature (232)..(232): n is a, c, g, or t
  misc_feature (237)..(237): n is a, c, g, or t
  misc_feature (366)..(366): n is a, c, g, or t
  misc_feature (394)..(394): n is a, c, g, or t
  misc_feature (401)..(401): n is a, c, g, or t
gtctggaggatgcctctcttcgaacattatacaagacaggttgtagattgcagctgctgatgttaacaacattggaaaatacagatctgcnggagcatgtacagctgcagcattcctgaaagaattcgtaactcatcctaagtgggcacatttagacatagcaggcntgatgaccaacaaagatgaagttccctatctacgnaaaggcatgactgggaggcccacaagactntcatngagttcttacttctttcaatcaagacaatgcttattcagatactcaaaaacgtttcactctgtcttaaatgaacaattgaatttaaaagtttttgaataaatgatgaaaattttttaactggagaccanaggatggtattttaaaaaattgtaggancacaatn

SEQ ID NO: 682323 - DNA, 92 bp, Homo sapiens
gcattcggcacgaggaggcagttactacagtggcagggttcttaataacaaggtctacctagcatgaaggatttaacattctcccatccctt

SEQ ID NO: 682324 - DNA, 672 bp, Homo sapiens
cgtgtagcggtgatctgatggtggtgaattctatcagctttggttatgtgttaaaaggccttatctcatctacactttttattgtgacataattcatataccatacaattcacccatttaaagtgcacaattctatggcttttagcatattcagagttatactaccataatcaaaatcaattttagaacactttatcacccccaaaagaaaccttatactcattagaaacaacttctgattaagtgtaggaggaatggggtatagggagagatttgttacaggatacaaaactatagctagataggaggaataagttctaatgttctataccactgcagcacaactataattaacaataatttttagtctccagtaactaagaggatactaaatggtcccaatgcaacaaaataatacaatttgagatggatatgctaattaccctcatctgatcattacacattagagtatcaaaacatcatcactatgtaacccataaatatattccattattatattatgtcaattttttaaaaaaggctgagtgtagaggcatgtgcctatattcccagccactcaggaggctgaggttggaggactgccagagcctgagttcaagaacgcagtaagctaagatacaccactgtgtccagcctgggaaccaagatcct

SEQ ID NO: 682325 - DNA, 837 bp, Homo sapiens
ggtgaggaggatggatcacctaaggtcaggagttcacgaccacccggggccaacatggtgaaaccttgtctttaataaaacagcaaagaattagctgggcatggatggcgggtgccgtgtaagtctcagcctacttgggaggctgagggaggagaatcgcgttgagccagggaggccgaagagattgcagtgggccgatggatcacaccactggagctccagccgtgggcgacagagtgagactcgtgcctcaactaagaaaaaccatagaaaagcaagaaaaaaaaggaagggggtgggccgccgagcgccgaaggaaggtcaacaccctcctgtaggggcaggggccaccgagcatccggaatgaggggagaacggcgtcccgaagggaagatctggcgtccagaaggcaggggcggggattgcacacagtaaaaagagctggggggacacagggagtttcggacaggatgccagagaggaagccgcaggagctcaggctgctgcaagccgagctctccaggcggacccatataacaattggctccggggcgggggaataaagcagcacaaggatgaagtgaagacatctgctgagactcatgggcataccttatctagatgcgccaagtgagggaacaagccagtgtgagcctgggaagatggcacagctaatcctgcgggtaccgacgaagtgggatgccaacatccggagccgggcatatggaaacgatgcaacgaagcacagcgccaacacggatacactgagccgattgacaactgggcgacaagaaacagcgggacgggaccggaaagcggacaggacaaacagcgagc

SEQ ID NO: 682326 - DNA, 491 bp, Homo sapiens
gggtgccttgggttcacttctaagaagatactactacatgggggagaaatgggtgggctcagcaggacaggtctggcgcctgcccttctgggctgcttgggctggcgaggtgagggtcctgtgctgacctctgccatggcctgccccgtacacattatgagcgtaggagcctgctggtgacagacctaggagacccattccattcatgcccagaatcttttcaggacccgggtgccaagggcagaatgtggggtatgatggacaatgccctctccccacccttcaaggggccgggggttttcttaggtgaaaggcccctttggccgaaatcttggacttgaggggccaaattcccttttggtgaggtggggtgaaaattcgtaaatcatgttccaaacctgcttccctgtggggaaagtggttatccgctttacaatttgccccaccacattcccaaacccggagacatataagtgtgaaaaacccgggca

SEQ ID NO: 682327 - DNA, 864 bp, Homo sapiens
  misc_feature (430)..(430): n is a, c, g, or t
  misc_feature (739)..(739): n is a, c, g, or t
tggaactgtccagtctggtgtccacaccagggaaacgtctggcttccagtatagtcagcctcatattccacttaccgacaaatgttgtcgatacactccaaagggtgcccatgtgtacactttggttaacctacactatcctaacacactaggcagggggacgatcacatatacccaagacaagtactgcaggacctgtgggaccccgtgcaaacctgaaatcgaacttgggactacgacacacatatagtatagcgcaagcgccacaactaaagatatatgtatagtcatgatcggtctctgccttcgatagacgcccgatagtaacaagtatcctccactcacactagtgcccggggacatggacacactctacgccacgacagcactaacgacagcctcgttctttctcccaagacttacttcactnctaagactgtaaccgggttcgatgtagcacagacggcaccgacgtatctaactaccgacagcgacaaacttatctgaccatccatggaccactgtaaccacgttccattaggggtacttgacatacaaactagtgatacatcgggtctcacacctacgggaacattccccacaggggttgcggcgatctctgtacaacaactggattgggatgcccctatcgtgtatctctccgatgtgtttatttcgccacaaagagtatgatttggtagtgaaacatcgacatgtaaatttaagggggaaaagggtntgttataaattacggttgtaaagaaaaatactacggttaggtgtaagtagcacaagagttaatgtggagaaaagtaagtatgggtgtagttattataagggggcgtcatagattatgcgtgttac

SEQ ID NO: 682328 - DNA, 120 bp, Homo sapiens
ttaacttagggaaccaaagactggaaacgacagcgggggggaggcagaaggagctgatgagcatccaggagaggaggaagtaggaagagcagtgtcctactgtgtgcccctacgcaggta

SEQ ID NO: 682329 - DNA, 424 bp, Homo sapiens
  misc_feature (4)..(4): n is a, c, g, or t
  misc_feature (81)..(81): n is a, c, g, or t
  misc_feature (84)..(84): n is a, c, g, or t
  misc_feature (86)..(86): n is a, c, g, or t
  misc_feature (93)..(94): n is a, c, g, or t
  misc_feature (112)..(113): n is a, c, g, or t
  misc_feature (122)..(122): n is a, c, g, or t
  misc_feature (124)..(124): n is a, c, g, or t
  misc_feature (126)..(126): n is a, c, g, or t
  misc_feature (128)..(128): n is a, c, g, or t
  misc_feature (135)..(135): n is a, c, g, or t
  misc_feature (139)..(139): n is a, c, g, or t
  misc_feature (164)..(164): n is a, c, g, or t
  misc_feature (188)..(188): n is a, c, g, or t
  misc_feature (416)..(416): n is a, c, g, or t
tgtngggggcaacagagaattcccccaaactgacatgaccgtgaccctctgcccagagggcactatcgacagcccacaggngcnanacaaatnncccccccccccccccccnnagccccccncncncngcctgcnctcngtgtcaggtagtagctgtggcgggnggtgtccagcctaaaacacgtgancattccaattcatcttcagctgccaagtgtatttagtccctgaacctggatccaaggcatctccctgtaggaaacatcagaccggggcagagattgacaaagcaacccacaacagcagctgccaacggccgttgtgcccacctcatcagcagctctgcaggggcctcactccaccctcaccacacacgaggagccagcactcctggccccattccactggacaggaangcgtgaga

SEQ ID NO: 682330 - DNA, 411 bp, Homo sapiens
gctgccgcctactactactaaaattcgcggccgcgtcgaccaatctccagacttcatcaggcttttgactcaggataaaaacacatccctgagctgttctcccttcctccctcctctccccctctgggagcagggaagctagcctaccgccctgttaaaagtctcaagggggactgggcgaggtggctcacgcctgtaatgccagcacttctggaggctgaggcaggtggatcacttgaggtcatgagttcgaagccagcctgaccaacatggtgaaaccctgtctctaccaaaaatacaagaattagctaggtgtggtggtgtgcgcctttaatcccagctactcgggaggttgaggcaggagacccgcgtgaacccaagaggcagagattgcagtgagctgagatcatg

SEQ ID NO: 682331 - DNA, 164 bp, Homo sapiens
gtatgctaatggcgaagggttggacaagtcaacatctctgtggtgcagtccaacgtctccagtgactatggcgtgtgccagtggtgtctggcagtggcttaggcctgggtggagtaagcagctactcctatggcagtggtcttggcgtttgaggtggcttcagt

SEQ ID NO: 682332 - DNA, 559 bp, Homo sapiens
catttcaatgtgaaggtcctataaagaaggaaattgtcagaagagttctgcagggtttccagctccaggagccgatgtaagtagggagaagaacagtgccaaggagaaactgctgttgccaaagaggagggaggaagaagaggaaggaggaaagaggcaaacatacaaaacctcagacaaaacgcagctttgctagcacacagatggataatgggaagacaaagatatggagagttggatgcctttggcagtaagtatatcggaaaggctcattcaggcgacatcacccaagatctctgctctgggtaaaaagagaacatcagcttgaaaagcttaaaattctactggcagacactgtctgacatggaaatatctctaaccgcaagatgatttgcaattagcattctttctagtggcacagtaactgcctcatatgattgctaaggagattaaataaggtagagcttgagaaagaccccattaaactgtaatgggctattcaatgttagctattgtcattttcagagttaccaaataaaattcgacttgcataaaaaaa

SEQ ID NO: 682333 - DNA, 124 bp, Homo sapiens
aagaagtccacctatcgggcattattggattcagctcacaacagatgaagacagcaccaggttccaaattcattcaagtgaggcaagtacgcctagttttgtaacctgttcaggggagaaaaaa

SEQ ID NO: 682334 - DNA, 874 bp, Homo sapiens
gggaactggatcgggttgctgccagcgggtgagcttcggccgccattttaccaacagctccactcgcgcggacacagggagcagcgagcacgcgttccggaaaccggataccatgggacaggatttctccgcctcagcccaagaggagatctcgtggaaacatggctacagaacattgttcagtggacacgtggttacgtgaagagcccatggatactattctgcagttatccattcagaaaatttcagacatggctgtgatgttggttcaacccacagaaagtggctgaccacactagatgaaatttacggtggcagggttagtgggcaacatagtgattagaatgacggacgctatggacgctttaacaagattgcagtgaagagggtgcatgggcagttcttcaacaagtttacagaccgagggatctctctcatgttcagaaacaaagggtgccttttaatgtgggtcatggaagaattacaggcagagagaacaacagggcccacagggtagcagaatctagtacgcggaccacgatgacggcacacatacgcgcactcctggcaaggaaacagtgtaacaaccttggatgggacccatggaccggaggcaagtgggcgaggaacaactcaggattcggaatcaggctagaagccttcgggggcacgcgattttgggggaagatcccagaagattatgggggacgagtggtccatacttggaaagcgacctattggatcggcgcaagggggcccccaggtccataaggttgggtggccgtgtcagagcacgcagggggtgacgttaaactcgtgcaggtgggacatggtggatctgcaacaggctggggctcatagaacgcgactggcg

SEQ ID NO: 682335 - DNA, 171 bp, Homo sapiens
cataactttttcaaagattgatcatttttataaccatggttttcctgaaatcctaaattcatcaatatgaaggaaatgacccacatagactttatgcaataaatacaagtgcaagtgagtatacccttacctgatgtcccaaaacaatttttgattcaggttgatgatgta

SEQ ID NO: 682336 - DNA, 1026 bp, Homo sapiens
  misc_feature (3)..(3): n is a, c, g, or t
  misc_feature (7)..(7): n is a, c, g, or t
  misc_feature (16)..(16): n is a, c, g, or t
  misc_feature (37)..(37): n is a, c, g, or t
  misc_feature (42)..(42): n is a, c, g, or t
  misc_feature (68)..(68): n is a, c, g, or t
  misc_feature (88)..(88): n is a, c, g, or t
  misc_feature (98)..(98): n is a, c, g, or t
  misc_feature (123)..(123): n is a, c, g, or t
  misc_feature (125)..(125): n is a, c, g, or t
  misc_feature (127)..(127): n is a, c, g, or t
  misc_feature (144)..(144): n is a, c, g, or t
  misc_feature (260)..(260): n is a, c, g, or t
  misc_feature (269)..(269): n is a, c, g, or t
  misc_feature (285)..(285): n is a, c, g, or t
  misc_feature (311)..(311): n is a, c, g, or t
  misc_feature (318)..(318): n is a, c, g, or t
  misc_feature (321)..(321): n is a, c, g, or t
  misc_feature (358)..(358): n is a, c, g, or t
  misc_feature (373)..(373): n is a, c, g, or t
  misc_feature (429)..(429): n is a, c, g, or t
  misc_feature (685)..(685): n is a, c, g, or t
  misc_feature (939)..(939): n is a, c, g, or t
  misc_feature (1012)..(1012): n is a, c, g, or t
tangtgngattcttantcgggtcgatcccgtacgtgnagtgnctctcgagacgctgcgacatactttnctgataccagtaatatctcntctcacacantatcacgacatcctatgcaacccantncngcatctttttcactatnttgtcttgatcgcctccacgcgaggctcatcacgcatcaggaccacgttctccatacgctgcatcatactcgcatcatcgactcgattctctggtagtactcaaagatagacacgntgactatcnacacatctacacgccnacagtgtcgcgctctcacagacgtcntacatangtnatatgatcatacatgttcgtgtatcatcatcacacgncgcgcgcatgtctcncggatcatcagcaatatacgctactctattctgcacatgacttctcacaagaacancacagaacatatcctcgcgccgggcgcgaactcgcgtgaagcacaacgctcgcctctctctggatactacttaagatgaacacacacaagtcccaccatgtgatttatcctcacctctagttccgttctctactacgagcgctccacgacattggcactctggcgccacgctattacgtgacgaggtgcattatcgtgaactcgcatctaacattgtcgcgccgctcacgtacgtaacaaataaatttgcgccgtntggctcttgctcgatactcacaaaggcctctggatcactgacctctacctcctgtactcttctaatacgaggactatctcagcaacatatgtgccactgtgccactaatggtgagttactctcgtacactctattacctctgctagatgcttacctgtgcgcgcttacctgaagcacacttcactcggaaactagaatcgaatggccaatcaccattcaggcactgttgaatcacacaaataaccgcgaagaanacctcgacggcatcgcgcgcgctgcactaatacacggctatgctcgtgcgggtgtctcaccgcaacccatggngcagctactacacg

SEQ ID NO: 682337 - DNA, 267 bp, Homo sapiens
gtgtttctcctcctcggcatgggcggttactgtgaccaggcggttccagcacctttgtgaacattgtctcatttatgtccctgtagaggagcgtgagatatgatttatatgtcttcagtgtccgttaaggagacaagctgcagcagagtaatttgccccaagtgacctcgctcgtgtatgtgtgtgcgtgcatatgtgcacgtgtgtgtgtgtgtgaaggtgtctgtctgtcccagaggcagatgccatgagacatggggactcttg

SEQ ID NO: 682338 - DNA, 236 bp, Homo sapiens
gtagagcgagttataattagtgcctcatatgagtatagtacaacggaagtgattaagctatgtgcattgtcagagtggttgagaatgattgtgaggcgtactaataccatagccgcctagttttaagagtactgcggcatgtactattgacccagcgattggagcttcgacatgggcttaagggagccataagtggagtccgtacagaggtatctttactatacgacattgtgata

SEQ ID NO: 682339 - DNA, 378 bp, Homo sapiens
gggattataggcatgagccaccgcccccagcctaatttttgtatttttagtagaggcggggtttcaccacatagtccaggctggtcttgaacttctggcctaagtgatccgtgcccccctcagcctcccaaggtgctaggattacaggcatgaaccactgcacctggccacttgttttgaatatataatttcaacttttattttacattcggggggtacatgtgcaagtttgttacatgggtatactgtgtgacgctgaggtttgtgggacgattggtctcatcacccaggtagtgaacatagcaaataggtttcttcaacaatcaccccaccctctctctgccccctctgatagtctcatgtttgtgttcaccatgt

SEQ ID NO: 682340 - DNA, 594 bp, Homo sapiens
tacctatgtcgaggctagtctgaggattaagttaaagctcctagtctggaccacccttaagaggagcttaaagaagggtggcaacaggccagacgctggtggctcacacctgtaatcccagcattttgggaggccaaggcaggcggatcacgaggtcaggagatcgagaccatcctggccaacatggcgaaaccccgtctctactaaaaataccaaaattaattggccaaagttgggggtgcctgtaatcccagctacttgggaggttgaggcaggagaatcgcttgaatccaggaggcggaggttgcagtgagccgagatgatgccactgcactccagcctgggtgacagagcaagactccgtccgggaaaaaaaaaaagggcaggttagcaagtgtccgggagggtgtaaatgacctaggctagcaccaatttgagactcgatgaaattaaaacacctgaaaacaaattagaaagagaataccttctactaggtgattctgctgcgttgaatgctggaggggtacctttcatgtaaagtggcctgcatcatcgacaattctctcacgtactggtgagtctgccactctaaat

SEQ ID NO: 682341 - DNA, 804 bp, Homo sapiens
cgggccggagcgggccctgggcggccaggagaagcagttcccgtccggcgctgctgagctttcttcatctacaacccggcgcttcgggccgcgcgaaggacaggaggaaaataagattttatttgtatgcatccaaatgtagcgtagtaaaagaatgagaagattagagatgtcgggatcgtgtgaagctatcgtacagtgtacgacggcacatgtacggcccatcgaaagagcctgcatagaatcttctacataacagcagaagaacagacagttcttcaatgaaccacaagaaagtttctggatggtcatggttgttcggagtcctatgattgaaaaacagagtagagatggaaataccagtctattgaatatcaagtaggatggagtggtccgtgacaaggtttatagcgtcggatgcatgactggctaggtagtctcacgagcagtgtactaagctttgatagtggtagcataatctgaaagccgtggaatgacggaggcgtcccgcgttctgagacaaggattggagacagcttcggttccatcggtggtcttgccaacgctacatttgccagtcatgtgaccttacttgacatttttggtgcgtacctcacgcttcttgcccgttggtataccttgcacgttgatttgggaatcccgtcctctcatctattagatattggtcgggacacgcctgtatatggtccccttgacgctgcttttctctgtaaacgatcagctcatctgggggtgggtttaggcccgatgccgtgattgatttgctgcccttaccttacacct

SEQ ID NO: 682342 - DNA, 621 bp, Homo sapiens
gtagaaaactatgaatgtgggatagccttctgaaaaagccacaagactttatgaaacattacgacgaattcttccaaggtgacaaattatatgatgaaaaagctgattaccagaaactttcagcagacatcttattgatagtatctaatcagcattgctcattgaaatctgaaacaaggtatcttccatcagcataagcaacagcaatcacttgagctcctagcgcaatgtattaagtaaggaaatactaagtatcaatgaagaactattaaagtaacttttatacaagaaataattagaaaagtgtgttgatagaagaagctaagaataaatacaacaatgagttaggtcttaatcaagttataaaaatgttgaaaggcacaaaagaacacctgaaagaatgatattttggtctgacaagacttggacattgtcacaaatataatttctctcccaaatcactaagtttaatatacttctgaagtttacatcagttttattttaacggaacttcataaacttatccaaaaattggatgtggaaaagttaagaaatcataaataggtgaaacagacttgacgaaagcaagtagagaagatacactctattattagatatatc

SEQ ID NO: 682343 - DNA, 280 bp, Homo sapiens
  misc_feature (3)..(3): n is a, c, g, or t
  misc_feature (27)..(27): n is a, c, g, or t
  misc_feature (186)..(186): n is a, c, g, or t
  misc_feature (192)..(192): n is a, c, g, or t
  misc_feature (218)..(219): n is a, c, g, or t
ccnttgtcccagtgacacccataaggncaggcccccctgctgactcttttcctaccttcctatttgtaatagaaacctaccgaatgtatgactaaaaagtcactttgagattgacttttttaaaaagttattaccttctgctgttccaaagtgcaaaactgtgagtggaattgccttattctgacntaatgngttagaaacctagagaatacagtggnnggatttttagacattgctgctgctgttaccccaggtctttccgatcaaaaattttaaataa

SEQ ID NO: 682344 - DNA, 880 bp, Homo sapiens
cggctcccacgccgcctctccctgcccgcgtgtgaccctggtgccgtggtgcgcctgcatgcccgccctgtgcctcctgtggaggtggcgttccgggcgcgggggtgaacggcctgagggctggatgaccctaaatggcgcctcctacggccagagggtgacgcctccggcgggagccacctctccggtggcgcatcatccgtgccccccagtaagaggaaggctccagaatggagctcaggaattaggagtctcgagtgcgtagggccgggttactgccactctgggagccgatccgaccagcgctgtcccgagggcagaaggctggcacggtgtctggaggagttcacggctgctcccggcaggggctggctggacagggcgcctgcgtccccacccactgcagggcctggccccattcctgggggatgcatgcggcagggtgttgagaccgagaggactcggcgaaagccagaacgagagggtctggcggcagaggggctcggagacctgctggtggacagagtcgcaccgcttggagttcccagcctggccctcacccggcatcttcctgggccaagcgaacgatcaggccggttatattctaagcgaacgtgtgcgtgtccttattcccagtccagtcaagagctaccggggctggcctagtcatgggggagcccagtagagaggagtataaaatccaggtccttggattgcagagacccaggcagactgcatgaagagcagcacttcaaaagccccgtctcttggaatgcaacaaggttgccctggcttttgaccacagcaaggatggcagacataattcccgtattgccagaaggagctatcagtagattggctctcgcctgatggccttccc

SEQ ID NO: 682345 - DNA, 299 bp, Homo sapiens
ttccccctatctccaagctggagccctttaatctaagcactattctcacctgggtccagccattagatggaaacccttatagggccagattaccaagaggcccaactccccaactccgagttccccaaactggcctgatcatataattcaccggaaacacttgataaggatttccagatcccaccccagatctaaagaccaagagcctaacaggcaccgcccctatccaaacacacagccctataatgccccaggagatccttctcttaccagcctttaactccccctgcaaaaagctg

SEQ ID NO: 682346 - DNA, 975 bp, Homo sapiens
aaatgtgaccctcgccatgtgtatatacatggcttgcgttgcatgttgtaccgtggtgaagtggtgcccaatagatgttctattgctgccgagtggccatccatcaaaaacaagctgcagcatctcagttagtggatgggtggcccacgtggcttcgaaggttggcatctaaacgtaccagctctcccacttgtggtgccctgggggagacctggtcaaggttacagagagcttgtgtgctattgcgtgagctaacgaccaacagccattgctgaggcctgtggctctgcgcatggaccaggaagtttgaccatgtatgtatgccaagctgtgccattggttcacttgtgtaccgtgggtgaggggatggaggagggcggagtttgtctggaaggcccgtgaagatactgggttgtcctctctgagcaagggattattgaggaggtgtggtgtcggattcggtttgaaggacggggggtgaggaacgaacgggagtaggtaatactaattatccatgcctttctggtgcctgcagccatgtcatgctcccagaattgacagcttcagtcttaggtgatcagatgttaaaggctttctggttagattgtttcccgttggtgatcatgtcttgtccatgtgttgcctgtaattgttgttccatcagtatctcaacagttaagagttcattacatgcgtacaacgggaatgggcaacgtcaccacgcaaacgaatggggaggggcgagtgaaacacatcctcgctgggaggcactggattagggtcttcaccagcatgttggtacaagtgggggcgccatagggacacggtctacaaggaaggagacaacgagcggggggatacagagctggtccctggtggacagcgtgagcgggtatttggagaaggactgatggcggtgggggacatatgggcacacacagagttgagacgggcagaaacctagtgtgtctggca

SEQ ID NO: 682347 - DNA, 412 bp, Homo sapiens
atcagaggatccctccctatagacatctcaccaaagaatgtatacaatggcaaataagcatagaagaaatgatcattcgtcatcatagaaatgcaaattaaaacaactactacacacctataaaaatagctaaattacaaccaactggcaataccagtgctgatgaagatgcagagcaacagaaactgtcactcattgctagtgggaatgaaaaatggtactttggaagtacggtttggaagtttggctgtttcttataaagttaaacattgatttaccatacaatctagaaattatgtccctaggtatttactcaactgataaggaatcttatgtctacacaaaaacctgcacacaatgtttatagcagctttattcataataaagccagatgcaactaagatgtctaata

SEQ ID NO: 682348 - DNA, 433 bp, Homo sapiens
tggaaaaaattctaaaccatttatttccaacacggggacaaaaaagaacctaaaaaaccaaacatttttaaaaccccaaaaacaggtggaacccattggcaaatttaaatttggaaaaaaaagcggccacggcccccaaaaaccaaggggacaaggttaaaaaccaaatttaggccaccgaaaccccccaaaaaaaaaaaaatccggctgggttcaagctccagtattaggacccccaaaaaggctttggggacccccaagggaaaaaaaaagatccaacaaggttcaacctgaaaaattaccaaccccaaattgaagctgaagtataaccaaccccaaaaaaggcttcggggacccccaaaaaaaaaaaatccggctgggtggaacctgaagtattaccaaccccaaaaaaggcgggggggacccccaaagg

SEQ ID NO: 682349 - DNA, 607 bp, Homo sapiens
  misc_feature (36)..(36): n is a, c, g, or t
  misc_feature (61)..(61): n is a, c, g, or t
  misc_feature (90)..(90): n is a, c, g, or t
  misc_feature (136)..(136): n is a, c, g, or t
  misc_feature (139)..(139): n is a, c, g, or t
  misc_feature (173)..(173): n is a, c, g, or t
  misc_feature (217)..(217): n is a, c, g, or t
  misc_feature (264)..(264): n is a, c, g, or t
  misc_feature (424)..(424): n is a, c, g, or t
  misc_feature (461)..(461): n is a, c, g, or t
  misc_feature (491)..(491): n is a, c, g, or t
  misc_feature (539)..(539): n is a, c, g, or t
  misc_feature (579)..(579): n is a, c, g, or t
gggggactaagttttgtaggtacttcccagcggttnagggtttttcttttcctcttgttcncttgctggggctgggggcccaggggtctnactcctcggaggccatgtgggccaagagggccaccaccctgttgcngtngccaaaaccgttgtaaaaccaggaaatgagcctnaaaaagtggtcgttgagggcaatgccagccccagcgtcaaaggnggaggagtgggtttcgctgttgaagttagaagagaccacctggtgcncagtttagcccaggatgcccttcagggggccctccgacgcctgctttaccacctccttgatgtaatcaaaattggcaggtttttctagaaggcagggcaggcccaccacttaaacgttggcagttgggacacggaaggccatgccagtaagcctcccgtncagctcagggatgaccttgcccacagccttggcagcncagttgaggcagggatgaagttctggaganccccgcggccatcacgccacactttcccggagggccacccacagtctnctgggtggcagttatggcatggactgttgtcatgagttcntccacgaaaccaaagttgttatggatta

SEQ ID NO: 682350 - DNA, 134 bp, Homo sapiens
ctggagaacccatgaggttcgaagtgcttgaccacctccaggttatcatcttagagacctaggctttcttcagcccccaaacccgactggtctaagggggacatcaagttctccaccaacacctagctgcttag

SEQ ID NO: 682351 - DNA, 364 bp, Homo sapiens
aaggagggtctactacaataaacaaggtgctgtatttagttggggaaaatcctatgtagaaattattggcaaggcagacaataatcttagtgtgattatccaaggatggtcaaaaagtggattctgcaatactaccaacttcatgcgtataacctcgcgtttcagagcttataatctcacattgataatgagagtcagaaaatcacgatcagaacgttcatccagtggatttttattttgttagtgaaaagccatcgcccgttctatcagggatagttttcttttttcatatgagcgcgggaccctgtggaccaatgaggcaacacccctagtgacataaggtcgacagaaaaaagcgacagcg

SEQ ID NO: 682352 - DNA, 846 bp, Homo sapiens
tgtggtggcaggagcctgtagtcccagctactcggaaggtgaggcaggagaatggcttgaacccgggaggtggagcttgcagtgagctgagatcgcgccactgcactccagcctggtgacagactgagattccatctcaaaaaatacatagcatcaataaataatttagctgtgtgtggtggcgtgtgcctatcgtcctagctacttgggaagccgaggcaggagaatctcttgaacccgggaagtggaggttgcagtgagccgatatcacgccactgcactccagtccgggaggttgcactgagctgagatcatgccactgaactccagcctgggcacacagagtgagactctgtctcaaacaaacaaacaaaaaaaaaaaaaaaattcccaaccttttagcttaaccaaggtggggcaatcaaagctgtaacaagagtggttacaaccatgaacagcaggtccagtgtggttttcaaaagctagaaagatgacgggcagattaccctagtctttctgtggtgccaaagagacgacgacaacgtgttcggtcctggaccatatgaccatgcgaccctgcagtacattacacggatgtgggatgtggcctaagtatgtgaagaacacctggagttttttactaattacggaggccagcgttgttcacacctggtatttccgctctggtcttgaccgattggaccttgtgacatatggggccgtttaaataaattgcggggggagcgcctaaccggaagggggggcggaaacggggaaacgggctgtagctctaaaaacagggcggggccccacgcggacacggggggaccctcagcaaaaaagggg

SEQ ID NO: 682353 - DNA, 166 bp, Homo sapiens
acttataacgaaccctgaactactttaagtatgggacgactattgcctgatattcttcagtcttgtaactcactactgattaagctttgtaatctcatatatgggccttagatgaatccatacatgaatgacttggtagtttcctcgatgtttttttttttcttat

SEQ ID NO: 682354 - DNA, 862 bp, Homo sapiens
acttatggattctttttcttttttttttgagatggagtttcgctctgtggccaggctggagtgcactggggctaggctcactgctacctccgcctcccaggttcaggcaattctcctgcctcagcctccgtgagtagctgggactacaggcacccagcaccagcacccagcgttagtttttgtgtgtttagtagagacgggtttcaccagtgttggccaggatggtctcgatctcttgaccttgtgatccgcccgtctcagcctcccaaagtgctgggattacaggcgtgagccagccaggccgtggctccttttccactttcatggtgcctcgtgatgtgcattggatctccccgggtaatctgggatgttctgccgtgggcctagaggctcagccgacttaggcgaccttagttgtcatctgcgagtctccgcattactctgtggtggctgaagtcacgtcaagtattcaggagtcccaggggcaggaggttggcccttcgtttgggggcacattattccgcccaccagaatatcgcaggagcagccatcaggccctagatgaggcggggaaggagtgctgctgtcggccggttgagagatgaacctggtgtcgtgatccccttcccgagggaggatatgagagagagccgacttcggcagattgcttgtcacggacccaagtacggaggctattgtcggtcggtttggcgcaatagaccctcgcgggtgaaatccttgtgggccggggcgcgttagttgggtgggtctctctcccgggcgtttattgtttccgccgcggtgtgtttatctcggtgggacccccctgtctctgctccactggttccccagtatagcggcc

SEQ ID NO: 682355 - DNA, 151 bp, Homo sapiens
ttgactatagtgatataacagtagcgttgactatagtgatgtaacagtagcggtgactatgtgatgtaacagtagcggtgactatagtgatgtaacagtagcggtgactccagtgatgtaacagtagcgttgactccagtgatgtaacagt

SEQ ID NO: 682356 - DNA, 720 bp, Homo sapiens
caaaccatcaggctagtacgaggctgcgtggttgaatctggactctgggttgcgatcaggtgtaggaatggaaaggatggagcatcaacagcaggttgggcttgtggggcctgggaggggcaactcctcgaaatgcggggctgggggcagcacagtgagggcggtgctccttctgagctacctgtacccctgctacacctattagtcccaggctggcctagattcaggggaaagtgggacagctgtaggggaggggctcctttccataaatcctggatgagttgacaactgcccatttttccttttgccgagccccagagagtattcgggagttgtaggttgatcatcaagagaatttggggcttccaacgttgtctctgcgtgccataggatcctgagcacctgacacgggttcgacgtttagcccacttggggtgggagtgttgagcatctgtcccgcctttagatctctgaagccacaaataggatgcttgggtaatgactcctagctgtcctttctctaccgtctgcctacacagtgtctcaaggtccagcttatagtcatatatatcacccagacgaaagaggaaaggacacatgtcctaggaaaggtggttaataaagagaaaattgacaaaggatccatttgacggaccccgtaacccttgggtgtgctctccattctgctccttccccatcgttgcccacattactgagggg

SEQ ID NO: 682357 - DNA, 914 bp, Homo sapiens
gacgagctgcggcgaacagagtggcagggttgacccaatcgcatggtcaggtggaaaggtgggccgaccctgagagccccggagaccacaaccggtgggcgcccccaacacagctgtggggacaccaggcgcgcgcgtgagaaccgcggggatgtcgcggagaggccgaaagtgatgcccaacgacggaccattgtggcgcccaagttgtcccagggttgcgcgcccccatgacaacgaggtctgcaaaacagtggtcgaggccgcgtccccaacaggggttgtgacagggggaaccgggccaccagacggcgactgccccaacattcccgcggggctcgcggtcgccccccagggtgctgagccccgtggggccgcccacccacaaccctgtgagcgactgcgcggcttttatcatagtggcccggaacaaggaaccacagacatttcccccgcggatgatggaaggaaacacaaggggcggttcgatactaaagcggggcctaagggaatatttcttcaggtacacgggcgaccccccaaggacgtgtcacaagacagcggcgaagagtcttcctagttccaacatggggcgcatccaggcgccccaagcacgcacggtggggacaagaactcaaggggacgatcggcgaacgaagtcccgaggcccacactcgaaagacccgaagagctaagaggcgatgggaccaacacaatgcagccggtggagatgatggaacagcacaaaccacctcggggatgacccaacctccaagacacaccgcccggacggagtcgtgccccggacctctgggggaacaacaacgccctctggcaagagggtttcttttaacacccctagcggccacaattccccccaaaaaaaagggttcaaataaaacgggaacaataaca

SEQ ID NO: 682358 - DNA, 236 bp, Homo sapiens
gggtacccgagactgaaatgtgttgttcattgctatgaaagtgggctcatcaatctagggataataacttagtctaaggataaccgtaagataaacagttatctagggataataaggctgagtgaaatcagctccatgtgtcgtgccttacttccaggggccttatgcccaaagagctagctcatactctcaaggcatcctacacattgccttggccctcaaggacgggaggatga

SEQ ID NO: 682359 - DNA, 98 bp, Homo sapiens
aacgtgggaaaagaatggtatgtgggggaaatgcatccccccaaagggctgaggcatagtttttcatttggtattgaataaaaaccctctttttttga

SEQ ID NO: 682360 - DNA, 125 bp, Homo sapiens
ggtcgatcagaggacccggctcgcgagcagatactccgatgcgagtaatacggatgtgtttaggagtgtgcagcattatgtggtgtggatgtgtgttgtggtgtggatgtggggtaccgagctcg

SEQ ID NO: 682361 - DNA, 989 bp, Homo sapiens
ctcgctatgtcactgctctcgctgtgtttatcgggtgctcgcgtaggcggtgttttggctgtccctggttgttcacctgtgggcgttgcgcccttcctgtctgttcggtccgtggctttggcccaatgtgaccccacaggaggggttcttgccctccccctttgatgtgacctcctgggtcttgcctttatttctccctgcccgcgggtctgcgcctccctgagactcgtttgctgggtctgttgatcgggccgccctggtgcgccagtttcccggggaccacccgtacacagcgggggtcggccgcctattctagcccgcctctgtgaccggcggctttttatacccacaagtcgcacggcgcattggtgcccgctccccccgtgtaccaaggtgcgccgtctgttgtctcccgggcgtcgattgcgcccccgtcgtgccggtcccggtgttcctcccggggcggccccggtgttttcagggttcccccccccgtgctatattcgggggcaaagccacgcatcgtctcgttatcacgaggtctctcggatggtgtagccacaccatttgcatcgcccccggaggcagactgctcgtgaccccgcatgcgcgcgacggaactagcagtgccaccctcagaacactagggggcgcccaccaatttcttccccccgaccctcgggggaccagtttccacgaacacacaagtgtttaacaactctttccttcttttaccacttctatatacaaagattcgctgcccatcagaagatttccttgaatttgtagcacatatatctaaacctcgtatcttctccccgcttcccaccctacgctgtcagtttctcctcctcctcggagctcaactatatctttgcgctcctctccctccttattccgcaaagacaacactatcattcatgcggatgattcatgctagactaggcacccccccccgaaaaaaaatttcgcacacccccaacatgaca

SEQ ID NO: 682362 - DNA, 383 bp, Homo sapiens
  misc_feature (130)..(130): n is a, c, g, or t
  misc_feature (242)..(242): n is a, c, g, or t
  misc_feature (312)..(312): n is a, c, g, or t
acaacaaacaggaaccccctttactcttatggacctcatttcaatatacggtttacggttggatggaatggtataatttaatatttctctggtacggtagtttatatttatttacagattttttggtacngtgtgattggaacttttggttcctggctatgatcaaggtttatgtagtagagcacttatgatcacaaattaagtttttgggttggatggcactacattaaattttttaatgnagttctgattttggacgggactaaaacggtgtcttaaggtatgtgatgagtacttaaaattttaatccangtggtcccccccctttttttttttggcttggtttgtcaaaagcgctggtccttccgggcaggtgtagggat

SEQ ID NO: 682363 - DNA, 363 bp, Homo sapiens
  misc_feature (359)..(359): n is a, c, g, or t
aattaacaggcatgagcacatgcacctgtcctaaaaaaaaacacaaaaaaatttttttcaagagagggtcttgttctgtcacccaggttggagtgcagtggtgtgatctcagctcactgcagccttgacagcccaggctcaagtgatcctcccacctcagcctcccaagtagctgggattacaggcatgtgcaccacacccagctaatatttaaatttttttgtagagatgggagtctcagtatgttacccaggctggtctcaaattcctggcctcaagtgattctcctgccttggcctcccgaagtgctggaattagacatgagccaccatgactagcctaaaaaataataatgtatngatt

SEQ ID NO: 682364 - DNA, 245 bp, Homo sapiens
  misc_feature (36)..(36): n is a, c, g, or t
  misc_feature (142)..(142): n is a, c, g, or t
  misc_feature (195)..(195): n is a, c, g, or t
  misc_feature (228)..(228): n is a, c, g, or t
  misc_feature (234)..(234): n is a, c, g, or t
acatttggccctcagactgtaatttccatactactntgactgatactagatgacctggctgcctaggggctgtgctggtctgattttttgtgagacaaaaaccactctaaacctcctggtgcactgaggctgtacacaccgncagaacagggcactgcgtttaaaagtttctgaccaagtggtgacaacagaggncaaacgtaaggctgtctggataagttgaacctngctgancggtagcacca

SEQ ID NO: 682365 - DNA, 972 bp, Homo sapiens
agcggggcggggttctggtaatagccgaggctgctgctgtgtcggagacccccggctgaagtcaccgtcatcatgtctgatcaggaagccaaaccttcagacctgaagactgtgtcgggattccgaaggaatggtgaatatacttcacagaacctcccacaggtcgacttgcgaccagcgactagcgatctcgcaggatctcctgttcacaagtgaaacatgacaatcacattcatcaaggaaactcaaagtaatcgatatctgtcacagagacagggtgctatcccaatgaacttcactccaggctctctcgtgcttcgcagggctccaggagcacattgcatgagtgagagtccaatacgtccgaagacagcagacgtggaggacagtggcagggacaagaagaaagtgtgcactgtgaaagggttctgaatcgaggggaaagcgaaaaaccgggggagggtcgagttcgaaactgagctgttcaggaagttaatttcctttgtctctgatctccggtctccagttctccctctctggtcgcgcggttccaaaccttcacagttttagtgtccagttttatcgttcacacaagaaacctacggttgtcctatttgggtggagtacactggtttggctgtttgtcgaaccataaccgggaacagtctgcacacccgagctgggcgtatcccccgcgaaattcccttcgtgttttgagaccaaagccaattcttgggctatacttctgtgggacaagttttccctgaagaattggccataccaatataatttctactttcactatgtttgtgcgatttctataccagtgtgggtggcctggaattttttctgagggcctggaattcaaaggaccgtgctagttgccccgcgtttcaattaattgtaacccgcctccttccctttgtgttagagcagaaaccttgtaacctgtggtgtgcagcaacgtaagga

SEQ ID NO: 682366 - DNA, 189 bp, Homo sapiens
tgaggttgataggaagcaggcaccgtccttgctctcgctgaatgaagtacaagtcattctccgagagctcgtagaagagggagatggcagttgacttgatggtgatgcaacgttcctactcgtcttccgggtatcagtaaagcgtgtctccccggcccgggccgagccgattatgcccgccctccccgg

SEQ ID NO: 682367 - DNA, 331 bp, Homo sapiens
  misc_feature (35)..(35): n is a, c, g, or t
  misc_feature (49)..(49): n is a, c, g, or t
  misc_feature (123)..(123): n is a, c, g, or t
  misc_feature (194)..(194): n is a, c, g, or t
  misc_feature (203)..(203): n is a, c, g, or t
  misc_feature (206)..(206): n is a, c, g, or t
  misc_feature (221)..(221): n is a, c, g, or t
  misc_feature (223)..(224): n is a, c, g, or t
  misc_feature (281)..(281): n is a, c, g, or t
  misc_feature (320)..(320): n is a, c, g, or t
  misc_feature (325)..(325): n is a, c, g, or t
  misc_feature (329)..(330): n is a, c, g, or t
gtcattggggtccaaactaggggacaacaaaacanaggagaggcctgantctctgccttgctcttgctggctgattcgtcatctccctggcccggcagtgaaatgaccacacagtcccaaaanatgtgctaaagcctggcctctccaaacaactcaggcttccaaggctgggttgagggagtccaccaccagangtgcaaaanggngtctcttcctaattntnngagttctcaatttgagtttttctccacaaatttcttaaactttttcatacctattanccctagcattctgctagaggcggctaccagataacacanatganaagnng

SEQ ID NO: 682368 - DNA, 908 bp, Homo sapiens
tgggaagcccgtggggcttgcaaaggaaaggacgtggaacgggcgcgaagcccaagacgggggcgcggcaaaggagtctcccccaggagcgtcggcgaagcctgggcagcaaacaggcacaagaaagatgcctgcgtgcctgcagaagaaagcggatcaaaagatgaatccgtagggaggaaagcaattcacaggcatcactttggcacaagggacagtccggttcagagtgcgggttcccgccagcccgactcgagtccagggagcatatgagatgggtcatgacagatgtgggttgacaatagtctgacagccctgaaacctttggttaattttgaagtcagcatgcgaggctatgacgctcagtgatattgtggacatgcacccaaggaatatgtacatgtcacaaagattactcgattcagagacctattgagaccctctctcgcactagtcatccttggaggggattcgcaagtggacagtctctgttgattaatctctacatcatttttacagctggtatggccattaccatatgggtgaaactaaccaaataatgaccatcgatggctcaaagatgtggcgttgaatatatcccatgggttatctcgtatggagcgtgaggctgggttataatgaaagtgactatgccacatactagcatcatagtgccttaatctgtctttatgtcttggggctggggtaggtagataccaaatgaaacagctttcaggaccttccttcatcttgcagttgttgctctaatctcctttactagaggagataaatattctgcatataatgaagtaatttttctaggtatataacgaacaggccttttattttcatagtaatgatgatagtataaaaatgttaggataacagaatgcttctagaattttcca

SEQ ID NO: 682369 - DNA, 396 bp, Homo sapiens
ttggaacacattttgccattttctaattgatataaacaagagttcagttcctacagtttatttctggtcacaaaaatatcaccaaattttaaaaacaaaacacttctaatattaaactctgaaataaatgtgagctgtacatacattgattaataaaaacaagataattcttgactcacttattccagttcaggttcactggtgaccagagcttatcccggcagctcagggcacaaggcaggagccaaccctgcacaggccgccatcccatctcagggcacactcacacatatccacactcatactgggaccatgtagacacaccagtttacctaacatgcacatctttgggatgtgggaagccagaatagttggagcccacacagatgtgcgggc

SEQ ID NO: 682370 - DNA, 293 bp, Homo sapiens
tgggaggcacagaaggttggggtggctgtggcaattccttaaagacaaccatgaagtttgccacatctgttgacccctccgttcataaaagatttctctgtagcatgtggtgatgtttgatagcatttttatccacagtagaactttcaaaattggagttcattttctcaaaccctgtgctgctctatcaagtatggttgtgtaatagtctctcttttttggccttttttttttttcttttttcctttttgtagagaatggagtctcgctccattcattgccccggggtaccg

SEQ ID NO: 682371 - DNA, 462 bp, Homo sapiens
gttggctggtggtcgatctagaaggatcccctggccaggttctctaaccgggaaagggggtgacgggtagcctaggcctctgaggaaccagtctggtcatcaatcttggcaaagcaaagctggttctttttccaactttattacagaaggttctgccttcaaggtactggatggcacacaggaaatgtaccaggtatagtaacggagcgggggccaccaagggagatggagcacggcagacccctaagagttcaagccaggcgggagggggaagacctatccaccttctgaacatacgaggcagaaggctcagagtccgggaggcagactctcgccgggtttgcctggggcggagggcaaaatactaaacaagtcttctctccgtcacttctaaggccgcagggatgcaatctcactccggggcactcggctttcttcgagaggtagagagccgggcaaggg

SEQ ID NO: 682372 - DNA, 934 bp, Homo sapiens
  misc_feature (3)..(3): n is a, c, g, or t
  misc_feature (69)..(69): n is a, c, g, or t
  misc_feature (75)..(75): n is a, c, g, or t
  misc_feature (89)..(89): n is a, c, g, or t
  misc_feature (93)..(93): n is a, c, g, or t
  misc_feature (95)..(96): n is a, c, g, or t
  misc_feature (119)..(120): n is a, c, g, or t
  misc_feature (135)..(135): n is a, c, g, or t
  misc_feature (139)..(139): n is a, c, g, or t
  misc_feature (143)..(143): n is a, c, g, or t
  misc_feature (145)..(145): n is a, c, g, or t
  misc_feature (154)..(154): n is a, c, g, or t
  misc_feature (156)..(157): n is a, c, g, or t
  misc_feature (164)..(164): n is a, c, g, or t
  misc_feature (172)..(173): n is a, c, g, or t
  misc_feature (188)..(188): n is a, c, g, or t
  misc_feature (192)..(192): n is a, c, g, or t
  misc_feature (207)..(208): n is a, c, g, or t
  misc_feature (212)..(214): n is a, c, g, or t
  misc_feature (224)..(224): n is a, c, g, or t
  misc_feature (241)..(242): n is a, c, g, or t
  misc_feature (274)..(274): n is a, c, g, or t
  misc_feature (534)..(534): n is a, c, g, or t
  misc_feature (922)..(922): n is a, c, g, or t
gcnatggcttggagagaactaatcaattcatattctgcatttccagccaaagggacataggcacaactnactggnggcaccttcctgtnggangnntcttccatccatctacagcattnntacttttataaagtntgantttntnttgcttgtngnnttaagtntcattttnnatggtttttgcaggnttgntcataccagctttgnntttnnntgggtttttnttgctttcggtccaagnntgagaatcagtgagagggtggctctgggactntctcaatggctttgcaggaaactgatggttttcgagatttttagctgtggaattcagccctgcaggagtagatgcttgttcaggatcctggttaacaaggcaagttggaaaggagcagccatcacctagacttgaaaaaatgggtagcaaccagtacttcttctcatcaccaaaaacttgtcgcatgtttttactgaaacccaagctgaatccattcttatctgttccatgtcgaaatactggacttctgaatgcctctnatgtagatttatttttggtgactagccaacaatgatagccaaacagagaagacaagctgacagaaaacatagctgcagcaaagaataaaaacataatatggaacttggcttgagtatcaaataggccatttgtccaaaatttgataaaatactgtaaatctgttgccgcaataaaaaggcagtagagcagagaataagccaagaaaaggagaaagaacttataatttgaaaatccaacacaattgttcacccatggacaatgatgatccatcttccaaaatacatttatcacagacggagcagtgatggcagcgatctggttttataagttggcatctgtcacagtatcggatggctcagacatggtcctggtatagatgggagatcntggctgctcgct

SEQ ID NO: 682373 - DNA, 193 bp, Homo sapiens
gaaatgtatgggtgacaatgtctacaggctcatgtggtgcacataaggatagacggggtagccactgcaacagggcttagtagacaagtcagacaggaaccaacattgatgcccatattcaaacatcatgatgcagccctcagatggaataaagatggaatcccgtctgcatcgacgggcattgtccataatc

SEQ ID NO: 682374 - DNA, 617 bp, Homo sapiens
aaattaggtgggaagcatgccctttctcttaagaatcagattggagataaagaaaagctgggaggtaactttcctctgaaaataagagaaccatggaaaaagctgtagaagaaaagattgtatggctgggaagccccccagatgctgcccttgaaggcttcaaagctaagaagaaggaactggaaaaaattgttccacccattatcagccaactctatggaagggcaggccctccccccactggtgaaaaggatacagcaaaaaaaaatgagttgtagcccctgatctgctagtgctgtaatattgtaaaaactgggcccagggacctttgttaggaaaaaattgaaagaacttaagtctcgaatgtaattgggatcttccccccagagtggggttgaaactgctatagcctaaacggctgggtctgccttttcataaacagttgcccccatgtctttgggggggggggaaaaaaaaaattggccctctttaaaaacgggtaaaaaacctgggttagggggggggttccccctcaaaatgttttttttaacaactgggtcatgggcctttggggtaggaagttttttttcccctaagtgccccccataaatgtttgt

SEQ ID NO: 682375 - DNA, 242 bp, Homo sapiens
ggatggtgaggtgtctgtgtcctcaggtaagaggacaaaacactcaagccgtgctgaaaggagacgttctcgttcttattctcgctcatcctcacgtcactcacatagatcgtataaatcggagtcagaatccagagaacattccttgggtgaggcctctgtgtactcaagccaacatagatctaaaaaagaaaaaaagaaagccaaacaaaagaagaaatctccgacacggaagcatgcta

SEQ ID NO: 682376 - DNA, 205 bp, Homo sapiens
  misc_feature (33)..(33): n is a, c, g, or t
gttttttaaaaaaaagaatcccccaaggtttcnccccgggggggggccggggaaacaggcctggtattgggaaagggttttcctttaaaatttgggtagggggggggggggaaatttttttttttgggtaggggcctttggttttaaggtttttttccccccaggttttttttttttttggaacccgccctttttttaagggtta

SEQ ID NO: 682377 - DNA, 110 bp, Homo sapiens
ccccggttgcatgtgagccgagattgtgccattgcactccagtcctggtgtgacacgagcgagactcacaaaagaagaaaggggggtgtgaatttcgtaatgtagtgcgg

SEQ ID NO: 682378 - DNA, 178 bp, Homo sapiens
gggtaccacgagcactgactggcattttgtctgtaaaggtgcatctggtctgtaccctcctcaccacattatagctcgtgggggccaagcggcatcacaagggaaactcatggaatcacaggaataatcccatcagcttggcacagatgctgcccacagggattgcttggacgtaacc

SEQ ID NO: 682379 - DNA, 143 bp, Homo sapiens
ctgatcctaaaccactgttctgtcaatagccatgggagagatactgtccttgcttacagcaactcagttagacgcacgccacgactcaaaagtagttgagtaggcagcatcgagagtcagaacccgaactggggcaaaagcag

SEQ ID NO: 682380 - DNA, 409 bp, Homo sapiens
cacttatatgtggaatcttaaaaagtcaaactcatagaagtagacagtagaatagttgttagaggctggaaagggacggggcgggtaggagatgcaggatggggaaatgctgttcaaagggtacaaggttcagtcagacaaaagcagcaagtttctgagatctattgcatagtgtggtgactatagctaataataatatatcgtatatctcaaaactgctaagagtaaatttcaaatgtctcaccataaaaaacgttaaacaaggtgatggatatgttaagcttgacttagtcgttccatattgtatacatatattaaaatataacattgtaccccattaaatatttacaattatgatttgtacatatatttaataataataaaaatttaaataaaatattaaaaaaaa

SEQ ID NO: 682381 - DNA, 1288 bp, Homo sapiens
  misc_feature (1099)..(1099): n is a, c, g, or t
gactatcttcaatacttccgatgagggcccgatccttaattcgcaatggcattcctaattgcttacctgaatcgaataaattctaggctatatacagacatacgacaaaagggcgcgcggaaacggtggggtaaggccccgtacgggtgcgtgactacacacccctttcgtctgagcgccagtagagaacctctgtcgagccaaagagccccttaaaaccgcggccagcatctacccatcacccgtcgtacatacaaccgcccccccgcagccgttgaggcctgcgtgcgacccactcccgcctacctatccctatcttaatggaaagcgcgcggcgcgtgagacacgagtagaggccgagaagcgcgcgcgtgagagtgcaaacgcgtgccaacccctacgcgcacggtgccctaatgggagtggcgtaacggcacgaagacctccacaaggcgcgtgacggccacgctcactactctccacagtgcgcgtgcgtgcgacctcacgcgcgccgagagcactctaagagagcgatgcaacaccgctaccacagccccaagagaatcagagagacagcaacaatagcggaatgaccacaggaacgagaccacaaacaaaaaaacaatcaaaattaaattagaacaaaggtacaacaacaaaataacgcaccaaaatcccacataacgataaacgtaagtagccaagacccactatcacccataaattaacacacgctagcagcatttcccatatagtaacaaccccactccattcacaactctccccatgatacttccaccacaaccaaccaaacgtacaacaagcaccaatcataggtaagatcaaacccataccaaccgctgaacaaccaagcgtccaacatggaaatctcaccacataacggaggcacaccaactgtaaccgtgacataggaagtgtagtacagtccttatccacccatgaaagacacatcaacgaagccaactgcaaggtaaaatcccagacagatcacagcaaacatacacccccagctacgatctgaccggaaagccgccacttgtggatccccctgacaacaggggaggcagacaaagatctntccaccgacaacacaacccctacatgacttcagtttcgcaagagtggccatttatgtacgaaaaatcaaatctcagtgaacaagttaacaactccaccggtaccacctgacgtgcacaccaccactgatagtggaccgctgatcaatctaccagtttacaggtatagagacacgcaagatataacaacc

SEQ ID NO: 682382 - DNA, 98 bp, Homo sapiens
aagcttggagatgatattgaccttattgtccgttgtgagcacgtatttctcccctctagtacctctgcatttgtgagtgttccctctggctttctgaa

SEQ ID NO: 682383 - DNA, 264 bp, Homo sapiens
cagcagacacagcacacaatgtggggctggagatcaggtgggcccaggtctcccttcctccttccatctgcatcaactctgtttccatcggtgcttcagaatccagcgcctatttctaacagtctggcactcagaatcttattgttaaatgcatcacaattcactgtgagagccagcactccggtcgtgggaacgagaccctatggaagttcctcagtgcgtctcagggcgccccatggcatggaggcatgtcgtatgggttca

SEQ ID NO: 682384 - DNA, 919 bp, Homo sapiens
  misc_feature (161)..(161): n is a, c, g, or t
  misc_feature (170)..(170): n is a, c, g, or t
  misc_feature (174)..(174): n is a, c, g, or t
  misc_feature (179)..(179): n is a, c, g, or t
  misc_feature (182)..(182): n is a, c, g, or t
  misc_feature (218)..(218): n is a, c, g, or t
  misc_feature (259)..(259): n is a, c, g, or t
  misc_feature (283)..(283): n is a, c, g, or t
  misc_feature (343)..(343): n is a, c, g, or t
  misc_feature (346)..(346): n is a, c, g, or t
  misc_feature (369)..(371): n is a, c, g, or t
  misc_feature (373)..(373): n is a, c, g, or t
  misc_feature (376)..(376): n is a, c, g, or t
  misc_feature (402)..(402): n is a, c, g, or t
  misc_feature (404)..(404): n is a, c, g, or t
  misc_feature (414)..(414): n is a, c, g, or t
  misc_feature (457)..(457): n is a, c, g, or t
  misc_feature (491)..(491): n is a, c, g, or t
  misc_feature (503)..(503): n is a, c, g, or t
  misc_feature (524)..(524): n is a, c, g, or t
  misc_feature (695)..(695): n is a, c, g, or t
  misc_feature (765)..(765): n is a, c, g, or t
  misc_feature (802)..(802): n is a, c, g, or t
  misc_feature (828)..(828): n is a, c, g, or t
  misc_feature (834)..(834): n is a, c, g, or t
  misc_feature (905)..(905): n is a, c, g, or t
accgcctccgggtgctttagcaggagggccttgggagtaaccgcaggaacggcccgagcctccacggccccaccagcacccggaagttaacatgggtaccctccagggcaaatccctccgctctccctcgcccccctccacaggccgagtcatcggcgaanggaacgcanagcnttaantangagctgaacgggagaaggagccaggcggcggggganagtgaggtatggcccgaactgggattcttggcactgattantcctctccccagggcatggatganaaagggtgggcaagtatgtatctgggaggacgaagggtgccgggtcaacggccgccaaanggncccagccctttaagcaatctgcnnnanatnccaccccaacccccatcccccaatangncgtgaattcnagggtgggaaagagcactcacagcagacccccgggaaataaanattaatgggctaaagccgaagggtgatgacacantccccagctccncgggcaagatgcaccgggaancagaaactggagaaagaagggcgatgtctccaagaacaacactccagccgctagaagcccgacacgagcgtccccgggctgggaggacagagcccactcaagcaagggaggcgagcgagccaggcgcgagtctcctgggattgcagcggcggccccaggtcgcgctctgcncaaatctttcgcacgtgcccgcagctccctggccatccagcgccgcagggaaaggcgctgggccccctcnttcatttgtaccgggacgccaagggcctggcgcgcgngacctagggggcgggggcgggcctcngcatgncgctgcccctggcgggcgtgagggcgggccgctgcggcgcgggcggcggcggctaccgaaccgcggcacanagtctgtaacagta

SEQ ID NO: 682385 - DNA, 202 bp, Homo sapiens
  misc_feature (20)..(20): n is a, c, g, or t
  misc_feature (24)..(25): n is a, c, g, or t
  misc_feature (37)..(37): n is a, c, g, or t
  misc_feature (117)..(117): n is a, c, g, or t
  misc_feature (132)..(132): n is a, c, g, or t
gcacgagggtggcagcaagncgcnngcggagggaggnagctggcttcctggagccttctcagccctcaaagacagaccgacagacagacagacagctggcaagaggcagcctggggnctacagctgcttcanagacctcatggctgagtgagcctcccctgggcccagcaccccacctcagcatggtccaagcccatggggg

SEQ ID NO: 682386 - DNA, 539 bp, Homo sapiens
ctggggtcgatatttggactgggacctttttctgtgtgggaggcaccaacgatgtgtgcgccgggtgtgtctcctgcgttgcccgccggtgaaaaatcacagcgggtttcttttttggttgtccacgcaccccttcctaccgggttgtctttgcgggggtgttttctaaccacgcgttccatatatgtggggagagcgtgtggtacaccgccgtagaggggcacgttcctaaggtgttccccgcagagttttgtgcgcgcgtggatatggcaccctcttctcccgcacaaggcgccttttatatggtggggcgccccttgtgagaaggcctgtgggccgaagcgtggtatagcatggcgtgagaggcacttctcttttgtgaggggtcttttttccctcctgtactttttttttcctttcccctaaccccaaaagtttattttttttttttggcgcccaaaaaccttgttttaaaaaaaattttttttggcccgacaaattaaggtttcccaaaaaaaagtcacccccccagaaaacca

SEQ ID NO: 682387 - DNA, 119 bp, Homo sapiens
  misc_feature (105)..(105): n is a, c, g, or t
  misc_feature (107)..(107): n is a, c, g, or t
ataatgaagaatagtaggtataatcatgccttctgtaataaataactgggaaaaaattaaaaatagggaatatatgttatgtgattttctagaaatacataagananatatatgtctgt

SEQ ID NO: 682388 - DNA, 251 bp, Homo sapiens
  misc_feature (192)..(192): n is a, c, g, or t
tacagttttggatttatgcttaatttggggtatttagttacaaaatttaaaggaaatataaggagtgtcctctttttttttaaattaaaaagtgttttttaaacggggcttgggggcccacccctgtaaccccagcactggggggacggctgtaacggcggggatgaccaccgcctggattctccaggagangtttggaacaccagccggtggcgcaccaaggggtgaacaccctggtgtttctataactc

SEQ ID NO: 682389 - DNA, 1082 bp, Homo sapiens
  misc_feature (49)..(49): n is a, c, g, or t
  misc_feature (79)..(79): n is a, c, g, or t
  misc_feature (115)..(116): n is a, c, g, or t
  misc_feature (124)..(124): n is a, c, g, or t
  misc_feature (130)..(130): n is a, c, g, or t
  misc_feature (135)..(136): n is a, c, g, or t
  misc_feature (144)..(144): n is a, c, g, or t
  misc_feature (169)..(169): n is a, c, g, or t
  misc_feature (181)..(182): n is a, c, g, or t
  misc_feature (214)..(214): n is a, c, g, or t
gcctgggtgggccgggcatacacgatgccctggttgtcctcactctcanagggaatcttgaggatgaagcagaactcgnagttgaggacaatcatggacatcgtgtatgcctggnntggagccngggtcntgagnncgcctgangaaggccaagtaggccagtaatganatcctgaacagnnatgtatgacaccatcctacagtcaagcaggtntatccaacgaaggtgaggagcctggagaaacgtacctgtcgtgagagatggtccgtttgtggcgaccagaagagcccatcatggatggactgaatggccgaactacgatggacatacgaaaccactgtcgccttcaccggctggctccgataggcagtgaagggactaatatgtcaagcgaactggagaaatatgctccgactttgtgaacgaacatgcaactgtgatatattggactgaccattagtgtgttgctaagacaaattggaccaaggacggtctacagttgtgggcttggagggaccgcaagaggtaaagccaggtgggcagatccaatgtcatcgcacgcctgaatgtggccctgccctgggtatagtcattcaagcacattgcggtgaccaagggaaacaatgaattggtgggcagcggcccgagagtgtgacctagggtgcaggaaagggagctgagtgcagccaatgcactcgcttttagccacgcatgagtaaactaagccttagggaggcggccctttcttgtgaattgtaccctgggcgcttacaagatggcaggcaaggggaacacgatagcccaacgtcttatggcatgaaggcaagatgggaatggtgatacttaatccaagtttgatcttgcataaggcaaccgtactggtattccacggtgacaaccaactatgtgttgaagtgccactgtctgagagctcccaaggtactccatttagtctgtagataacaccagatgtggattaccgttaactaagctgtccacagggtttggacaacatcactcttcacatgtgataattccagtgttaagaccaacatgttacgagagggaaaacaaaaatggt

SEQ ID NO: 682390 - DNA, 579 bp, Homo sapiens
acgagtggctgactcctgtgctcgcatgtcgtaccagcgactgatgttgttgcatcacaaggtcaggagataaagatcatcctgctgatcacggagaaacgctgtttcttctaaatgcaaaagagcatccgggtgtgacaatgggtgcctgcattcccatgtgcttggtatgctgaggcatgacattgacggtgactctgtgaggtgcagtttgctaagagccgatatcccttcactggactctagcctgagcttgccgagcgcagtagctaatgccaaatattccaccacttttggaggccaaggtactggacatcacctgtagcatggagtttgtgaccatggccggtcaacatggtggacaattgtgttcactaatactacaatgatcttctaggacggaaagtgccacacccgacaaggacagtttctgagggggctggaactgtattaatggcataatcctccgaaagtagagctttgccacagccccaggttgtagccattaccctcaaagccttatgaaacctgaatgtcaattctgtcacttctaaaaaggggaatgacataaccagtttt

SEQ ID NO: 682391 - DNA, 138 bp, Homo sapiens
aaggtggtgggagaaccggtaatacaaaaggaacctaaaaataacgggaacattacagtagaaaataatatagacaggtagtaatgtctgaaagggcagatcatgacgttggaaatgatcactctgagggtctgttga

SEQ ID NO: 682392 - DNA, 154 bp, Homo sapiens
cgtttaaaggatacacacttaaatgaatgtgactgtgtcagctttgcatcatacattttttgaaagatttttaaaaaagcctacaacttacatatgtagtagaatcagccatagctctgctcctggcatagagtcacctgttatgtggattaaa

SEQ ID NO: 682393 - DNA, 177 bp, Homo sapiens
caagctggtagtttaggacctgtgtggtttgttaggctactgtttgcattaataaattaaagcttcatagggtcttctcgtctagctgtgtcatgcccgtcctcttcacggagcagcgtcaatttcactggcttaaaagctaagagacagctgaaccctcgatgccaagcttgcaga

SEQ ID NO: 682394 - DNA, 794 bp, Homo sapiens
ggaggagaagaaacctcaccttcagggcaaaccagtgagacccttgtccctgccagcctcgacgtttgtgagtgaatggatccgaaatgaattcgagcggagacagacgttgaaaacggacggcaagaacagatcacaaggagcaagacagtacagaactacgcgaacgaccagggatgaaagcaccgtcacgaccgtcagaccgcaggcacatacgcacgaacagactgagtagccactgacacaacaaagagacaaccgacaccacagaccaagagacatgaacaagcacagacagaacacaatagtcaccacacgagaacagcacctacaagaaggacagaactaacagaaacaatagaatacaacaacaaacaacacacacacgcaacaaacaacaaacaataacaacaaggtaaacaacaaacaaaacacagaacagaaggaaaacaataaaagcagaagagcaaagaaataacaaacaagaactacgatcaagaacgaagaatagaagacaaaaggaaacaaaaaaagcaaaagcaacaacaacataaagaaccacaaaactacaagaacaaaggaccacagagaaactgacaagcagacaaacgagcagaaacaaacaaaaaaacaacgaaagaaaaaaaaataataaacaaagcacagaagtaacaacaacaagaccaatacgaacgcgaaaagagacaaatagaatgaacaaaagacgagacatgagacagagagaacagaatcaagcaacacgacaagcagaaaagagagagagaacaacaaaa

SEQ ID NO: 682395 - DNA, 119 bp, Homo sapiens
gtgcttgaaggtgctgagagcgatggtcatgcagtgagcggtaggaaaggaccatcctcattgcatgccccatgataggccaacaagttgatttcacgctgccgctgctgttgttgcag

SEQ ID NO: 682396 - DNA, 124 bp, Homo sapiens
gtagcaggagcaatatattgagcggctcgagagatatgtgtagagatgaacgagcgtgtcgtgtgactccgatgcgcgggttgcctgactgcctgggaatgtagccgactgaatttgcacacat

SEQ ID NO: 682397 - DNA, 127 bp, Homo sapiens
  misc_feature (121)..(121): n is a, c, g, or t
tgcaagcgtagtacccaacaatttgtaaggctgaggtgggcagatcattttagcccaggagtttgagaccagcaggggtaactgcgtctctacaaaatttgaaagattagccaggcatggntggcac

SEQ ID NO: 682398 - DNA, 244 bp, Homo sapiens
tcctgcaagaggctggtcccaccttggccgaggatcctggccttgcggttcctggacaggcatccaggagagccatggctgggcgccccagacgtgtgcactcaggggatcccggtccgtggggtgcaggccgcagtcggcggtgtcggagccttcgactgcccagctaggcggtacgtccggttcgggccgcagcgtctggatctcctttagtgctgaggagcgcttggccccgggcggcggg

SEQ ID NO: 682399 - DNA, 750 bp, Homo sapiens
atctgagggaatgatgtacatgaattcttgtatgttttgcagcttttaagtataaagttatttcaggccaggcatggtagtgcatgcctgtatacccagctactcggggctgaggtggaagattccttgagtctgggagtatgaggttgcaggagctatgatcatgccactgcactccaggctgggtggcagaggacaccctatctcttaaaaaaaaaaaaaaaaaaaaaaaaaaaacggggggcggtattccctcaaaccggttatttctcaaaagaaaaacgggggggctcaaggccagggggagggttgttggaccccagggagtttcaaaaaccagccgtggagcaatgggtggaacccccatgctctggcaaaaaatcacgcggggtggtggggggactccaccggggggtctcagcaactggggagcgcggagggggggaatataacgtgggagcccaggagggggagcgtggctggtcgagaatcgagatcggtgccatggcactccagctaatctccaaaaaacaaaaaaagagcgggcgtattagaaagagcgccattttgagcacgggggacagggggcgcgggacacacacgaatgggtggccaaaccttcatacatatcaaaacaaaggggggggggggggcaaaaaggatcaccacaggggcccagagtatagcacgaccaaagcgtttgtgtaaacacggggcccataggggcggccaaacaacgcacaccaggcc

SEQ ID NO: 682400 - DNA, 357 bp, Homo sapiens
taaagaaagtttatatctcaaatagatgctatatatgaaatcacttttttggccttttgggtttcacttaacacatttcttcttcaccaccaccaaaaaagcttatttttgacctgacagctttcaccataacacatttcatttacaaaatagttcccaatatttatttaccaagcgttgcattgaaaccacctttatgcacagtaacgcacccccatataagcacacagaaaggggtgtgtaaacacagtacgttcacttttcatttccttccgtggtgtggattacacatactcttccatccgcgcatttgtggagccacattattagtccatcctataccagagctcgtgccga

SEQ ID NO: 682401 - DNA, 1609 bp, Homo sapiens
  misc_feature (180)..(180): n is a, c, g, or t
  misc_feature (230)..(230): n is a, c, g, or t
  misc_feature (257)..(257): n is a, c, g, or t
  misc_feature (351)..(351): n is a, c, g, or t
  misc_feature (435)..(435): n is a, c, g, or t
acttagagttttgagctttaagataggattattggggcttacccccaccttaattagagaaacatttatatcgatctccaaccggagctgtacatctctctatccgaatctgtatactgaatgtcacacatggaaaaactttaggaaatgcacttattagagctgttactgggtgcctgnatacaaatcagcagtcaaaaatgactaaaaatataactagtgacggaggnagaaatcctccctctgtgggaggcacntactgcattccagttctccctcctgcgccctgagactggaccagggttagatggctggcagcttctcaaggggcagcttgtcttacttgttaantttagaggtatatagccatatttatttataaataaatatttatttatttatttataagtagatgtttacatatgcccaggattntgaagagcctggtatctttgggaagccatgtgtctggtttgtcgtgctgggacagtcatgggactgcatcttccgacttgtccacagcagatgaggacagtgagaattaagttagatccgagactgcgaagaagcttctctttcaagcgccattacagttgaacgttagtgaatcttgagcctcatttgggctcagggcagagcaggtgtttatctgccccggcatctgccatggcatcaagagggaagagtggacggtgcttgggaatggtgtgaaatggttgccgactcaggcatggatgggcccctctcgcttctggtggtctgtgaactgagtccctgggatgccttttagggcagagattcctgagctgcgttttagggtacagattccctgtttgaggagcttggcccctctgtaagcatctgactcatctcagagatatcaattcttaaacactgtgacaacgggatctaaaatggctgacacatttgtccttgtgtcacgttccattattttatttaaaaacctcagtaatcgttttagcttctttccagcaaactcttctccacagtagcccagtcgtggtaggataaattacggatatagtcattctaggggtttcagtcttttccatctcaaggcattgtgtgttttgttccgggactggtttggctgggacaaagttagaactgcctgaagttcgcacattcagattgttgtgtccatggagttttaggaggggatggcctttccggtcttcgcacttccatcctctcccacttccatctggcgtcccacaccttgtcccctgcacttctggatgacacagggtgctgctgcctcctagtctttgcctttgctgggccttctgtgcaggagacttggtctcaaagctcagagagagccagtccggtcccagctcctttgtcccttcctcagaggccttccttgaagatgcatctagactaccagccttatcagtgtttaagcttattcctttaacataagcttcctgacaacatgaaattgttggggttttttggcgttggttgatttgtttaggttttgctttatacccgggccaaatagcacataacacctggttatatatgaaatactcatatgtttatgaccaaaataaatatgaaacctcatattaaaaaaaaaaaa

SEQ ID NO: 682402 - DNA, 329 bp, Homo sapiens
ttcatgtctgcaccatctggctctgtgcgaatccttcttctggtcgactgccctcgatcgtttgttctctcagaagaacggctcgggcggagtgggggctgcctccgtgcagtctgcgatggccttacctgctgcctggtttggctgaagcaatcctgagtggggtctggggctgccgatcctgtctgtcctgccacccctgtctggctccctcactctgctgcagtggagcgcagtctgacctttcacgcagctctgcccccacccgttgcagaggtccaccatgtcgcgccatgcactccggcgccattgcctccgccgccattgca

SEQ ID NO: 682403 - DNA, 859 bp, Homo sapiens
agcggagtggccgtcgaggcgccgtctgttcgaagtgctgtctcgacttcacggttccccgcggctcggcccgggggctgatgagtagtctgccagcgatgaccgagagagaggagggctgctgctgtgcttgaatttgcagttccttgtgcgcctggcactgaagacctgtggcagcctcctggtggaaccattgcccctattcaagccctgctatatgccccaaattgagttccccaagtccgacctgtctttacaggtgccggttccacacttgagaaccccaggtgccctcatccctgcagggcctcgagccaagggcccaccgttgagggagggcgtgaatggaacagggcccctgggagaagcgggattgaggttccccagaggacatacagggaccgatgccaaacgaactgcgcagaattcggcatgtgtgcgcgttacaggggaatgaccatgggaagcacggagggacccccttgactttcctgaaagattggcactgttataacagtgaaccgcaacggtgacatccaaaagaaacaagcaagtcgccggaggtacacaacccaacgcgatgacgcgacagcatacctaggggacaagtccccgttgtgtacccagagaaaaattcctcaagtataaacgcgcccaaagaatgggcaggaatatgcagatcggggggggcatggcgcaggaggggagcaacaaggactggaaacgactgccagcaagtccatgggtccagaacagggcacatggaaccctcattgagaccagcgaagaagtaaccatattgccccgaggttaagtccacacaacaagatggaagaagggaagcaaggagacaaccaag

SEQ ID NO: 682404 - DNA, 266 bp, Homo sapiens
  misc_feature (29)..(29): n is a, c, g, or t
  misc_feature (119)..(119): n is a, c, g, or t
  misc_feature (128)..(128): n is a, c, g, or t
  misc_feature (149)..(149): n is a, c, g, or t
  misc_feature (191)..(191): n is a, c, g, or t
  misc_feature (197)..(197): n is a, c, g, or t
  misc_feature (232)..(232): n is a, c, g, or t
aagaatgtggcttctaatagtgctaaganttaaaagatgcttttatagagacttagagctattttggaaagctttggggcttcccagccacggatcacaattagactaagcccatggantttctgggngtgttgtgcagtggattcggntctagatccatcttacatttgtttagtgtttcccaatttttnggaganggggtgcacagcaaatttgaggagacttttttgantctcacacatgttattttcctcaagattctttta

SEQ ID NO: 682405 - DNA, 923 bp, Homo sapiens
tggttgttcaatatagaatcttaatgcactgtttaaatttggctcagagaaccctctaaatccccgtggtaaatataagctgtgagtccagagaggaacagctctttggacactagcgaaaaaagcttgtagagagagtaatacaagatttaagtgccataggttaggtcctaaaaggctgcctaccagttaaggaaagtcgttcaagctcgacattgcactacctaaaataatcccgttacatgtaattgtaagtccttcatacggccaattggagccattctatctagggccgttatagaaagaactaagtgttgagtcataagtctaccatggaaaaactattctaccgtccgtagtaagcctcgtggtctagcatgtgaaaagatcgggaactgacagattgaagctagcgccagatatctacggatcgatacccaaacagagtcatctattaccctctactgtataaccccaaggaacaggcatgctcataaggacaatggttaaaaacaaagtagacggaactcggggaaatcttgaccccgcctgtttactcaaaacacatcacctctagtcgatcactcagtattagaggcacgggctgtccaggtgacacatgttttaagggcgggtacccttggctgtgcaaagggtacgcatattcactgttccttaaaatatgggaccctgtatggactggtctccacggatgggtccacctgtctcttactttttaaccagtgatatgcctgcccgtacagatgttgtgatgaggcagaagacgaacaaccctcggggttaatttttacgcacgtactaaaaccaaggtctatacaactgctaaatctgtggggactcggagacaactcgaagatgaaactccgaagaaaatacatgcaatgcgaagccgaaacgctgca

SEQ ID NO: 682406 - DNA, 174 bp, Homo sapiens
tggtccagattatgagagaaccccggattatttatcaaaaatatagtttaaacaaagtagttggccgggcatggtggctcatgtcatcctagcactttgggaggccaaggtgggtggaactcctgacctcaaatgatccacccgccttgggttcccaaagtgctgggattccag

SEQ ID NO: 682407 - DNA, 267 bp, Homo sapiens
aataagggctttttcccctatctaagtagccagatgcattgaatgatgtgtcaatacgttcgttgaagcctcctgatcccacaggtaccccatgtgcctttatggagttatataataatgctgtctaatagccacgatctcgcaaaaggctttctgtgtgcggtcagttacaaatagagccagaaatacatttttattcttttagcagagggcatcgtctgttttctttgaagaccccgtacaattgtcttatgagttaatagccaa

SEQ ID NO: 682408 - DNA, 157 bp, Homo sapiens
acactgttatacgtgtgcaccaggtaagagcgtcttctgggttgttctcgtgtgagtgtggctttgaatcactctctgtacagcgtagcgcatgatgggggcggctccgcggtctgctcggcggagtggctctctgctcgtgtcttttgtttggatg

SEQ ID NO: 682409 - DNA, 232 bp, Homo sapiens
gacccgtcagtgtgtggtgtatgggtgtctggcaggccgtacaagaaagcagtgtcctccaaaatatcaagggcatatttctgctgagaaagataaatgccatgtttggagcgcgcaacttcaagtccaagaaatatttaaatggaccaagatcttaaagacaaagcaattgtggagataagtcttcagtgaggaaatggcagaaagcatctacccataacaccacacaatt

SEQ ID NO: 682410 - DNA, 220 bp, Homo sapiens
tggtacggtcccgagttcttagatcgatccccggctccagcccccgggccccggcggggctctgcgctgccggagcttgggctgtctgctgctgtcccggagcgccatgtcgtccgaggtccggccgcccggccggggcggggccagtgaggcccggccttcccgcttcctgcctgatgcctgcaggcccgcccctgcgtcctccgcccgcctcttttcc

SEQ ID NO: 682411 - DNA, 174 bp, Homo sapiens
cctctagccgactctagaggtatcccctcataggtcgcaggcgttactgtgttgaacaaaaggcacacatcacagagacagttgcaaactcacgcaatactgcgttatgggcaaaactaactggctccacaaccagaaaatgatgagactccgatttggactgccagcgaacac

SEQ ID NO: 682412 - DNA, 180 bp, Homo sapiens
atggctgagttctcaaggtcaagggcagaagagtggcttatgtccacctgaatgactgcgtgtgtcccaggtggcttcccacggaagggacacagaggtccagtccttctgaagggctaggatcgggattctggcagaggagaacctgccctgccactggccccatgcgtggattgccag

SEQ ID NO: 682413 - DNA, 423 bp, Homo sapiens
  misc_feature (72)..(72): n is a, c, g, or t
ccattttgtatatagtagagacggttcatcatgtaggcaggctggtctcgaaccttgactcaagcaatctgnctacttcggctcccaaagtgctgggattacagtcgtgagccacagcaccaggctaaggcatattttacgtagcataatgttttataggttcatccatattgtaacgtgtattagaacttccttcctttttatggctgaataatatctatggtatgtatacaccacgttttgttctatttatccgttgatagacattgggggtgttttatcttttggctatagcgaataatgctgctatgaaaatgggtgtacagatatctttttaagtcctttttcatttattttgcgtctgcccctaggaatggaattgatggattgtatggttaattctgagaaaccgtcgaattcgag

SEQ ID NO: 682414 - DNA, 294 bp, Homo sapiens
caggctgtggagagccccaagttgagaacaataatgaacaattattgtatgaacaattgttagaaacagctaatcacaaacaacctgcgggcacaaatgacctcattccacacgtagcacccttcagcaggaccctataaaactttcctccagcccctgcctctttgcaggtagccccttctctgctgagctgcccactgcaacatattttcacaatttctctaataaatctgcccttctttacctacaactatcttggtaaatggctttaccacctgcaaaactgaccctagg

SEQ ID NO: 682415 - DNA, 227 bp, Homo sapiens
ggtatgaccaggtgatatggcttggctgtgtccccacccaaatctcatcttgaattcccacatgttgtgggaagaacctggtgggaggtaattgaatcatggggccaggtctttcccatgctgttctcatgatagtgaataagcctcatgagatctgatggttaataagggggagtttccctgcacaagctctgtctctttgactgctgttgtccatgtaagatgtg

SEQ ID NO: 682416 - DNA, 200 bp, Homo sapiens
gagcatgaatggcatatcagaagaaaaacacaacaaaagatcttgttgtagctgtcaaacttaagggtcaagaatccactgggaatttaaggctttcttagaaatatttttcatggcactttaacattaaatatcactaaaaggcaaaatatgtaaatattcatagttacaaagctacataattgaaagtacatgccatt

SEQ ID NO: 682417 - DNA, 500 bp, Homo sapiens
  misc_feature (3)..(3): n is a, c, g, or t
  misc_feature (24)..(24): n is a, c, g, or t
  misc_feature (28)..(28): n is a, c, g, or t
  misc_feature (33)..(33): n is a, c, g, or t
  misc_feature (53)..(53): n is a, c, g, or t
  misc_feature (137)..(137): n is a, c, g, or t
  misc_feature (243)..(243): n is a, c, g, or t
  misc_feature (271)..(271): n is a, c, g, or t
  misc_feature (351)..(351): n is a, c, g, or t
  misc_feature (396)..(396): n is a, c, g, or t
  misc_feature (420)..(420): n is a, c, g, or t
  misc_feature (432)..(432): n is a, c, g, or t
  misc_feature (469)..(469): n is a, c, g, or t
  misc_feature (495)..(495): n is a, c, g, or t
ggncattatggcatagtgaaaggngctnagggnctgcaagtttcatgggatgncattatttttctcgttttcgtttgtagggaaatacatggcttctgtcattgacttgcaaggtttttttttttattcttaattgncctccctaatcctttctccactcagctgtggtactcaatggcactcaggattaaatgtgtgtgttcttctggggccagggaaggaatagataggcattgatgtggnaccctcaactgtattacagaatagggtngtaaacactcaggagaaacattctccctggtaaagtgctaagcaattgttaaacagcattttaaagcatgaatgaacgtnttgcttgtacattccaaagttccacaaacaaaaggaaaggtcttnttctaaaggagcagggagatgaanctgccgataatngtttttataaatgtggccgtgaatattttttcccagnggttgggaatcccaaatcacctcttncaggt

SEQ ID NO: 682418 - DNA, 169 bp, Homo sapiens
tatgacatgatcgaatcgagctcggtaccatagtggtgcttaggcaatctttccaaagtaaatcagtgccccagtgctacttatgccatatttggacatacttttttttttcttcaatttggtaaacttccgggaaagctgtcttcactaagtatcccctagtctctat

SEQ ID NO: 682419 - DNA, 748 bp, Homo sapiens
atgaagtgataagatgaaatgatgaaatgataagatgaaaagagttgatgagatgataagatgaaatgatgagatgcaaaaagcatgcagcatgcaacatgcaaatgcatgcaaatgcaaatgcagcatgcaacatgcaaatgaccatcaatgaaatgcaaaaaacatgcaaaataatgcaaatgcaggatgcaaattcacatgcagcatgcatgcacacattcacatgcatgcaccctgcacacatccatgcaaatggcaaaatgcatgcagcatgcagcatgaaaatgcacgcagcatgcaatgcagcacgcacaatgcagcatgcaacatgcatgcagcatgcccacagtgcatgcagacatgccacatgcatgcaaatgcatgcagcatgcagacatgcagacatgctcaaatgcatgcagcaggcacacatgcatgcaagcatgtcacatgcaacatgcaagcatgccaacatgcacatgcagcatgcacacatccaatgccacacagcgcaaaaatcgcaaattgcatcatcatgccagcatgcacaatgccagcatcaccctgcagcatgcacaatcaagccaacatgccatgcaaggtgcacacacgcatgggaatattgccttgcaaggtgcagcaatggaccatggcacacatgccaccatgcaacccgcaatgcaccatgcacactgccacagggccctgcgaccatggccactggcatgccatccttgcaaggtgg

SEQ ID NO: 682420 - DNA, 504 bp, Homo sapiens
cgagtgactctagaggagtcttatccagagaaattccaaagaagaccatgaatgttgcatgtgcacctttgtccctttctacaaggagcaggaggcagtatgccagggttaaggcatcatgtctgcagccaggcaacctgctcagtgtccctgttctaccaacttcatagctgtgtgactagtggtggttaatttagggtgtcaactttgacgtggggttaacaggacacctgagaaaagcgggtacaagcaattactgtatgggatgtatcccatgagcaagggtgtttcttggacacagatcatgcatttgaatctggtgaacctgagctacagaacagatcccccgttaacccaaatgtgggtgggcaccaatccaagtcagtatgagggcctggatagaacaaacatagaggaacaagtgaatttgcccactttctcttcttggagctgggcactcatcttctccttgcctttggttgaacatcagaactccagggtacc

SEQ ID NO: 682421 - DNA, 197 bp, Homo sapiens
tggaccctaaaaggtctggattgatcgtactgctttctgaaggaagacaacaagttgctgcatagtctacaaacacgtctctgaaataggtgaatttctagctcttcatggtcctgacattgatttcagtctttgcaaagatgaagaggtaattcgctgtacatttgtcaccagcactgggtttttgtttttgtttg

SEQ ID NO: 682422 - DNA, 481 bp, Homo sapiens
  misc_feature (6)..(6): n is a, c, g, or t
tgtcgnggtgcactgtgtcgtggtaggagaatgtcttgtccttgttttaggagtgtcaaataaaaaaagcttgagcaaatcaaattttaaagatttaatcgccttttactagagattcatgaatcaagcagcatcccatctacaaaatagacagagctgagcagaggaggtgtgctttatagacataaaagagctgaagaggcagggcatggtggctcacgcctgcaatcccagcacttcgggaggccaagctgggcggatcatgaggtcagaagttcgagaccagcctggccaacatggtgaaaccgcatctctactaaggatacaaagaattagccgtgcgtggtggcatgcacctgtaattccagctacttgggaggctgaggcgggagaattgcttgaacctgggaggcggaggttgcagtgggctgagattgcaccattgcactccagcctggtcgacagggcaagactccgtctc

SEQ ID NO: 682423 - DNA, 90 bp, Homo sapiens
ggccagatctcctttcatcctcctcctcatagcgtttgttgaggatgtatcccgcaggaaccgctccccttcatccaactcagggtcgtt

SEQ ID NO: 682424 - DNA, 117 bp, Homo sapiens
caacatggtgttcaggcgcttcgtggaggttggccgggtggctaatgtctcctttggacctcatgccggaaaattggtcgcgattttagatcgttattgatcacgacagggctttgg

SEQ ID NO: 682425 - DNA, 971 bp, Homo sapiens
  misc_feature (971)..(971): n is a, c, g, or t
ggatctgcgttctctatcgcagtggtaaaggtggacagacaaggtcctaaacctctcaagatgcctaccacgacatatgggtgagagaaaacccgaatgacggagaaggtcggtcgcagatggagaagcatctacaactagggatcgctccgtactacagagctggattccgctctacggtacatgtactggcgaatatatggagatttgagggatgcacataaaattctgcgagaaggggatctcgtattccgtggcaggcgcatcccaagagaacatcaaaagagaaggtggcgccggtgggtgtcgggcacactcccgtgcaggaaccactacctcattgaccgcggccgtcgagtgcacgtttgatgagggtgataccagtgcgaatatctctccagaggatctcacgcgcaggtttgcgaaagtctcgatttaggaatttgttataagcatcactaagactagatggcaattgtccaatgaacgatgtcttcctagtcatcgatagatgatcagttataactttttatgaatcgcacatgggctttccagcgagatgtgacgtgggagacgaagattgaacacggcgatcgtcggatggggttgaggaaagggtcgatggcgatgatatttgatcttcgaatgcaccggagtggagaataaccagtgagctagcccacattatccactagtcgtttgctacaatagttgcaggatcggaacaccatgactcgatgcttcgacggggtctttcctcgcagtctagtgaatgaaattgcgccgcgagtcctatacttgggtacttcctaggagttgagaactgggcaattccccttgcgagtctcaagctaatttcgtagggcacttcgtgcacagcggtcaaagacgagggatagaaggtcccccagagtattgctcgggtagaccattaagttggtttcggttgaaaggccttcacgctggtgacn

SEQ ID NO: 682426 - DNA, 220 bp, Homo sapiens
tgagtctgtaccacagtagtgagaatgtaggggctggtgacaggagacacactgcagtgtgaagaagctaagccttgaggccccttcctgaggccttgtacctgttcctttagtcagtgtttacttgactgtctgatttgcctgctgtaaaactggaacctttttggtatacatgctctgtgagttgttaagaaaatgcatagatgttgtgtctctagat

SEQ ID NO: 682427 - DNA, 1063 bp, Homo sapiens
gaacgttatttaattcttttatgactatttcttttttttgttatattatgtgtacaagctatatctagtatgtatttctctcatttgtcatttggtatataatttaatcgtgttagatgttctcttgttttatatatcattgtgtttacctttaacatttgtgatcttcttgaaacctgttgcccttcgggaacatgaacaatatggtggctcgggaaatcgaggctggtcccatataggatctggcccatgcaaaaacttgctggtgctcagatgacactctgagaccaacggtttgtgtcaaagactgatccttggttttctcaatatgtggtggtgggctctgattttatcagcttctatataggtcttgcggtctttaggaagctatgtgaggtggaatccctgttatacggtatattatatcttgcattctgttggtaacttatgaattggcccctgtggatatcgataagcctgtgccataaaatggggtgtagcaaaagttgggttccgtctgtgtttactgacaccacagctcttacaagtgatgcttccttactttaaactctacgctccttctgtgtctccatgcttcatgggtgactttgttccttttgcctgtcgtctcactgctgtgggatgtcaactccagtatcatgtctttattagtaggtaggacaagagaggaatcgacaaagaaggcatgtaaccaccatgaatgttgcccctagtcaaagagctctccaggaagcaccaacaaagtgaattttcactgacatttcccaggccagaccatgctgctgtctaagcaaaatgaggattactgctagtgaggatgaaaggaagaatgtgtaatcagttttcttgaagtataatacactgtacaataaactgaacctgagttggaaatatacatgttggatgagttcttgacagatgtatataccacagtcaagatacagaacagttcccattcactcccatagattgcttagtgcttccctttgtggtcaatccctcctacacgggcccctagtaacttaacctcgtggtgccttca

SEQ ID NO: 682428 - DNA, 309 bp, Homo sapiens
  misc_feature (95)..(95): n is a, c, g, or t
  misc_feature (151)..(151): n is a, c, g, or t
  misc_feature (262)..(262): n is a, c, g, or t
ggccaatagtgattgtttctaaggtacagtcacagggccaggaacaatggctcatgcctgtaatcccaacagtttggaagacggaggtgggaggntcacttgaggccagatgttcgagaccagcctgggagacatggcaataccccatctntacagagcatttaaaagttagccaggcatggtggcatggacctgtggtaccagctaattgggaagctgaggtgggaagatcacttgagcccaggagttccaggctgcagtnagctgtgatggccccactgcacttccagcctgagcaacagagacaga

SEQ ID NO: 682429 - DNA, 159 bp, Homo sapiens
attcgcggccgcgtcgactgaggacaggtgtaaacaagctctattattaacaataatgccttgtatttgtatagtgctttataattaacagagagcgataacatccatcaatatatttgaccctcaaaacaaccctctttgagtgcttatgcatctgta

SEQ ID NO: 682430 - DNA, 226 bp, Homo sapiens
tgataagctcgcaccatttagagcaatgagaagatgcagatacaggatgcacagaagcccaagtgaaaataacgagttgcacaacagtgtatacattatatttgtgtatatatgtacacttatatttgtacatttctatataacatcaatgcaaaggaaagtgtctgattttattatacaccaaaggttatcagtgaatctctgttgtgatctccattttaatata

SEQ ID NO: 682431 - DNA, 174 bp, Homo sapiens
aaggccccccgggggggggggggggcccggttcccttttttttcccaaggagggggggggggggccccgaccccccccgtccccccccccccagggggccccccaaaaatttacccccccccttgggttttttttttttttttttaaaaaaaaatggaaaaggttttggtccca

SEQ ID NO: 682432 - DNA, 226 bp, Homo sapiens
attcgcggccgcgtcgacttcttttgtttcttctccttccccctccccctacctccttcccctcactcctcccctccttcgctcgcgcaacctcttttggtcactatgtgtcacttgaagctaatttgtactactggatatctgactggagccacacataccgaatctgtattgtccttcctgaaacacagcatggaattaacattagacttaaataaaacaaacc

SEQ ID NO: 682433 - DNA, 363 bp, Homo sapiens
ttacccaagcatttctatatgcacagctacatatctgaaaaagaaatcaagaaagtatcccatttatatagctacaaatataaaagatacctaggaataaacttaaccaaagaagtgaaagatctctacaataaaaactataaaacactgatgcaagaaactgaaaatacaacaaaatggaaagatattccatgttcatggattgggagaatcaatattgttaaaatgtccagacttcccaaagcggtctacagattcaatgcaatctctatgaaataccaataatactctttacagaaatagaataaattatcctaaagtttatactgaaccacaaaaaacctcccgtaggcaatcaagctt

SEQ ID NO: 682434 - DNA, 468 bp, Homo sapiens
  misc_feature (63)..(63): n is a, c, g, or t
  misc_feature (149)..(149): n is a, c, g, or t
gggatcaacccacgattgtgtgcccctttttttataaaaactggaatgtttgaaggttgtacnacaggctgtccttctctgttgccaattctggaaccaaaatatgcagttgaaaaaatagtagaagctattctccaagaaaaaatgtncttgtatatgccaaagttgttatacttcatgatgtttcttaaaagctttttgcccctcaagacaggactgcttatagctgactatttgggcatccttcatgcaatggatggctttgttgcccaaaaaaagaagctttaaagcccacctttatggctaaggtcatttgatacccagtgttacataatgggtccttcaataaaaaaaagtatttttgtctgccagtggaatatatttggagcccccaagtccccctcctattttgttatctggactagaattttcaatcaatgtgtttgaaaataatgttgctttccccta

SEQ ID NO: 682435 - DNA, 118 bp, Homo sapiens
  misc_feature (84)..(84): n is a, c, g, or t
ggcctccctgtggcggcggcttgttgttgtggaggccataatggcggctcaggcggcggcagcggcccaggcggcagcggctcngtctgcgcaggccgaggcggccgactcgtggtac

SEQ ID NO: 682436 - DNA, 481 bp, Homo sapiens
ggatccccaagcagttatacagactcatacaccagcctactgctatttgtacttatataaccccctcctcttgagagtgggctggatcaagtgactaacaaatagaataaagcaagtgtgataggatgttacttctaagattaggttacagaaggctgtgacctaacttgcagcagactcatgctggcttttgatgaggcaagctgccatgttgtagaggaccagatggcaaggaactgagggcagcctttggcaaacagccagcgagtaacagaggccctcagtccagtagcccacaagggactgcatcctggcaaacaaccacctgagtaagcttagaaatggatccttttccagttgagcattcagataagaccacagcactgaatgccttgattgcaggccttatgagagacccctaagcccaaggaccgagttaaaacatgcctggattcccgaaccacaaagaatggtgagacaa

SEQ ID NO: 682437 - DNA, 930 bp, Homo sapiens
  misc_feature (930)..(930): n is a, c, g, or t
aagtgctcgattacctgtggcagagtgaatggcagtcccgtgtaatccaattgcatgcgttagatcacaggaagacatgcaattgaatgttttgcctcagaaaaactgagcatacagggcatgccatcttcaacccggcgatgagaacaattagtgtaaataccataagattacccagactgatggctcgtgatttatcaaagtgcctgggagatcagtggccagtgtactgccgagtgatacgtgaaagaacctatgtcaggacatgcggtggtatcagcgctgctgtgaaacatgcagggacttctatgcccaaaagctgcagcagaagagttgacctctagcaggctggctggatcacagctcttggcaattacattatttataaacacacacactagcatgtttttccagaccaaatattatcagattacatataatttaatcaaattactttattttttgtgcctgccaaacatccaatgtggtgcttgtttggttacccaaacatttttgatttatactatattggttccttaattaattttatatgactgaatttagtgggattccagtaatatatacacaagacacaagcgaagacaattgattcatttattccttaaaacaggttgtcggtggtggtagggccatctcctaagggctacctctcccccataactttggattatccgaagggttccggcctagcctaaaagttaagcggattaccgaggaccactttggtgtggggccgggcgaatacccctttcttcaccgcggaagtggtacacatgacccgcgctggccgcggtacaagtttaatagggcacattaacaccgacgtgggtttcatggtggcagaaacaatcgttttctcactagacagacactggcgccaacagcttttcacgaccattctaatattcn

SEQ ID NO: 682438 - DNA, 712 bp, Homo sapiens
cgggagtaaagatggccgcgctgtgcaccgctgcccccgtccccgcacagttcaagagcatacagcatcatctgaggacgggtcaggagcatgatgagcgagaccctgtggtggcttattactgtcgtttatacgcaatggagactggagatgaagatcgatagtaaagactcctggaagtgtggcaaatttttatcagaagttaatggatacagttaggaagtcgtctagagagaagcagtggggtgataatgaagctattactcaagaaatagtgggctgtgcccatttggtagaattatgcttgtgaaaatgtttttgtatgcagacaactgaagatcgtgctggacgatttcagcaaaaacatgatcaagtccttctatactgcaagtcttttgatagatgtcataacagatattggagaactgcacgtgatgaaaatgtgaaagcacaggaagttatgccagatggcaaggcaatcgatacatccatcacattgtcgcaaagaatgggggagactcctcaagcaggccctgtaggaatcgaagaagatcacatgatatgagacaaaaatgaggatgctggaagcagcctctctgcccactcagccaatcagacatcatcatcttcaagttatgacccaagaacatgccatcaggcactatactggaatacagatacctccgggttcaccaagctccaggttatacac

SEQ ID NO: 682439 - DNA, 621 bp, Homo sapiens
ctgctcgggaggctgaggcaggagaatcgctggaacccaggaggcagaggctgcagtgagctgagatcgtgccactgcactccagcctgggtgacagagcaagaatctgtcaaaaaaaaacaaaaaacagaaacaaacaaaaaaacacacattcttttcaaaaaagcacatggaagagaaaaaagcacatggaacacattcactaagatattatattgtgggtcgtaaaacaacatctaattgataaaacaatttcacattccttatcaaaattccagcagaaatttttatagatataaacaaactgattctaaaatttatatggaaagctggctgggcccggtggctcacacttgtaatcccagcactttgggaggctgaagcgggtggatcacttgaggtcttgagtttgagaccagatcagcccggctaacatggcaaaaccccgtctctactaaaaaaaaaatacaaaaactagtcgggtgttgtggtgggtgcccctaattccagctactccggaggttgaggcgggagaatcacttggacccgggagacagaggttgcagtgagctgagatcgtgccactgcactccagcctgggtgacagagcaagaatctgtc

SEQ ID NO: 682440 - DNA, 651 bp, Homo sapiens
acttgtgtgtttgcagctgtgagagggacacaactggaaagtgactgctactggatctacgttccttttgggagtccagttgcattatttcataaatatagtagaaaccacaaaatagtctatttgaaatggttgattctaggcataggaatatagctgttaaagtggtgactgggactccactagcgtccagccttatggctttatttgaaaaatctgagtatccagtaaaaatgggctatcactgacagctcacatggccatgtcctgctgaagctagacagcagctacccctttaaaaaagaatatgtactctatagtatactagtctctaccacttcaaagttacctgcctagtccatacagatatggtaactcctaagcctcatatggtgaggaggagaactggtagtggtagcagcgaagacagatacaaaggtgaaaatacaaaggacctgcaattaaatgattcccctaagataattcaactaataagtggcagagctaggaacagactgtttattaatcttcagaaatttattctctacctaaaactaaatggtcaaatttatttactcttataatagagatacctaaacatactttactttaactatctcctttgttctgtagtaatcatattctcgcaaa

SEQ ID NO: 682441 - DNA, 214 bp, Homo sapiens
ctctccctaccatattgacattctctggcttctcttatgctatcgtccgttcggttagctcttacatgaaccattgtgctcggcaggactctaggggctcctctttagtcgtcctgcgagcttgcggtgtttgactatccgcctcgttcgatgttatacctgctttccggttgaactcggataaaacccctgatcgaatccttcaccaccttct

SEQ ID NO: 682442 - DNA, 853 bp, Homo sapiens
gcttgtttggcggtcccaacatgtggagttgacggtgaaggtcgcggctctaagggggctttctacaagggatatatcaaagatgtcatgaagactcccttacagtggttggaaaataattgggaaccagaagcgccaggtcccatttaagtgaagttagataaccaccaccactgtgtatataaaaaagagaaattagtgaaggagatgaagtagaggtatatcaagagcaattgaccaagagccatgtgggtggtgttggctaaagttcgggatgatgaaaggagaattttatgtcatggaatatgctgtgtgtgaggctacttacaatgaaatagtcactatttgaacgacttcggctgtcaatcaaaataaactgtcaaaaaaaataccttcttataaatgcacaaggtgatgtcctgaggatgggaagagagggtgtgctatgaaaatgcacataagagatttaagaaagcagtaggagcatgcagaattttttaccatccagaaacaacaagtaattgatactgtctgccagtgaagcaattgtgaagagagtacactcttagagtgaaatggcattggcgaagtattcgtaagaaagttggatgcttattgtccagaaatgaagggggcattaagcttttaggatgcgcaaaacaattggacgcagttttcatgaggaatgtgtgtgagagaagagctaatgggggggaaaaaggacactgtgtttactccagcagtagaaggtctgggtaccgcatgggtaatgaaatggacatcaaaatacgagagggtgggggaaaaggcaaggttgagggggaaaaaggtgaattggaatgaagaggtctaa

SEQ ID NO: 682443 - DNA, 461 bp, Homo sapiens
tgctattcatgtgttgagttttatacttctttatggatggtgtatgtgaaatgtggagacttccacattctcagtttattcacattgtgatactacctttgaaggtttttttgtttttgttttgttttttgagatggagtttggctgttgtctcccaggctggagtgcagtggcgtgatcttggctcactgcaacctctgccttctgggttcaagcgcttctcctgcctcagcctcccaagtagctgggattacaggcgcctgccaccacgcctggctaattttttgtatttttagtagagacggggtttcaccatgttggccaggctggtctcgaactcctgacctcaggtgatccacctgccttggcctctcaaagtgctgggattacaggcgtgagtcactgcacccaagcctcctttctcttttgcctattaaacctctgctcttaaccttaaaaaa

SEQ ID NO: 682444 - DNA, 450 bp, Homo sapiens
  misc_feature (367)..(367): n is a, c, g, or t
  misc_feature (386)..(386): n is a, c, g, or t
  misc_feature (420)..(420): n is a, c, g, or t
ggtgtttttgagacggagctcggatctgttgcccaggctgcagtgcaatggcacgatctcagctcactgcaacttccacctccttgcttcaagtgattctcctgcctcatcctcctgagtagctggaattagaggcgcctgccaccacgcccagctaatgtttgtatttttagtcgagactaattttcaccagtttggccacgctggtcttgaactaatgatgtcaggtgatccacctgcctcggcctttcagtgtgttttatttttaaagcagattactttattgaatagtttttgttggggtacttaagtactttacatgctttgcaggctggctggatttaatcagttctttgaggggaggtantctgtcatccttttcaggngaggggaactaagggttaggagatttatgtggantgcctagggtcacagtgacgtttggtggga

SEQ ID NO: 682445 - DNA, 738 bp, Homo sapiens
ggccgtggactagcagctctactaggacactgggctgggggggtgtgcttggtggttctggtaatgattgtcgtgacggaaaacagctccatgcgggaatatagcagccacgaagaatcatcaaggtgacgcgcagaattgtctgcgccgggcactcagtagagatcctcaaacacggtgagggtctcggagtcatgtcgcaactgtgctgcagagatcatcacaacagcatcgtgcgcgctcgcgatggacgagttatatctcgtagagaaagggttcacaggtagctcggtgtttcgacccttaatgtcgcggccgggagcgacttgtagtaacgagagtggtgcgcaagagagctcataacaagtgccagcgaagatgcctgccaagtgtatactgtcaaggatctgggagagtgctcgatccaaatctcaatcactcatcaccctcggacgaccagtgggagctcgaagcaggggaaactgttgttggtggagtaacttgcaaggggtgccgccagctgaactgactggtctaggcctagccgaaacgtctataggaagggacaaaacgctagtcatggttgaggaggagaccaatgtcactggttcccttaggctctcgagtgagaccacgctatggacgactgtggtatatggcctgaggagtcatgcgagttatctacggatgtcatctcctttgggatacgtgagatggtgttccagataaggtgagcta

SEQ ID NO: 682446 - DNA, 112 bp, Homo sapiens
aatcagctcggtacccgtgatcgcgaatggcggtcggggcgaaaccgaagcgtttgcgaaacgttcggcgaaacgtgatgcgctttcatagccgacatgttgcgcgatggcg

SEQ ID NO: 682447 - DNA, 536 bp, Homo sapiens
  misc_feature (7)..(7): n is a, c, g, or t
  misc_feature (9)..(9): n is a, c, g, or t
  misc_feature (11)..(11): n is a, c, g, or t
  misc_feature (464)..(464): n is a, c, g, or t
  misc_feature (526)..(526): n is a, c, g, or t
ccaattngncntggacacgaaaggattttacaattgcagttcactccctagcagaaaaaacagcaggactctgtactcgccataacaaaggaaatcactgggctacccagtgctgctcaaaatttcatcagaatggcaccccattggtaaatgagatgggggcctgcacccgggcccctcaaacaatgagggcattcccaatgcagaccacaaccccacttcagggatgggttcctggaggcacattgattccctcaacccaggaacaccaggaagtgcaggattagatctacccaccagagaaagaatcacattagttaggggagacaaacctatttgggtatttggggacctttaccgacaggatacacaggactaattttaggtaaaagctgccttaacttgcaaggcatcactgtagtcctaggaatgactgactccgattatgaaggagaaattcaagnagttttaatgtcacaaaatctttgggtttttgaactgggagaatatattgctcaattattgnttattccctg

SEQ ID NO: 682448 - DNA, 439 bp, Homo sapiens
ttgaagactcttgatgagaattgcctggtagcttttttagaaagattgtcacagcgtttgttgccattgttactgtattgtagttacctttctgcttgtctgctccctttcttctattacttgataagcttctaaagtcctttaacaaacatctcatggatattcagggttgttagcattaatggctctatattggaacagaagtataacagaattttggatctaaatggaaccctagagggtgtctagtccaacatctcgtaatggagcgttccctgccctctggtcagctaatacaatggggctttgacagaaagatggctatacgaaggaggtttattcgtttaaaatattgcatatgggattacaggcgtgagtcactgcacccaagcctcctttctcttttgcctattaaacctctgctcttaaccttaaaaaa

SEQ ID NO: 682449 - DNA, 212 bp, Homo sapiens
ccccccccaaagggggggggggggagaaattttccccccccccgggggggcccccccgggggcccccccgggttttccccccccgggggggggccccctttttttttgaagcgccctcctttcccccgggggggggtgggggggggcccccctctggggggggcgggtgtgttttttctcgggcgcaaaaccccgggtttttttttttttga

SEQ ID NO: 682450 - DNA, 795 bp, Homo sapiens
taggctagtacgaggccgggtgttaatcggccgaggctcgaactggctgagactgagcacgagaacacgggttgaggcacaacatcgagcgcatgaaggaggagaaggacttcaccactactctcagaacgcaaacagcctactacaggagaaggagtgcctctatgtcgcaacgcctggtggaccggcggaaatggatgaggcaaccagtgcagaatcgcctgaacgcgaggcacagtacttcctattctacaccctagtaggctcccttcccctactcatcgcgactgatttacacgtcacgagcatccgagcccagaaggagcgagccgagcaagagcgaggagtatgctgagcagctacacgtgcaactcgctggacaaggatctttatgtcgctgaagcttctatccactctggaagtcctggaggagccgctacaaccaaggttgtacaagaaacagggagaccttgagctggaaattattgtcctgaatgaccgggtaacagatctgtaaaccaacaacaagaccctggaggagaagatgcgggaagaccgggatagcctggtggagagactacaccgtgcagactgctgagtattgccgcattcaagcgtggaggaatgagaggctgaaggccagcttgtgctccaatggaggacaaactcaaccaggcacacctcgaggtccagcagctgaaggctcagtgaagaactatgaggggtgattgcaattataagagtcggtgatgagaccgattggtgcgatgaatattgccagaaaaagcgggagca

SEQ ID NO: 682451 - DNA, 404 bp, Homo sapiens
gaacctaatccatgatcactgatacactccataatcccgtgcgccgttggcccacaggaaagaacatcgggcgtatagtccaggaagctgagaagtacaaaagactgttcatgataaccagagggccccggtgtcatccaagacttcacttgaatcctttgccttcatcatgccaggaactgttgaagatgagaaacttcaaggcaagattaacgatgaggacaaacagaagattctggacaagtgtaatgaaattatcaactggcttgataagaatcagactgctgagaaggaagaatttgaacatcaacagaaagagctggagaaagtttgcaaccccatcatcaccaagctgtaccagagtgcaggaggcatgccaggaggaatgcccgggggtaggaggt

SEQ ID NO: 682452 - DNA, 491 bp, Homo sapiens
cgaggtggctgcaaactcgcgggcacgcacggcgcccggggagccgagggactcgggggaggggacgcgcgcggaaggcgccagcttccgtcccgccgcgcccctggcagctcgcgagccgaggttaggaggcgcccggggccccagccgggcagagccgagcggcggcggccggcggcggcttccctattgctccccgaggcacgaggccccggagacggcgcggggaccgggccctaaaaagagcaggaaatctcgatgaaccgcccgcggagagaagccgatcgagccatttgtctggaacgtcagcgatctccggcatccggctgcaaatgtgttcctggtgacattagcatcgggcagacccgccggaggagcgaggagagtcgccaggttcccagtcgtgctttcgagaggcggatcgagcgggtgacttgaggtgcattcgtatgaatatatggcaaatctctctatttttcctccctcgctcg

SEQ ID NO: 682453 - DNA, 1114 bp, Homo sapiens
agccaaggctggtacggtcggagtcgtttggatcgactcttccgaggctgagcgctggggctgctcggggcggggctgagcctggggaccagtgtgattaagtactgtgctccaggatcccatttggtctgctcatggccaagtgctgacctagcgcgtcgatgatgacctaccaggtgccctccaggtgaggcaatttcatgcagcgccttcttggccttcctttcagaggtagtaggtgggggccagtttatacttttctggggtgctggcatctgccctggataggatcaaacgtcttctatctttcttcctgctccttggagctctgttactatcttcctccctaggaggagcagcggtttcctggtcttggaaggccttgtacctcgcataagcactagtttaggcgcgaggcacgctatgaggtgggaaagctgtgtgtcacaggagaaggctgccagcttcatggcgtcctggtccgggtcctggatcccagcctctgccttctgaaaccccttcttgggcagggacatgacctcgtgtgtctgaagcaggatctgggagcggctcctgtgccatgcggaatgcagcagactcggttggctgaggacctcgcggcgggtaactgagtgctgtgcactcctgtggtccggaagggccacactgcctctgggctcttgatgtgatggcctgtgtggacagtgagagcatgcacccaaagatctggtcaccctgatgacccattcttactcacagctggatggactggcggctggagcccatggaaacaagggtggaagccagcagggccaagtaaagatggggccatgatgacgagaaagctgcagaggaggcccaaagggcggcgcccaaggccttaaagctctcagggactggcctattgacaggactgctggcaaagtacagacgaagaaatcatatcaattccagacttaacataaatagcagtgaaacagcacacggcaaagactcatacaggaaacaatctccaggagtccgtaaaaaggatactctcacaagtcacaatctaaaacatcaattaggttaacaaccagggaaatgatccattttcacaacaaagggcaatcca

SEQ ID NO: 682454 - DNA, 244 bp, Homo sapiens
agaccgatctcctttggcaggtatctagtataaagtaactgtacaacatatgtatcgttgaagcagaaactttacaccagtgtcattatgttatctatagagacgaaactactaccacaagtaagatgggcttacaagtatgacacaagcctgtgagagggcatgataaagattaacttttgattgcctatctttaattatgatcgctactactgtctgctcacaattcctgtgcgcatttcaa

SEQ ID NO: 682455 - DNA, 107 bp, Homo sapiens
tgctcggaccatgtggagaaggagatgtgagaagaggagatgtggagaaagtcagctctcagaacaaattagtcagcttcagtctcgatcagcagggtcttttggat

SEQ ID NO: 682456 - DNA, 780 bp, Homo sapiens
tgaaggcctggaatgagccagacaaggttccagcatgaggaagaaatgataggagagtgacggatgaggaattgaaaggagtgactcgcgtgagacagatgctgtgggcgtccttcactatcgtactgagtagtgcgcccttggatattgaatgcaaggaaaagaatgatgagctctgctggctagagatatgaaacagaatcgagagctgtgacagcattagaaagaacacgatgctccaatcagactgtgtgtgaagagaagacttggatacgtctctgagttggaagaattggaacggctgtggagagccaccggcatgaagataagatggaacaagatcggacttccatgggcatgaggggggaaggccgtggggaaaagaagtgcgttgtggctgaagtttgcgcttctccgcgtggtcaacgagtcagtatctatcgaataaacagtagaatgtgaagaggagagggcgaggaaagagatagagaatggggaggaacatattaagaattgaagacatactgaatggagatagccctcataggaaagatggtggttggaacgtagaagggccgtaagaacaaagattaagaagaagaaacgaggaaaaggagaacgcgagggtacaatagacggatagaagacaagagctagcatgtggcatttaagccaatcaagaaaaggaaagaagagaaatcccctggtctgattcagaatcagataggagcagtgacgaaagtaacttttgatgtccctccacggagaaaacagagccac

SEQ ID NO: 682457 - DNA, 133 bp, Homo sapiens
tccagctggcccccaagctcgtgcggtgaccccactttctccaagccaggggaggggtactgacccacaggttggtggggggcagactcccttctcgtgcctcgatttagtcacctgcagaattcgtgggagc

SEQ ID NO: 682458 - DNA, 936 bp, Homo sapiens
gcagatagggcgtcgcgccgaggcagcggagcgttctgcgggctgactggaggttggcagctgggcgggagaaagaggaagtgcaggcgcggctgggcctcggcctctggcgccgtggtaccctttgtctcggcagcctgacggccccgcctgggctctccggagatggggaacgggcggcgagggtggcgtggtcctgggcgccctgttgctgctggggccgagatggcgctcgggtcgcggccgggatcggccggacccagaccagggttaactggaacgagccgtggccaaagatcccacagcgcagtgggccccaccagcaagacagaacagacctttggcacgctgcgggacttgcgacgtccatgaagcgcggagagaaagccctggcccgtatctgaagggccttccggtaacctattcttgaccccacacaagaagcttccgaccagaccaggagcacaccttgccgggcgcttgacccgtagccttccagggcacaagaccgcttcgacacacatatcgggccagaggtaccatcctcctagccccatgggacaaacaggtttatcagttcaacgtagatggatagttccaacgatgatggatctgcgggaggttgaacgccttcactccccaaaagtcgttggtaaggcacattcatgcgatgattagccccttaagcccctcaaagggggttgcaactcaggtagacacacaccatagcaacaccccaagaaccgggtcagattgcatctaccttgggtcacttgcacattaaggatgcatgggatgtactatgccccgcacggattcctcaagggccatcaggtaaataaccacgggttacccacaaagtatacggttcttgggctcattgtaagaatgcccttcgacttatgtaagcagtggtagtgccaaacgcgggaaaaa

SEQ ID NO: 682459 - DNA, 237 bp, Homo sapiens
tgtacccctaattgcttcttcgatgacgtatactcattcaaacattatttaatacaattaaacattctgtgatcaagtttgcctgatcccgtgagcacctgaacaagagagcacagtctctcctctgcctactcctccagcctcatttccagtgaatcccttctacgtctcatcactgattcacttcaacaacataggaaaagcaaagagaggctggctcaataacccgtcatcgaa

SEQ ID NO: 682460 - DNA, 669 bp, Homo sapiens
  misc_feature (476)..(476): n is a, c, g, or t
  misc_feature (569)..(569): n is a, c, g, or t
  misc_feature (644)..(644): n is a, c, g, or t
gacacgatctcgtgttcactgcagcctccacctcccgggttcaagcgattctcctgcctcagcctccaaagtatttgggattacaggcgcctgccaccacacctggataatttttgtatttttagtagagacggggtttcactgtgggccaggctggtcttgaaccgctgacctcaagtgatctgcctaccttggcctcccaaagtgttgggattacaggcatgagccactgtgccagcctcttctaagagttttatggttttagcttacgtttaggtaattggtcaattttaagttaatttttgtatatggtgtgaattaggggtccaacttcattcttttgtatgtggaaatccaattgtcttggtaccatttgttgaagagtctattctccattgattagacttggcatccttgtcaacaatcatttggctgggccaggcatgtggttcacacctgtaatcccagcactttgngaggccaaagtttcatctagagatgaaaccccatctctagaaaagtacaattagctgggcatggtggcatgtgcctgtggtcccagtacttgngaggctgaggtaggagtcacctgagctgggagtttgaaggtgcagtgagccgtgaatgcaccactgcacttcagncttgggttggagtgagctctgtctc

SEQ ID NO: 682461 - DNA, 375 bp, Homo sapiens
  misc_feature (22)..(22): n is a, c, g, or t
  misc_feature (177)..(177): n is a, c, g, or t
gctgttgccaggctggagtgcntgtggcatgatcatggctcactgcagtctcaaactgctgggctcaagcaatcctcctgcctcagcctcccgagtagctcgtgccttcagtctcttgcctcgcacctgggtggcttaccgccacaacccaacgtttggcagacggggacagcagancgggagagaacagatagcttttctgtagcacgtatgaggcatcagtgaacgtgatacctgtcatccttgctcttccgagtgcctggctctgtcacatggctctcaggctgctgaagcattaggggcctatcagagacataactttttgccggcaggatcctccgggaatctgaataaagctatggctctttttcccac

SEQ ID NO: 682462 - DNA, 566 bp, Homo sapiens
gagcgggaaggggagggctgcgggtggaaaggggcgagcccctctcgcccgtggtgacatgggaagagcggtcacggtgccgggcgaggcggcaggggcgatgttgcagtgccatgctgccgtttgtgcaaagttgggcggtgtggctgtgctgcgcctggagcgcagtgggacctctgaacaacccgcgacagcgcgcagagcgtggctgctgctgagtgagcgtggggtccccctgctcccctccgagacccttgataggctggaggagagctcggcgtctcgctcaggattcagggataagtcgcaactgtgagcaaagagatgatatctgatacattcacattcaagaagaagcacaggaagcgtcatatcatatcgcatagggccaagcgtatgattagcagattgagttacaggggtgcaggatcccaatataaactgctgggcagaagtataaataagattggaggctgacaatggactacgaaaagaacaaaagtatgaaaatattaaatgtgatggtcagtgggtgaaaatgcgggagaagaagcgcttgatatgtg

SEQ ID NO: 682463 - DNA, 906 bp, Homo sapiens
tttgaccgaaggctgctggagactcgtgttttggacgcgatgtgtcgtctagagctcacttactagctctatgagctaaactggctgtgggttctcgatggtaccatgccggatcacagcccatccagatccgccgaatactaatgatggtggctacctgggagcatctgaagctaagctagccaacctatctggatcttgtttgtggagagaagggccccattgcagcaaactctccatcattgttgatagatcaatcctacaaagtgatgactcggtgatcaaggtaccgaataaagatgaaggggatgtttgtaaccatgagaaaaagactgcagatcttggccctcaaccagaaagagcaccaacagaagaaacgttctggattcagagacagaaaagtgatggaatatgagaataggattcgagcctactccacgccagacaaaatcttccgatattttgccaccttgaaagtcatcagtgagcctggtgaagcagaagtgtatatgacaccagaagattttgtgcgatccataacacccaatgaaaaactaaccagaacacttgggtctggatcacatatataatacacacgcttttggatgcacacagacaaccttttcccagggaaacgagaaaaattttgcttggatgaatggccggtataattttagcaccccttgggcgcaatgtggcgccctcaatacccttctccgactaccctttttctccaccaactgttcctttccctcctcccgcaaattttggaattgcgcttcagaaggttgacttgaatgggcacaggcaactcactttggaacttgggcggttccagcatactctcccacacgctggttcgccccacacgtccccatggaccccacattgtgtttacccactctt

SEQ ID NO: 682464 - DNA, 985 bp, Homo sapiens
  misc_feature (985)..(985): n is a, c, g, or t
tccttcgaggggctttttttccccggtcaagaaaaagaagcagggacagggccgccttctgtgccgtgagcctgggcagacacaacacagaaagaccgggggatgtggggcggggagaggcacaggagacggcctctcagcaatgtgtggtgcactgtggctcccttgggttgtgtctcctgtggctgtgggtctcgaggggaaaaggcctgtgccggggggtgtgggtggccactgtgaaaacgcctgtgggagaacacgaggcggccaaggtccagtgtgtgcccgagggacaacggccagcggcacgggaagcgccacataaaatatacgtgtgtgtggcgccccaggcgcgcgggggtctctcttggggtttgggcgcccacagtgctgtggggagagatgcgagtgtacgagcgggtctgtgtccacaaatccacgagggggggcctctttggcggggtgtgtgtttgtggggcgcctcttggggggccagttatgtggcccacactgtcataggagagacccagagaacacaagtggcgcagacagtaggtgcaataggagaccacaaatatatccccacaagagacctctatcccatggggagatctttgtgataacctcttaagagagggatagacccttatgagaagatgcttttgaggggggaccacaaatctgctggggcggctattttttaccccgccccacaaaaagaggccccccaaggccacgaggatgaaccgcgccactaatattactgctaccaccaagacccaagcggcccccccctagttgggtctccaccacagagggggcggcaacaagaaggggcggtgggagccaaacagggcgtctgtgttcggcggccacaaaggaggaggacaaaacatacatggtgagaatcaggggactccacatgttgggtgggtgacagcacatacacaccaacctaccacaaagactgacacaacgacacagn

SEQ ID NO: 682465 - DNA, 447 bp, Homo sapiens
  misc_feature (45)..(45): n is a, c, g, or t
catttttacacaggtattcctctctacattctatgtctacctctnctctcctcttattctttcctagaaatcactgggagaattgtactgaatttgaaaaacaagcatgaatctttcctataggataggaagcctctgatttataccataaagtgaaatttcttatacaggatgtatcaattaagatttaattcaaaaaagatgaatttaagttaaaaagaaaaacacaggataacttccattcatctgatgttcatatgccctggcacatctattgcttcttataatgtgcttgcttaaaaaaaaaaaacatgagcttttctcagagacactaatataatgaattcatgtacccatcaccaacttctacaattaccaatattcagcctcttccatttacaacctgcccattttctaagaaataattaaagcacatgctacacccat

SEQ ID NO: 682466 - DNA, 1569 bp, Homo sapiens
  misc_feature (570)..(570): n is a, c, g, or t
cccacgcgtccggaggctgagatagcattattgacagaagcaggctttggaaggtgggtaataatgaactttgctgagctaaaggagcatgttgtaacccaatgcaaagaagctaaggaccatgataaaacaacacaggagcttatagccggttttgagagaaacataacctacctgatgtagctgaaaaacacaacacgagaacctcacattgcaatcacaagtatcaatagcagaataggccaagcagaggaaagaatctcagagcattgaagactatctttctgaaataggcagacaagaatagagagaaaagaatgaaaaggaatgacagaacctccaagaaatatgggattatgtgaagagaccaaacctataactgattgggttacccaaaagagacagggagaatggaatcaagttggaaaacatacttgggatatcatccaggagaatttccccaacctaacgagacaggctaatattcaaattcaggaaatgcagagaaccccagtaagatactccacaagaagatctgccccaagacatataatcatcagattctccaanggttgaataaaagaacaattttaaggcagccagagagaaggccatgtcatctacaagggatcctccagactaacggggactctcagagaaaacctataaggccgaagaatgggggccctttcacctctttcggaaaatttccccgaaattctcatcgggcccaaattttaggcgaacgaatagaattcttcgacacacgcctttgagattcacccgcgcgttgcaaccctcgagcacaacaggtgtcgagcaccgacacactctaccgtaccaacagcccgactcgacagcgcagtgaggtcaacgcatccgccacaagaagaaagggcgaccaccaccatctacagccagcgtaaggcaccaccgaccacaccacaccgcagactgaccgcgcatcactcacacccgaccaccgcacctcgctccgccagcccacacacgcacgcgcacaacaccgcaatccagcacagcaccaacaacctcaccacccaacgcacgcgccgcgacacgcaacgacagcgaggtcgagtaagagagacagtgcaagcacagagggcgggagacggagcgaggtgacgaagcagcgacaagacaagaggagacagcggagagaagaaagcgagggacgcgcagcggacagacgagagagaggagcgcatagtagagagcacgagcacacacgcaccgcgagagcagaacggtcacgggcaccaagcaggagacgagagcgcagagaagaacgagctgacgacagagcagtgtacgaggaataatacgagcagtcgaggacgagacgagacgagaacgcgactgaccagcgcacagcggaggaggcacggcagtacgagaagtacagacgattccatgagagacctacaggcagcgagtcagcggagaatgagaggaagcgagtccgcagaggagagaggtagaggaaggaaagagacaaggggggcccgcatacagacagcgaacagcgacacgaaggggccaagaacg

SEQ ID NO: 682467 - DNA, 419 bp, Homo sapiens
gaagtataatctcttgttggggagggtctgcatgatgctgatggctgtttgtgaaggtatgggtggctacggcaatttcttaaaacaagacaacaatgaattctgctgcctcgactgacttccttttatgaaagatttctctgtagcattcaatgctgtttgacagtgttttatccacaagagaagttctttcaaaattggagtcaatcttctcaaaccctgtagctgctttattaagtaagtttatgtaatattctaaatcctttgttgtcaatttcaacagtgttcacagcatcatcaccaggagtggatgccatctcaagaagccacttactttgcttatccgtaagaagcaaatcctcacgcattaaagtttaatcataaaactgcagcaattcagtcacactgaaccacgggct

SEQ ID NO: 682468 - DNA, 112 bp, Homo sapiens
gacacttttcccttgagaaaagaggagatggtcctaaaagccgaattgagccagacctgtacacctgacatgatggttctctcttggcattcctctccattgtctacatggt

SEQ ID NO: 682469 - DNA, 235 bp, Homo sapiens
gttaactcgaggcgttcggggtatccgtagtacagctagaattcggtggactgggtggacagattcgaaggttgtatggttcaaacgagataaagctgacaggccatttgggatgctgcctcagtgtgattcacaacgagacagtccccatttatgagagagtgtgtgacggatgaatgattggatttgcatagttaccttgttagagcataacagcatggaagactgtctttag

SEQ ID NO: 682470 - DNA, 899 bp, Homo sapiens
  misc_feature (566)..(566): n is a, c, g, or t
gcccgaaatttggcgtgtttaacaagagaatattttatggtggattaagaggaagactttgggcccctttggagcaagaatttttggccccaggagaggagatgccgcagaattacctccttggggggatcacaccaacccggggcttcttcctctggggaactgtctgggagacactcgcctcgggggggaaagagaggatatgggccgcttgggccgctctgcacaacctctctgtggagaatttagagggtttcttccatattgggcgcaaggagggaaaaaagaaggttggtgtcccagccccataggagtatgaacgccattaaggggcgcctccccaataaagaaagggggggttctttcgggcagagaaaatatgcgcccacgtgccggattgtgtccgtctttagttgggggtccaagcgtggacggttcccttttaacgtggatgtggtttccccccattggcgcacacttgttccgcacccctttggcgcacatgagggacccccttgaaggacacacccacgttgttctaaagcgtttcttcccttccgctaccnagcgcgtcaaggactttggagcaccacatctttgtgtgggacatcccagagttattttaaagagagaacaataccaagaccagagtgattttcttagcgaccgttgtgagaacaaccagtgtgataagaccttctggaggtgatattttgggcgttgtataataagaaacccaggtgtttttgtattggttaaagtgattaaatgcccttagaaaagcaccccgggcgaaaatttttgttaaagatagatattttccaagttttacagaattacaatttccaaaaaagggttttatcaatgaagttgtttatttaaaacttttggatgatgga

SEQ ID NO: 682471 - DNA, 452 bp, Homo sapiens
  misc_feature (79)..(79): n is a, c, g, or t
  misc_feature (143)..(143): n is a, c, g, or t
  misc_feature (171)..(171): n is a, c, g, or t
  misc_feature (210)..(210): n is a, c, g, or t
aaatgcttttatttgccaaaagttttgggtgattttgaaatacattagacatcccattcattgaggatttctattgtcnattgttaaacattctttaatagtcctaaactgattttttttatcagagcaaaaggaacaaaggnaaaaacccacctgaaaaccgatctttgnatcatggaaattatgaagctggaataattagacattaangaaattcacagacccacatagtttaaaaatttaatttttaagattaaattttcacaccacattatgactgtaaatgagttacctgaataccaattattacctctagttatttttagcaagggagctggacttcactttacttaatgctagcttataaatctaactttgtaaaattatagtggaaatgtgtcctggctagctgcctctgcccaacgcaaatgttctcttcccttagtgcctca

SEQ ID NO: 682472 - DNA, 658 bp, Homo sapiens
tgccaagtgcccccacgacctggtgttcctgtaaccaaaagttctggcaattgtcgagagaccccaatcccatcgtgtatacaacgccccgcattcataactaattttcagagtagcctccatcatatttttttaaagagaaccattttttggctccctgaacattatagtaatcatctaaagttttttacataacaaataccattctcccccattaattaacccctttgtaaaaatctaggcactgctaatttcattgacacacttctttcaccacccctgtttcctcccattcgcgaaatcttttttggtttctcccaaaaaaaatccaccctctcggcggccccttcttataaaactcccctctccttatcggcccatttaatttacccaccatcgcgggaccaaattctttgaacaccccaccttctccacaaccacttttacttgcacccccgaccatcttttcgaacttccttgtcgcccgcaatccttaacagaacacgcaagataaaaattaaccacacaaaccctgtgtcattaactccccccctataatctataaaccaccaggtaacaaaggatccccttttttcccaaagtaaaccccaatgctttaatgaacacccaaaattgagtgggggagacataagacaac

SEQ ID NO: 682473 - DNA, 469 bp, Homo sapiens
ccgtgattcgtgatagctcgattctagagtatccccatgcgatagctcggggagtctcgatgatgctgcatcgctctgcagtgtcgtacatatgcactcaccaaatcagagctgttggtagaacagtacctctcctctcactgaggaagaactagaaaaaagaagcaaaaaaagttgaaggatttgatctggttcagaagccatgttattatgttagactgggatccctgtctaccaagcttcactcccgtgcctaccagcaggctctcagcagggttaaagaagctaagcaaaaaagccaacagaccatttctcagctccattctactgttcacctgattgaatttgccaggaagaatgtgtatagtgccaatcagaaaattcaggatgctcaggataagctctacctctcatgggtagagtggaaaaggagcattgggtatgatgatactgatgagtcccactgtgc

SEQ ID NO: 682474 - DNA, 138 bp, Homo sapiens
agagatagcttcacagttctctttacatgagttcttttccagattttgctgtcaggcctagactagttttgtcaaatgaattaatgacttttcctttatcacttctctgtaacagatttactagtgtggcaataaact

SEQ ID NO: 682475 - DNA, 203 bp, Homo sapiens
caggatcccacatgatgctccacgctcaaccgactgctgtcaccttcagcgttccagtttttaaatcctgagtcaatgccacaaaaaaaaaaaaaaaaaacccaaaccaaaccacaaaaacacaaataaggccatgcaaatctcattttgtttcctggcccaattaagttttggccaagaaaggggttaacggcacttaattc

SEQ ID NO: 682476 - DNA, 730 bp, Homo sapiens
  misc_feature (20)..(20): n is a, c, g, or t
  misc_feature (159)..(159): n is a, c, g, or t
  misc_feature (282)..(282): n is a, c, g, or t
  misc_feature (287)..(287): n is a, c, g, or t
  misc_feature (310)..(310): n is a, c, g, or t
  misc_feature (312)..(312): n is a, c, g, or t
  misc_feature (315)..(315): n is a, c, g, or t
  misc_feature (396)..(396): n is a, c, g, or t
  misc_feature (400)..(400): n is a, c, g, or t
  misc_feature (444)..(444): n is a, c, g, or t
  misc_feature (497)..(497): n is a, c, g, or t
  misc_feature (559)..(559): n is a, c, g, or t
  misc_feature (590)..(590): n is a, c, g, or t
  misc_feature (602)..(602): n is a, c, g, or t
  misc_feature (659)..(659): n is a, c, g, or t
  misc_feature (709)..(709): n is a, c, g, or t
cgctcacacccctggggggncacagaggtgtctgcacagcagggcttcctccttccctgggaggcccatgaagggagacagatttggctgcaggacctgctgctacggggcaccgtggacgaataggtacggctgggtcagtgggcgggcccttgacantgaggctgatcccgcccccacagcagcctggagatgctcacagcctgctgatggtttcttcacaaagcgacctctccagggaacatccgcaaataaaccccgtgtggttcagggagtgagggnccggncccgctgggaacgggggtcagcnantgntttaatcccccagatgcagggtgctgttcggctgagggagctagagggtgcctgggactagggggttcataatggaaaggnaaanaaaaaaaacagccagggcagagcactggggagccccagggagancagccctccacctggggctgctgtggtggacggaccctctggacctgggtatncagggtgggcatggggcagtgctctggacactgggggttgctgtgctcgccaccatggtgancgcagcaggtgggaagcgggtcccaaggcangcagtccaagtnatggagtgcggccagcctggctggcacccccacatctgctcactcccaatgatctcnaagccaaggtgtgatagcagggctgccgtgttcaggagacacagagcgtncacacagcacggacatgcgca

SEQ ID NO: 682477 - DNA, 128 bp, Homo sapiens
gaagttccagcgcagctagaccgcggggttttcggcgcgaggcggagcttggcagttccgtccacttcagccgcagcgaccctcgttgaatgtcttgttgttgcctccggagaggaacagaccctcac

SEQ ID NO: 682478 - DNA, 111 bp, Homo sapiens
tatcaccagcagtggtatctgttcaatgactttcttattgaacctattgataagcatgaagctgtacctcaccccgtagctgtacctcacccgtagctgtacctaaccgta

SEQ ID NO: 682479 - DNA, 348 bp, Homo sapiens
tagattctccaagtgttctcatgggtcggagccgacgcttcgcaagttcctatctctgactgtccctcgtgccctgtgtgagctttgtcctcccaaaagagtggggctcagatggtagcaggcctgagtgtgctgtgtcgggggcattggtgatacacccggatggtgggcggggtgtgtccgcacgcctaagttccagtcatttccaacaatgacaagagatgcccttttgaggctgggcatccgttggggcctgtccccacggcccccgcggggtgagccacgatgctccccataccccacccattcccgatacaccttacttactgtgtgttggcccttatcgag

SEQ ID NO: 682480 - DNA, 253 bp, Homo sapiens
actgtggtgtaccgtgaagcaccatttatagaccagatgtgaacgatgctccctgagttagtgacgtggcagatctgtaccctcagctttcgtgcctatgtcagatattgctgatcaatcagagtctggatgaggactccgaatccttctcctcctcaggggctcagacaacacctgcaaattcctcagagttagcatatgcgatgctcagtatttgctatcattggccccaacctcctggagctgatggcag

SEQ ID NO: 682481 - DNA, 249 bp, Homo sapiens
tggaaacagcccatggagcagcgttaatgtccatatgggagtctgtgctgcctttgaagctaatagaagaaacatataagagtctgatgcagaaaggccagcggatgcttgcaagatgcccaagatctgcagagactaatattgaccaatacataaattacttgaaagaaaaatgggcatcggtggaaaccaaactcaatgaagaggcaaactaaactggaagaggctctcgacttagcacatggagta

SEQ ID NO: 682482 - DNA, 1317 bp, Homo sapiens
gacacgtcatgggcagcgccctgaccggagccttcagcggggggagctcggagccctcccagcctgctgtccagcaggcccgccgagcggccgctggcctcccagcgccgtgacggatggggcccgtgcagcctacgagaatcaaggcagattcctggacgtgttccaccaacttcagcagtgacactgtccgctgtagtgagggcttcaggcgaggccctgaagcagtgcaagtatttaccagtggtcatgagctccactgccctgacagaggatcgagtgcagacatcggagggccagatcactgcacccacactcatacccctacgccgacacgccagcaccacaacaccagacttgtacccagatagctgggactggaagctgagcgacggtttctcagccccacagataagcccacagacaacaaagtgtgcaacttaaaagtttactcgaaagacccgacaacagagacaaagaccaacaaagcgggagggccggatcaagaaggaacaccgcaacagagccgcgccccaaggacaaaaccggcgatacccacagcggcgccacgggcacccccaacgggcacgcacacagaagcctgcaccagcgaataataaacagcccagcgcatacggacaccacaacgaacccaccacacaggtgcacagaacctgcgcaccacccccccgcccacgccgctggagccacccacggccgaccacggccccccgagacacacataggcgacagccgccgcaaccccgacgacacccccccccccagcacacacgccctccaccacccacctaaacgcgacgccacccccgacagcccgcccccacgacaagccaacacgagcgctacccaccacaccaccgccacctccctcggccggcactacaaccggaacgcgaccacccacgccctacaactcatatcgcacgcaatctcagagtccccaggggagatcacaatctctctctaccctccgacacgcaaccgacacaaacagagcaccaccccccgccagcgcggaggtagtacaacgcaagggggggcgagcacccaccccggccccgacctccagccgcggccagaacggtgccgcgcggcgggcgagccggggaccgcagagcgtggcacaacgcacgagtgtagacgaccaacgagactggggcgcaggaacccgtcgcgaacccgggaccacccagcacggcgagggaggagagagataagcgcgggaggtcagagcaagtaagcagacagtggggaagcaagagagaagcggagtgagagaggggagggtaggttagc

SEQ ID NO: 682483 - DNA, 372 bp, Homo sapiens
  misc_feature (72)..(72): n is a, c, g, or t
  misc_feature (120)..(120): n is a, c, g, or t
caagggctttgtcaaaaacaccagttttttaggtggctgaggattccaggatggtgggtggtttcttcatanactctctcccccgattctaaagaaaagaaaagaaaaggaggaaggccnttcccttccggtgccaactgtggccaccctttcctaatcaaaggggcaattttccccttttttcaagccccaaaaaacttttccctttggttttggcccaaggtatcattttgggggcccctttggggggtttttttttttttttggcactaagaaaacaacaaaaatttttcaatttttggttcaaccccatgttttttttccctaaccccccaatgggaaaaaatagatttaaaaaattggccctgccca

SEQ ID NO: 682484 - DNA, 112 bp, Homo sapiens
cgcggtgatgtggctttgatgactttgccaaatactttcttcaccaatctcatgaggagagggaacatgctagtggaaactcaatagcaggtcagaagagtgatggaatgtt

SEQ ID NO: 682485 - DNA, 106 bp, Homo sapiens
tatcacttagcacgtgtacttcagcacgttgtcacttcagacacacagaaccaacagtagccagccctgtgcctgaatgtgactggggatcctcatagagttcgac

SEQ ID NO: 682486 - DNA, 254 bp, Homo sapiens
gactaaaagcaggaaggctggtgtgacaacatagtcgcttgcaaattatatttccaattcagctacacagttggtgctaggcgcgtgcttgtaatcgacttatgaactgcaactggcgtcggttcatcacgcagaacagccacgccgagaagcacgggactagaggcccctgcgcgacgataaagacggagcacgccaagtgcggatacgcggagacagctccgcgacatgggcactaactgagggttcaaagc

SEQ ID NO: 682487 - DNA, 873 bp, Homo sapiens
gggaaaaggggaagcgagagcaagcgaaagactcagtccccagggcggcggcggggggggcccgtccagccatgccgaataaaaacaagaaggagaaagaatcaccaaaagcagggaagagtggaaaaagttcaaaagaaggacaagacacagtagaatcagagcaaatttccgtcaggaaaaacagccttgttgggttgtcccgtctacagtatctgctaaattaaaaggtaccagtctctcagcccatagtgaagaaagacaaagggcaaaatttcttcaggggtttaggcgcaaggcaatattagagaactttcaaaaattaccatctttaaaagatgtcctccgtgctgattcaagagaagctttttatccagaagttacggtcaggtgtggcgtcctctttgactttgtgtttctgaatccactaagtgaccctaaaggtgaccggacatgtacaaacggagctggcttcaacgttgaaatggtagaattatatcacccaataatcggacgtgtgactcaccagacgcctatttaccccacgaagtacgtgcattattgttgcaggtacacattgtttcgaaccatttatcaacccttttcctcaatccttaacgggagcggaatttttgaccccggaggcaaggatgacccaatcgttagaatggaggctggcttcaattaacaggttgtatatgaatttgcctaagagtttaagacgcttccgaggttccacgctaaatattggggaaaaatattttgcccgacgttgtttggcagcttagaaccttgacagggaaaccgggaagaagttttaaagcccccttcagacttggaactcgtgaggtcccacaagaaacatattggtga

SEQ ID NO: 682488 - DNA, 319 bp, Homo sapiens
aaattaaaaccccggccagagtccgccagttcatccctttattcccccccttttgggagccccagaaggcccgttcccgaggtccggagtttcacccctttctggctaccccgttgaacccccttttttattaaaaaatccaaaaaattatttgggcccaaaggcccggcccttttttcccactctcttcaggagccggagccaggaaaatggcttcccccccggagccggggtttccctttaccccggtttttccccctccccccccccctgggttccaggtttaacccccttcccaaaaaataaaattttaaaatta

SEQ ID NO: 682489 - DNA, 561 bp, Homo sapiens
cattttagggaaaacccgacctcccacacccccaagccatccgcaccgccacctccagggaccgcccgtcagccgggctctcacccgacgccaccagatgatgatgatccaggacccaggcaccgcacacagtctccagcacacgtaccagacacacgacgagatcacagacacggagattcatcactggaatgcatcagaacaccgaaaccacaaataccaactagaaataacatgacaaaattcatcagagaacaagaattccacacacaacatacagaaacacgaaaaacaagaaccaaaacatagaggactgaagacacacaccatgaaactgaaaaaagacaaaaaacgaagaaaaacatgagaaagaaaaataaaagaaaaaaaaaaagaacaagcaaaacaaaaaaacacaaaagaaacacgaccgaaaacacaacgatgaacagccagagaataaaggaatagacatcaaagcggacagccacgcaacacacaccacaaaacacagagacacaagccactcaatcatgcaacaaaaaacctgacagaacccgc

SEQ ID NO: 682490 - DNA, 719 bp, Homo sapiens
gaggtgtagtgttcccctgctgaggggtgcctcccagttaggctgctcaggcgtcagaggtcaggggtcaggcacccacttgaggaggcagtctgcccgttctcagatctccagctgcgtgctgggagaaccactgctctcttcaaagctgtcagacagggacatttaagtctgcagaggttcctgctgtctttttgtttgtctgtgccctgcccccagaggtggagcctacagaggcaggcaggcctccttgagctgtggtgggctccgcccagttcgagcttccctgctgctttgtttacctaagcaagcctgggcaatggcgggcgcccctcccccagcctcgctgccgccttgcagtttgatctcagactgctgtgctagcaatcagcgagactccgtgggcgtaggaccctccaacccaggtgcgggatattatctcgtggtgcgccgttttttaagcccgttggaaaagcgcagtattcaggtgggagtgaccctattttccaggtgccgtctgtcaccccctttctttgactcggaaagggaactccctgacccttgcgcttcccagtgaggcaatgctcgcctgttcggccggcacggtcgcgcaccactgactgtgccctgtctggatcctagaagatgaccggtcccattgaatgcgaataccgcttgggtcacactgggatgaggaagtcattggcttggccctgggc

SEQ ID NO: 682491 - DNA, 420 bp, Homo sapiens
  misc_feature (355)..(355): n is a, c, g, or t
  misc_feature (396)..(396): n is a, c, g, or t
  misc_feature (408)..(408): n is a, c, g, or t
  misc_feature (414)..(414): n is a, c, g, or t
ctgtaaaaaattcagaaacgaatgcagaatagcataagaatatatgaaagtctctattagaagttaaaattaatagggatagtatcaatctcttagaattcaaacatgtgtgttcacaatgtggctttttctattttgtttagttttttttcatctcttcatatcaattatctctttcttattactttagcatacatttcaaatatcccactgagctttgttctaagttcaaagtggtattcaatcactttttactaatgtttctatgacctcttaatggggatagtgacaatgaaaataatgctatttaaaatgaaaggatatgtacactactatagggtgtgtaattgggtgnacccagtgactgggagggttgtgagtccctacttaggtgcncccaggcagttntgtccnggctgg

SEQ ID NO: 682492 - DNA, 817 bp, Homo sapiens
  misc_feature (403)..(403): n is a, c, g, or t
agcgggggccggagcggtgcgaagggggccgagcggcgggccgggccgggccgggcagggcccggggcgtgggccggcaggaagatgtgcgaacgtggggctgctgttccaggcgagcgcggtgggactcggacccacatgtagccggcccctgctgcgtgctcgtggacatctgcaacaactgctccgcgtgccctggatccacagtgcgcgggaacgcatgctatccccgggtcaccgaggagctctgtgcagtgctgtccttgagcacgcatcaagcccaagccccacgtgacagcgtgtccccacgtcgtacgcgtggaatctatcgtccaccggtggctgctcgctgctcctgcatggtgttgagtcgctggcactaacagggcgctccatcggtgcncgccacaaccgttcattcaaccgcggggcatgggtgcagtgcacgcgtgcccttgctcggtcctcgggagacgctactccgcatgcgatttgtggagttgggtcattgcagaagctagggcctggtaggggtcgtttagcgtatcccgtcccatgtgcccacatgtgcccctgtggcctttccacgccttgttcaaccaccatcccggcttcaaggtagccctcttcggggctgggctctggaaggacagaatgaccgggtccaccccgttagggaagctttttttctcccttggggttgtggtgaccaaacggaacaaactgggagccccgggattgagacgcgtagtcccagaatttgacaagtttggcttaatgcgggaaattgcccaccgaagaaccgtggcgttgctgg

SEQ ID NO: 682493 - DNA, 226 bp, Homo sapiens
tcttgttgggtgaacgggaattggaggagaaaaagaaaaaaagaaaaaaatttaaagaaagtcatgttatccctataaataatttatattgccaaacacgaagctttgaaactagatcccttgactaagtaccagtaaaagcttcaacataaggggactctaaaagacttcagagatgggaatcctatttattatgtgggaataccatgacttcccgtagggatgc

SEQ ID NO: 682494 - DNA, 197 bp, Homo sapiens
ccaggtgcagttggtgcacgtggggggtgtcctggatgccatggtggccaccaaagtggccccttgagcaccaggcagcatgctcaaataggggatgtcctcccccaggatgagagatggaccgcccggtccccaagcaccctaggaccgtcacataggagcgcgtcatcgtgattgtataaagaaagcaacagcca

SEQ ID NO: 682495 - DNA, 542 bp, Homo sapiens
agcggggaacaatcactgtggggagaaatttagcaatacctaataaaactaaacatgtagatatctctgaactgagtctcccaatgggtattccttggatgagtgaggcctaggggcagcagggtgggtcctcaggggctagagagtccatgttagttacctcagtctcaagtagcctcctctgcttactgtagaaatattatcatctggtgtgagtgttacgacacaaaaacagtgggtaagtaacatactatgacccagaaattccatttctagttatgtatcttaaagaaatctggccaggcacagcggctcacgcctgtaatcccagcacttggggaggctgaggtgggcggatcacttgaggtcaggagtttgagaccagcctagccaacatggtgaaactgcatcttcactaaaaaaatacaaaaattagctgggcatagtgatgtgtagctgtagtcctagctactcaggaggctgagtcaggagaatggcttgaaagcaggaggcagaggttgcagtgatcgcatcactgcact

SEQ ID NO: 682496 - DNA, 234 bp, Homo sapiens
gcaaggaaccaaggaccacagatgcaacccaggaactggattctgccagtgatctgaatagcttggaagtggattctacttttgaacctccagataagagcccagccaaggtgacaccctgattttgcctggtgagtccctgagcagggagctcctttgagcctgtttggactgagaacctgcagaagaactgtgagctaataaatgaaggttgttttaagttgctaaaaaaaa

SEQ ID NO: 682497 - DNA, 479 bp, Homo sapiens
  misc_feature (10)..(10): n is a, c, g, or t
  misc_feature (30)..(30): n is a, c, g, or t
  misc_feature (53)..(53): n is a, c, g, or t
  misc_feature (73)..(73): n is a, c, g, or t
  misc_feature (115)..(115): n is a, c, g, or t
  misc_feature (121)..(121): n is a, c, g, or t
  misc_feature (151)..(151): n is a, c, g, or t
  misc_feature (180)..(180): n is a, c, g, or t
  misc_feature (228)..(228): n is a, c, g, or t
  misc_feature (331)..(331): n is a, c, g, or t
  misc_feature (335)..(335): n is a, c, g, or t
  misc_feature (465)..(465): n is a, c, g, or t
aggttactgnaattagggaacattttctgncaccttgctgattttacttaagncagtctaaccattccatggnacttgtcctcccagagtcagtcagcaatgtcccgttctgagnccccancgtggtcaggagtccttctgggtacggggncacacacaggtcccagccttctgtgctgntctcctcctctgtgtcgtcctcagatctcggggtgagggaggtcgggncagctcttcgtccagccttcccgtccttcagttcaacgacatctttggagtgtttttgttttctcttccaagggccgtcccgttgtgttaggaagggtgagtngctngttccagggttggccggtgccagctccggggtggactgaacagcggcggctgtccctgtgcatcctttgattactctcatgctgaatttactgttacatttgttttattgtacataggtttgaaacattntttcctgagatatt

SEQ ID NO: 682498 - DNA, 135 bp, Homo sapiens
atgtcctgatggtggtggatgtctggccatggttccaggagatgagagagctgaggagagtgtgagaggctggaggaggacgaggcgggcgagaaaggaaagcagcaggaattagcagcatggaattctcgcgag

SEQ ID NO: 682499 - DNA, 736 bp, Homo sapiens
ggggcatggtaagcagaatcgggcaagtgcatgcaggtgaaggcaccgaggatcttgactcaaaaggtggtggccagcttgcaggggaccttcgtctgtgcctgaagtcactatgcattgaagcctatcagattaaagattgcgtgatgcaatcatgggttgttctaaggagctaccttcagacgctgccagtatatacacagtagctgtgcttgtggaagtcagactggtggtcagctgagggtgtggcttacatgctgcagaagaagattgtcctcaagggacaatttcgctccaccgttaaatgtacggatcctcactcactgacagcgtctacgccattcagaatgcacctgtgcctcagcacagagaatcactgaacatgttctacggaatcttcaaacacccattgccccgtgcatgaccagccttgagtggagtataaggcgtgcgggtgacatacatcagaagcagggtgtgatcatttctgaaaagcaacctccgcaggtgatgtcattgaggtacagcaatagtggtctgttagttcatcacatctgggacctcaggtcctggcacaagctcaatagctagtgcctgacagcattcaggtagatcacatgccgctcagaaggggttgtgaggactctgggaaagaatagccatctccagtggggcagggtagccatgaggtctgaaaggtaggtatgaggatgctaggggaatgagcctccgtgtg

SEQ ID NO: 682500 - DNA, 127 bp, Homo sapiens
  misc_feature (48)..(48): n is a, c, g, or t
cggtccacctattgttcacgctctcagaagattatgtgatagtttggntgaaccccgtctgccccgcagctggatgatgctgttcggcctgaggcagaaggagaagaggaaggaagagcaatcatgt

SEQ ID NO: 682501 - DNA, 92 bp, Homo sapiens
gtgcagtcgtgccacgacgacctgaggagaacatcgcatcgtggagcggcgaacaacccttcctgcagcttaagctggaggagttgcgtccg

SEQ ID NO: 682502 - DNA, 924 bp, Homo sapiens
  misc_feature (385)..(385): n is a, c, g, or t
ggctgattgactaggacgtaccgcagagcaggtggaaacatacagacgcagcaggggcacttactgatccgaggtcgacaccgtgcgccgaatgctaacgctgctagcatgctgctgcagctgctagcgctgtgaacgtccatggaatgtaaattgcacgcacgaaacattgcacgtagatcccactgctcatccaagctcagcggatcggcccagtctgctcctaacgatggacttcggatcatgcttcggaagtgctcccgagatctggaatctggtccactcacttggtctttgatggagcttcaccatgaccggtatgctccgaagatacagtcgcatgatgacctgctttcgatcaccagtaggggagtgcgcgcgtatnctgtgtcagatcgattgggagctacatctagagcgcaacatgggcccacatagcgtgggacgcagagctagacgttggctgtacatatctgtaagatgaccatgttccgctactgacatttgcgtactctggtatacgtcccgcgtggtgtgctcacgtcaagggagatcccacccagattgcggtgtgtggcgtgacgtaccatagggctcggacatgaccataggttttttactgccaaatctaagtgaccacttgcagtgtcgcccccaaagaccctgttggcgacgggccccttcccacgataactctatcccgcctacttatcgcgggaagtacaaacgaaccaaacaagaccttgttccgtgaactcggcggagaaggctatgctttgtgccattctaacatttcccgaactctggcgccgtgctcggtcaatgcaaggatccccagtagtggacatcgtcacgtagggctggctcgtaggggcacataggacttctccctcctatgacgccagaaagtgaacaacttctctg

SEQ ID NO: 682503 - DNA, 114 bp, Homo sapiens
  misc_feature (42)..(44): n is a, c, g, or t
  misc_feature (60)..(60): n is a, c, g, or t
  misc_feature (62)..(62): n is a, c, g, or t
  misc_feature (71)..(71): n is a, c, g, or t
  misc_feature (95)..(95): n is a, c, g, or t
tcatgaaaggcaaagtttacagaaccataaacattctcaatnnnctttatgctagacatntnaattatttntcaaactgtatagatttggggtanaaagttgtctcagttcctc

SEQ ID NO: 682504 - DNA, 154 bp, Homo sapiens
taaaagcccccccccttttttttaaggagaatgggccagtcctttcccaagtccccacagggggggggatagcattgcttttgggtaaattatgtaaggcaaaattttttttaatcttcgccctaaaacttttttattttgtttttttttgaaa

SEQ ID NO: 682505 - DNA, 635 bp, Homo sapiens
gtgatggaatgagactcgtctcaaaaaacaaacaaacaaaaaaaaacactttgggaggtcagagcaggaggatcgcttgagaccaggacttcaagaccagcctgggcaacatagagaccctgtctctacagaaaaattaaggaaagggaaaaaaaaaaaagccaagttggtggtggatcattgccgtgttaattcccaacactttgggaaggccaagatgggagacttcaccttgaaaggccaccctgtgggccacattaaggagacctccattctcttacaaaaaactttaaaacttagctggcacgtggtggcacaggcctgtagtccaagccactcaggaggtacgaggtggtggggaggaccccttgagccaagaagctcaaggttgcaggaaagcggtgatcacaccaggcactccagccggggtgacagagacctttgtcccccctttcccaaacaaaaaaacaaaaaaaaacagaaaaaaacagtggtggggcaccatgcgacccaagagaatgtttcataaaaacaatcgatgtggccgggggggcccaaaaggaaatatcacacatgggcataacgggactcacaagaaaagacgggacaagaacaagggctgagtaaaccacaaa

SEQ ID NO: 682506 - DNA, 455 bp, Homo sapiens
ccccaaatgatccaggagggtgggacattcttacctgcttcgtaatacagtaattcgtctgagagaaatatcccttcatctcagtgtctcagatggacattgttggtattcctgaagtgttttgacattgtggccatttccaaacattactaggtctttgttattgatcctgtcctacattctcaattcttgggtccttccctctgttttgaaatgactcattcttcacaatgagctaaactgaaagctttactgttaagcaaaataagaaatcttgagccaaaggtattataacttgctctgatatgaaatgaacacagtgcattggccatcttttcaccctgtttgttagagtatattaaattaaaataacacagcaagaaacattagtttccatcattcattttagatttatgttggtgtggatttggttggttgtttctttggttagtaga

SEQ ID NO: 682507 - DNA, 920 bp, Homo sapiens
gcgacaccagctgcactggtcaggaccccagcacagaaggcagccaagcacaaggcagctgaggtggtcctcaaacacctcaaaggggggagcatgctggagccggtccctggaggacagcatcactcttcatctgcactgaggacgattccggttttttactgctgcagcgagctgctaccccatagttccatgctgtagtcctcaaccaaggagcccacacaccattggtaacttgataggcccctgtctctcctcaatgcgtagtcttgagttgctaaagccacccgttggtagctctagcaagagaggactggtggtgtctacaaaggctcggcgtggtatgcctggtagttacgataggagagccaagggagtcttgggcgcaagtccgacccggataaaggaaatgctaacatgaccttgtccgagatggaagaccggtgttactatcggaacgatctggggaagtcgcgcactttccgaatagacaactttggtcgaacgcggaatgcgtggtggtcaataattggtcatggtcgtctcgagtgcaacgcggtgacctactggagtgccccgcggtatggacacatgacggtgggatgaccggtatgatggacccactttctccagaagggtgtagggctccgcgtcgtgggatgggtcttccgaaatagccgggggcccagggtttgcaccctcgggattactctacggaacttgctgtcggaagagatcgatcccctgtgccctccagaaacttgcgtcccctgggctccctggggtgccctgggtgcctgcctgctggccggccttcgggagcgctcctgagggtgcccgccttccggtccgcgacccggatatcggggagctggctcggtggcttagcattgccttgtggatctgtcccctcacggcac

SEQ ID NO: 682508 - DNA, 1268 bp, Homo sapiens
  misc_feature (243)..(243): n is a, c, g, or t
  misc_feature (510)..(510): n is a, c, g, or t
atatagtgagtgggccccccggggaatgttttcgtttggggcgccccccttgtttaaggttataggagggaaagcacgccctcgggggtttataatacctgcggggggtttactaaagcgccccccatgttgtgtggtggccgccgccaccagaattgaagcgagtcgcctgttataaaagggggggcgcctgcaaaacgccaccgcgttaagatgtaatgatgtgcgcgctaaaaggttgtngggcgccaccaagatgaagttaggcggccgcccagcgtgggcgcttcaataggcggtctccgtgcgggtgcgcgtaaagagtagcgtggagaatgttatgaggacgagaggagaattattggcgggcgcgtttttattagcccccacctaatagaagaggcgctgttagtagaagacgctgcgacgcccctcggggggtttaatgatctccccccacattatatggggacatgatacacggcccgcagcacatcatcggggggttgntccttcttcggggaggtagcccccccaggggtgggtgaggtgtgtgagacagggtgtgtgtagccagagtttgctgaagcctgctgtgccgcacgctgagcacaccgggcgacctctttctgggagggcgagaccctcgtgtgtgtgtctctcccacctctgggagagagcactcttttggtgttgcttgcgcggggttttctggcgtgggtgttgggttgtgtttgtgtgggggtattcttgggcgctccacgtgtccaaccccccgtgagggctttctcacggggtatgaccacgcagcgcggtgagatgtcgcaagacacttctgtgttgtctataagggtgttgtgatatctgtatactggacgtataatggcgtttgccacggtgaaataagtcacaaacttttgccacccgcagaaagggagggggcttcgggagaatcccctgaggacattatgcgctcaaagttataaggttgttgtgagagacatttccctgagttggaaattgtacctcttgtgttttgttgctctggttcccgaaaatataactccgcgggaatgcctccctcggtttgtccactctacctgcctcttgaattccctctggatcccaccccactttctttctactttaagaaaataacaccaaatcaattccttccccgaagcgtctctgtattttgccgctgccccatttgtaagaacccccttttcccccaattacacccatttaacaaaaataaaaaaataaac

SEQ ID NO: 682509 - DNA, 675 bp, Homo sapiens
cgtggtggctcatgcctgtaattccaacactctgggaggtcaaggcaggcaggttgataacttgagttcagaagttcgagattagcctgggcaacatggtgaaacactatctttacaaaaaatacaaaaattagctgggcatggtggccagagcctgtagccccagctactctagacgctgaatggggagagactgcttgagcctgggaggcagaggtttcagtgagccaagatcgtgccactgcactccagcctggacgacaaagtgagactgtctcaaaaacaacaacaaaaacttgtctatattaattattatgcaattcttcttccccccactgtattttgtataactgtaagagaatactttcttccttaagtcaggattccattctagtgtctaacactgtaacaaccacacattaccccctacactgattgtaaaagtaagagttagtgtcagaatttaagcagaactgagtttaagaccatgtgtttttattaacaggggaataatctcctaatcttaaactttatcttttttccatcataaaaatgtttaacacctatccaaatactttccatatgaggcctttaatagtttttgatccccagggagttgtttgttaaactaggaatcaaagcatctggtgattcatctggcaccaggtttgggct

SEQ ID NO: 682510 - DNA, 539 bp, Homo sapiens
  misc_feature (190)..(190): n is a, c, g, or t
agtgttcaccttgaggggtgtctgttagaagcttcaccctgaacagaactttggcaccagtgatggatgtagcaactataggtgtctatgaaatatgaggttctcctttcaggctgccttgcacagctctgtgacttattagtgatgccatttcaaccgtgagaaaggtgaggctttctgtctctctctntctgcctcagacagtcccatctgtctctcctgtatggatctgtactcaaatctcttcatgtagccaccatgagagtgcgggcatttgccgccagattagatcacgccacatctgtggatacagagaaatcagcagatgctacagaagaggaaaatatttccctcctaccaatctcatacccatttctccctggacctcttccgcgatgtcaacaaggttttctacttcttgttttcctctagtgtacattttagattattttggtactttctttactctcagtctaaacattgtttttttcaactaaaaagatgagaaaacaaaacaaaatggaataatcgtcaaagca

SEQ ID NO: 682511 - DNA, 271 bp, Homo sapiens
atgggaacaagcagctgtccctgagccagaagagtatgtgtatgtgcgctagacctgtacacagacatcatcaacattttcctgtacatactcatcatcattgggcgcgccaaggagtagctgagctccagctcgctgtgcccgctcaggtggcacgggctggcctagaccctgcccctggcacggcagtgcccattgtacttcccctctctcttgtccccaggcacagcctaaggaaaaggatgcctctactccaaccctcctgtatgta

SEQ ID NO: 682512 - DNA, 721 bp, Homo sapiens
  misc_feature (87)..(87): n is a, c, g, or t
  misc_feature (106)..(106): n is a, c, g, or t
tttttttttttattgccatttctacactcacacaggattatgagctctataggtaggagtttgttacacactgctttgactttgtgnttaccagtgcttgtcacanatcaagttcttaagaagcattcattgaatgaaggaatctgtttaattctgaatctttctttcctctaggcttctttgtttataagttgtagtcaatatagaataatacagggtttgtattgtttgatgtgtataaatctgatctccgtctgcaggaactttcttggagcaagggcctaactttgtactattatctcctccacagaatcttagttggcatttgtgtttgatctcttgatttagatagacacgagtttgatttttggtttagctgtttacttacttttgtgacagtaggtaacttttctgaaccttggtttctctgttttaaggatatacgagatagtgttggttgaggactgtgatggttcattttatgttgtaagcatgactgggccacaggatacccagatcctggtaagatattatttctgactgtgtctgtgagggtgtttccgaagagattagcatttgagctagtagactgagtagggaaggaccacccttatccatttgggcagatattgtccatcctttgggggcccacataggaaaaaaaaaaataaagtcgacgcggccgcgaatttagtagtagtaggcggccgctctagaggat

SEQ ID NO: 682513 - DNA, 497 bp, Homo sapiens
acagaagaaagcaaggactgagtggcagggagtcccaggctgagtgctggcgccttcgcgggactcgcttcagcgagtgaccttcgacagtcacttaaatgctgtatgctcagcgttcctcatctgtaacatggatatgaacccatctccctgcctaactactagagtgtggtcaaaacaacagagatcagcagatatgaaaggtacaatataaactccaggtgatgatcttatcatggcatatatatcatctgactctcactctttccaaaattaatcatagaagattgacatgtattctttccactctgttcctactcagaggtgtaagaggtcacatgcttaaagcatctagcccaacacctggcattcagcgtatactataaatgtctgtaaattaagtatactaatgccccgaagtaacaggcacactgtttctcaatatatagtaattcatagacacgggtctcccatcggttcgactgaagcatgtagtt

SEQ ID NO: 682514 - DNA, 615 bp, Homo sapiens
  misc_feature (366)..(366): n is a, c, g, or t
  misc_feature (426)..(426): n is a, c, g, or t
  misc_feature (478)..(478): n is a, c, g, or t
gcgtcgactggtgaataagaaatttttaccttaggagttcacttgaatagtcatttttatatttgtgactgcaagtcacttttaggggctgtacttccttagtactggtagcattattatccaatggacttttatagctttcattaggttttcttttgtttttgttctttaaagaacattttacttaacttagtatttcatttttcatctatattatgaggcagtaagagtcttctgtttttccaaagttgagactgctttatatttatttcgtattgtctacagctgtagtgttcaatacattagccactagccacatgtggttatttaaataagataaaataaaaattggccgggcgtggtggntcacgccggtaatcccagcactttgggaggccgaggcgggcagatcattaggtcaggagntcgagaccatccttactaagacggtgaacccccatctctattaaaaatacanaaaattagccgggcgtggtggcgggcgcctgcagtcccagctactcaggaggctgaggcaggagaatggcgtgaacctgggaggcagagtttgcagtgagccgagatggcgccactgcactccagcctgggggacag

SEQ ID NO: 682515 - DNA, 1687 bp, Homo sapiens
  misc_feature (362)..(362): n is a, c, g, or t
  misc_feature (688)..(688): n is a, c, g, or t
  misc_feature (691)..(691): n is a, c, g, or t
ggtggagaaggaggcgggtgatgtgctcacttctgatcaacatgtgttgcctcctctcagccaacttctagctcactgcactcactctggtcatgataaatgttcgtcacctttctgcttcattccttagggcctaaatcaggaagctgttttatcgatggtttccttttgggtcagtaaccagctttggataatttcctctgattattcaagtcgtgggacaggtaaactacattcagcaggaacttttctcgaggagcgttatgtcatggaaaagacaccaaacacagcaagtattttaatgaatacaccatcccagggggtcagtaagctctgcctgccaagaagacacagtgagaggngtccacagtcctgatgaggtggcgtttggtaacttgtagaccctagcatggccaggtctggtcacccttaagaacttctcagagaaactaggaatcttcagtgaaagaactaatgttctcctcagctgaaattcccttgcttgtcagcatttctgcaaagctcacacttgtttcaccatacctcccttggatgtgacatgtaggtaggaagtatgtgcaggtgggagtcatctgtcagccttctatgtttcagagatcctgaaggtggtttgaaacaaacagaagaggagcaggaaatatccgtgcctgtggcagatctcactcancangcttagcattctctcccgccaagctgggataagcctcatgtcctaacacagcacaacaggaggtctctgtcagtccatcagagatgacattctatgtgatatttttgacatccttgtgctaaaagcaatggcacaaaatggaaaagggcctattgaccacacctactccagtaaaattgttcttcatttattccttaattttctaaatctgacccctttaaagcaatctagcaaattgagaatcctcagctctccttggatacctgatattttatttcaagaaagagacaaagaaggaaaattttatttattttactacccacatataaaccgaagggagatgggactacccaaacatttgctgctcaattttgtgtcttgtgcttgaaagtctgccctaatgcataacaaaaactacttgtctcctacctttgggatccctttaacaagtatttgccttctgaactacgtggataatttcaaaggcagagttccagaccagagaggtctttccatacaatgaaagctataactagctggttgtgtttaaccactgctatcacgctatcctgggactgcatagaactttgacaaaagacagacttcatggtacacaacttcaacagattttctgtcatattctcaccagcacatctgaatgaggctttgtgttttccttgctctcttgcatgttccttttcaactcatggcccacagtgactctcagagatttatgccaaaattgcatacaattgttttctgaatcataacttgtctatttttctgcctatgtgtgctactttcagttgtttctcatcaacatttgactctcagaagagcctccatttgccctttctctctttaggtatctaagatctttgaaaacctggactttacattgattcaacctatcaaataatgacttctcgagagggatctggggtcctggactctgtgggagctttttttggatttctcgggtttatatatttaaaa

SEQ ID NO: 682516 - DNA, 1737 bp, Homo sapiens
gtatagaccactgagtaatgaattacgtacggagaaggactgtacgggtccttagcatagatagaagatgaacatatgtctgagttccacctaagtgcgtgcccacaaataaataggacccgaggttgatggctaagaaatgatgggaaatctcgtataacattgggtaaatatttcgaagccagcactagagaaaagatatgcctagcttagttgcgacaattgtaaattacagacactatacatggaggacttacgactcgagtaataactcctttgctgattagccaatagcaaatttgcatgactgtaacttgtcagcaggggaataccattaggaaagataccataacagtagcaaaactaaattaggaccacacaatgttgggccattctaatagctcaggcagaaacagcgaagaaaacagaggcagaagatcaaaaagaaattaggttgagtaaccctgacctaagacgggataattaagcataaggaacaaaaggcccacaggcgaagggacaatatgacaagaaacacaaaaattaaaaaacaaaagagccatagcattaccataagacgaatgccaacgcatcgtaagaacagtgaagactccccaagttggtgcgacaatactcgggaagcaagaacacagctcagacctataattacaaattggcgaagcattggcatggagccaaaacaaaagagaacaccataatacaaccaaggaaagaataaaagacaaatagaactagcagacaaaagatgatatgacatgacttcaatcataacagcagcaaataggaaaagaataagaaaccccagcaaaaacacacactagccataaaagacaaatgacaagagatcaaaagggaagaggaaaatcacaatccaaatgcacaagaggaaacaaaaaatacaccataaagcagctgatcagtcagagatgagaaggaacagaagacaataaaagaaagggaaatatatgtggcacgagaccatacaccccgcaacgataatcacgatagaaaagcgcacaaacgactgtgacaaaaagaaatgtaatcaagaacatacataaaagcacacaacaatcaacacaaagttggaaagagaagacagataaaacacagatgaccacagatagacttaggaaacaacgacaaacacatcccagtgaaaaagaaagaaactcgatccaaataaacgcatacaacacgaaccgcatcgcttcaaaccacgcaacacatgtgcatgaccaacggtatacaaacgacagacacgtggaacagaatacgatcacacaagacaaacacatgcgtgtacgcgacaacaagtcgatagcagacgtagctaactagacaccatcaccaaagatgagacaaaaaggagacaagaaagaagaataacacaatatatatcaagatccgcaaatagatgatagaacacttagcactaggaaagagaataaacataagcaaaagaaacacaagcaattcgatgtagtgtaggaacacaaatagcacacgaacaaagaaacgacagatacaacgcgcagagctacagcgagcgacagtcagatagacgacgcattagagacaggaacaggcagcaaacaacggagagacggatctaacaatacatttatacgtctatggccacataaacaccgcgaaagcacacaaccacaacattaagaagactatagagaacgaataaaccgcgagataaagaga

SEQ ID NO: 682517 - DNA, 930 bp, Homo sapiens
  misc_feature (443)..(443): n is a, c, g, or t
ggatacgggagttcctccttgctctcgcccctactctttctggtgttagatcgagctaccctctaaaagcagtttagagtggtaaaaaaaaaaaaaaaacacaccaaaacggctcggcagccacaaaaaggggatggaaatttctttctgggacaatcctcctgggttctcccggtaactggatcggtcttgggtccctaagaagtcctttcggtggaacgcttttttaattccctaagagagggagagaaattcaggtcaccgggcgagaaatcggtggctggattacagggagctggggcattgggaatcggggagactggactgcgctatgaattcggctaaactttaaaaggcaaggctgggtcctctggggatataaataagcttgggactgggagggaaacaggttgccaaattggcaaggggattggggtggccanggttcataccttggtgggtaagactggaggcaaccggaagaagatttttacaggctctggcaaaggaacggtggaaggcagaattgggacgatgtcaggtatttcagtaaacaaagggcgggggtagtctaatacttccagattggttgtgctacaccaagatcctcagatggaacaagactttggaagtcaatgtacctggccccatttgctggactacacagggcgatttcttccgtgcatgtgaccgaagaattacccgttgcggcactttgtggtcccgtgggggcttcgggccagcgtgggacttgttctcggtcccctttcttatggctcaacgtgtgcaagcaagttggctgcctgtgggaattcataaacctctggaccgcatgaactgggtggcctaacaattaactggggttcaaaacaccattgttcgtgtcccaaaattgcgtaacacctgtgtctctccaaattccagttcctg

SEQ ID NO: 682518 - DNA, 115 bp, Homo sapiens
attggctatacctataacactaagtacacaaatattcttagagaccctgctttcaattatttttgagtatacattaggtcatccttatctgatggggtgggatccaagcactccc

SEQ ID NO: 682519 - DNA, 184 bp, Homo sapiens
  misc_feature (6)..(6): n is a, c, g, or t
ctgtangaagacggagcagctacagtcattcctttgtgaaaaaggcattcagagacggggtttcaccgtgttagccaggatggtctcgatctcctgacctcgcgatccgcccgcctcggcctcccaaagtgctgggattacaggcgtgagccaccacaccttgccgaaacttagattttttctt

SEQ ID NO: 682520 - DNA, 278 bp, Homo sapiens
gggcaatatccaatgcctgggacagcgggggaagtgggattcagcctttcatttattctttcacctatttgtcctctttactctgtgtacaaaaaaagaggggatatactaattcatagactgttgtttctaaacagaaactcaggctgggcacagtggaatacgcctgtaatcccagcactttgggaggccgaggcaggagaatgaatcgcttgaacccaggaggtggaggttgcagtgagccgagaccgcaccattgcactctagcccgggcaaca

SEQ ID NO: 682521 - DNA, 111 bp, Homo sapiens
gactcggagcaatgtgggaggatagcttgagcgtagacaattacgagagcagcctagggcaacgtaagagataccgcatctactatgacaaaatatataacaaatatagct

SEQ ID NO: 682522 - DNA, 584 bp, Homo sapiens
  misc_feature (510)..(510): n is a, c, g, or t
tccagcagcggcatggggtgtgttgcagacagtcatgaaatgtggctgaatcttgcaagggaccctcggtcctatggttgctgcttgagacaaagacccctgtcagtggaacctggtgacattcacccttctgtgtcaggctgcagacagcaggagatggcagcagattacacccaacaggaaaagggccattgccaccccacaggttgccatagaaggagatgacatctctccctctcctcctccagcagtgtcagctggggaagtggtgggtggatgtgcacaaaagagtagaccacagagcatgctccttctcctccggtctgctggggccccaagagagtctgcagcccttggccaaggaccggctgacacaggagaacaaaagaccttaggctgggataacatggtggtgcagttcatcctctggagctccctgtgagatcagactggagccagtctccagctgagaccacatctcacttagctccttccctgccatatcctgtnttccttactcctatctcctgagacttcttcctgaatgaattacatgcactccatccctgcctcagtctctgctt

SEQ ID NO: 682523 - DNA, 1012 bp, Homo sapiens
gtggtgagcttaggcgccgagggggaagcggagccgacatgccatgtggcccaggagcgtgggtgagtcgcaaaatttatgtgacccgcgtcggagagccttcgagaaatctcgtatcgatcaagagctgaagctgatcggtgagtatggcgctcgggaacagacgtgaggctctctggagggtcaaatttaccaactggctccaattgatccgcgagggcgtcggacgggaactgctgacgcttgatgagacaggacccgacgggggatctgtacgaaggctaacgaacctgtgctgcagcgggtgggtcctgcataggggtgctggcatgatggtgcagagattgaatgcctggaattaacggtaccctggggaccgtgaaagattcgcagggaatgttctgtacgaccgaagacgtcgctgcgagaatcccaggggttcgtatccaaggctagggggacatttgcgctcaaaggtcgcattgccaacctaacgactacggcgatggcatggattcgcaggcaccacgtgcctcgatattcaacggggctccctgcagataccaacggttgcgatgagagcagtccccaggatccgttacattttgatacacgtccttgggaatgtgcaccaagaaatgcacaaatctgaagcattactcatcatggcggattctccccttaacggggggttgagccagaccacagaggccggcggatggaagcaaggaaagaaattgccaaacggaagggggccccacgggttgacgcgggcctggggggagcctggggaggaacggaaccgaagggaccgggacgcggacttaaaggtaccgaccacttggttcccgtaccctgggcgcctcgcgcgcgggcaattcggacatacggatatatagcccatggcccaaacaagtaaaagcacgggactcacaggcagccttcttaccagccagaacaactagaagacgaacaggaaccacagcaaacacagatagccgccaaagggcag

SEQ ID NO: 682524 - DNA, 510 bp, Homo sapiens
  misc_feature (488)..(488): n is a, c, g, or t
tgtatcgatgccacattatttcttctcagcttagacggcgtaagaagaaatatatgtggtgaaaggtgggaaccatttctctctgggtctcggtttaaggtgaaaagggtgagctaataggaggcactttcaacttcactccctcacgctaccccgtccccctccagacgggcagtttcaaggatgcaaatggcatggcaaaatcaaacggactcatgaagcattggggccagtgcacggtttacttccatcggttggcagacacattggtgcccggggctggggagcccttggtatcaaggttcggacaagggtccctataaccttaaccaactcgaaaccggttggggatggatatgatggggcttcggtgctatggcggggatggggagaaataaaacatgcaatttaggtggaagcgaagaaatttaaagaggattttattgggctggggtcaatcctggtgaaaagggaggtggatgtgtttnccttgggtgggggggcatcgat

SEQ ID NO: 682525 - DNA, 185 bp, Homo sapiens
cgcctactgcagaatcaaccccaagtccgggggcatcgtcatgcttttccggagtgactttccctcaaccccaactgttcggttcgtctgctcggaaatctataacattgtatactctcaacggcaagaaagtggaagtttccgtcaaacagatcatcgctggaaaagccgtggagcaaggaggt

SEQ ID NO: 682526 - DNA, 1604 bp, Homo sapiens
  misc_feature (328)..(328): n is a, c, g, or t
  misc_feature (1000)..(1000): n is a, c, g, or t
  misc_feature (1047)..(1047): n is a, c, g, or t
  misc_feature (1108)..(1108): n is a, c, g, or t
  misc_feature (1310)..(1310): n is a, c, g, or t
  misc_feature (1312)..(1312): n is a, c, g, or t
  misc_feature (1365)..(1365): n is a, c, g, or t
ggaacacaatgttgaccaaacagggcttttgtgttgggcccccgacaggcggcctcgtgtaagtaaagtgttccgctgtggacacggacacgacggtggggatcaccaccgtgggccgcacgaacagaagaagccctcactacaaccaggggggcggacaacgggggctaccacacccgtgtgcttagtaggacccacgcccgaagagaagtggttgggggcttcttctcgaacagagcggcccacaccaggaggggagacacaccacagatatcaaccgtgggcctagaaacacacgaaggcgcctgggggtatacttctgctgcgnccggaattttcttcaaagagccccgtgccgggtgtgcccaaagcaaaatcccggacgcagagcccccttttcggggagggaaaagcccccatattaaccccccacaaaggtccccgttgcgagtaggaattccgggccgccaagaaacaacttgggccccaccacatagccgtgttgggcagaatcgccgccagaaagcgtgatcgcgtgggggaccacaagccacattggagagggaaggaagaccccccccccggggcccccgttgtaagagtgccccaccccacaaagggggggcccccccccgctggagatctcacaaaggggtggtagaaacaacgccacacaaggtgcacaacccgcgcattatttagggcctgttccaccacaaacgcccggcgctgggttcccacagcagagggccccccctgggagatgtccccgcagagaagagttggtgggggccccgccacaccacaagagagatttcaacaaggggggttccccccccgcctctgccacggcgaaatattctctcacatggggtttttccggcgcagagtttgtagagcaccccccccccctctcgtggtgggagaacacccacacccacatttgtggacacgcctatatgtcttgtgcggctcttatttctcggcgccctgggggggncctcttctcgcgcgctagtctcttgagagtttttaaggcgtcacagncccccccgcacaacttgggggcccactacgacacactcttctgtattatccgcggcgagangatttgggccgcttcggccacccgcacacacaggagagtttcctcctctcccacagagacgcctctctcacacccctgctctgtcatcacaagggcgcgtcttctcttagagaggctcgtgtgcaccctctgtctctctataaggccactaaattctctctctaagatggggagattgagagccccttctctctcgagagananagagacttttcttctggcacacattccgtcttggcacacgctcgagagagagngggacaaagtttctccacaggctgaggcctgaaagtctggagttaattaaagtgggagttgtgcacctccacgagacttctccctgcataacgccttaattgtgaagaactaagaaggaagtgggagagttgaggcctcggcttgaacctcttggaaaccacgaaaagattggggagacaggtggaggaggccacactcctgggagctgatggttttaaatctggttttaaatttccca

SEQ ID NO: 682527 - DNA, 566 bp, Homo sapiens
attccccagccctgaatttccagccatgaagatatgctggggttgccccccaaagagaggaagaagattcacacctgaatttcgggttttctccgaaattagaaagggcctcttctgggggccattaaaaggagaaaaaaccccatttctccccttgcctttaggccaaagaaaaaatgctttatagccaaatgaaagagaacctgaaaggcttctttccccgtttattgggtgaagggggatccatttgggtctggaaaaaaccaatgggtttgaaaattagtttaggttggggcttccggggacccccccggaaactaaaagcttccggggtatggctatgttccttctatagaagaaaagccacccacccccggattttaaaatttggtattctcccccgaaaaggaatttttgggggagcccccccaaaaccttttcccccccttaaaagggaaaaaacccttttagggccccaaaatcttttgttttttaaggtgggggaaattttggtggggttttccttttgggggggggaaaaatctttttttttgaagggaataaga

SEQ ID NO: 682528 - DNA, 336 bp, Homo sapiens
aaatttttttttcataaagcaggaattccaaccagtaaaggccaataagatgggccaatatagaaattttttgggaagattataaaaaccagttgtttgtgtcaggcatgactaatagttttttttaaaaaggggcagggggacttaaattgttgatggctatgaaaaaaatttttggatgttcccttaactactgagctgttttactggaaattaaaaatggtatagttaaaatggcctatccaatgtaataagtttaaaaggggtggatcaaatgttaaaccctgatttaaatgtttttttacccaaaatgaattaaaatatagtagggttcca

SEQ ID NO: 682529 - DNA, 427 bp, Homo sapiens
  misc_feature (80)..(80): n is a, c, g, or t
  misc_feature (83)..(83): n is a, c, g, or t
  misc_feature (117)..(117): n is a, c, g, or t
  misc_feature (356)..(356): n is a, c, g, or t
  misc_feature (404)..(404): n is a, c, g, or t
  misc_feature (411)..(411): n is a, c, g, or t
gcctggacctcccttcccacctgatcacagggaattcaatgagggggatggccggggagcagcccgaggcccccagggantgnggaaggccgcagacctggagatgaccgcttcccncgggatcctgatgacccgcgatttcgagggcgcagggaagagagctttagaagaggtgctcccccaagacacgaaaggccgcgctcctccaagaggaagggacaactttcctggtcctgatgactttggtccagaagagggttttgatgcttctgatgaagcagcccgaggacgagatctccgtggtcgaggccgtggcacccctcgaggaggatccaggaagtgcttactccccactnctgatgagttttccccgctttttaaggaggacggaagccagacttctnggatggnaatcgagagcccgggg

SEQ ID NO: 682530 - DNA, 202 bp, Homo sapiens
  misc_feature (36)..(36): n is a, c, g, or t
cccttttcaggggtcctttccccccttcccctttantgcctttaccagggggacccctttcctgacttttgacagggcagattagttttggacttgaaatcaggggaataaaacaggaggcccttttttgaatttgggttttttccccccacaagaaggttggggggttcctcccgaaaaaataaaaaaataagattcctta

SEQ ID NO: 682531 - DNA, 333 bp, Homo sapiens
tgctgttcagaggatccccgtcggatgcaagagtccagaattgagccttgaatctggcaaccgtagacttataatatatacataagttataaagagattggaattataatattactacataatacaatccatgtcatcttacaatcatcacagtttaattacttcccatttctcatccctgatactatttttcttgccatactcaactaggtaggacttccagtcacaataatcaaccgaattggtgacagtgaaaacaacttctctttccctgtctcaaaagaaaacttccaacatttcaccagtaaacatggtgtttgctataggattttt

SEQ ID NO: 682532 - DNA, 1030 bp, Homo sapiens
  misc_feature (355)..(355): n is a, c, g, or t
  misc_feature (523)..(523): n is a, c, g, or t
  misc_feature (560)..(560): n is a, c, g, or t
tcagtgtacctgtggacacgctcacctgagctagctaaatggctactatggctcctcgggacgatcccatgactcgctgagcttgttggcactgctactgtactgacccgtggggtgcaaagatgggcaagtgtctttccctaagacatatccactatactccaggagcttattttcgatcatacgcttactggctctcgctggccctatacgctcatgacaccaaggctgtgcgcttgtgacaagcctaaacgagtgagattctgcaaggaatagccttatagtacgccaatacggtaagcaagacaggtaattcagtatgcctgtcagcagacctcccgagtaggcgtcaccntcgtggtgtgtctcagttagctcatagttaccagagcagcacctccacatcacgggtaagggaagacagcaaacgagagagatcgcataccataagaggctagtctctcaggtatcatcctcgtggcatgtctcgagtccacgatcagatggcgttgtgagctcccgnctgctaggttcccctccagagaagttgtcgttccgancaagacagaccctaggttgtaactgggcggcccttctggaccagccaaacggttgttaatgagccgtacgttaataaggggagccttaagaacggcaagagggattccgaccatctgccttgcttggggtgaagagcttgtgaaacgaatggggtatgcccccctgtgaacttggggcaagaatcctttcaaaggcatgcaccttagcaggtcaagtttcgaaccgccatagctcgccacaaattgagttcaccggcctatactccccgaaaataaaaggacctggatcgttagggccatcacgggacaggggcaggggcacaaggggcccagaacattcccctggggccacgatggcaaaagacgccgtacacttacaggggacccagggggagatctacaggccggcggggagaacccgggtaacaccccccagaggagcaaacaaggagccgttggccagtgcccac

SEQ ID NO: 682533 - DNA, 455 bp, Homo sapiens
  misc_feature (178)..(178): n is a, c, g, or t
ccatatgcttattggaacccttaaggtaaagctaacacggacagttccccccagaagaagatggcatccttaatgtgaacagcttttcccaagatcacagatcaagacttctctactatcatgagactcttatcttaagtatctgtgcagctgctaacacttacagcatgtggagaanacatggggtattataaagatttggttgtagggaattaacaaaaaaaaaccacttagttaagcaagtaaaccctttatctaatgcattctttaatctatttgatttttggtggtttgatttatggggaccctgagtaaggagcatataccacatcttggtgttatcccaatagtcataagagtctccctggtgtactgtacttactcaaatgtttcaagagtttgcatgcagccatctctaaaatgtcaaatggtgtctctttaactggaatgacaag

SEQ ID NO: 682534 - DNA, 1224 bp, Homo sapiens
cctctgcaccccagcaagtcatcagcggaagatttgggctggggagtgagcagctaaccagaggcggtacccctgcccggaagtgtgtcctggaccttggtttggttgggtccctcaggtgttgcccacacagaccgtaactacctggcaatcgagaagggtgccagatggacactgggggtgaaaacacagccacgcctggtggggaagcgggtggaggtgctcaggaggcaaccaggagagtgcagtgcagcactgcccgcaccaagcctgggctggggctcaacaggaagcgtggagatggcgcagatgcaccgcaggactcagagggatcacgctgggcttaaaaggcccagagcaaacagactcaaccgttaggaagcagggaagtggcccgatcttaacggaaatttcccagcaagaggacaggcttccttgtccggggccatccaggctcacacctgactgagtcccgcagacttggctgtgcccacagcgcctgtctcactcagtgtaaaccgagatgagttgcatccatcggctcccgattaccaagaatcaagaggcgatggatggaaaccttgggggaagcagggcctggagggccagtgtcccctgagtctgtgagacactccaggacggacgggggcgggcctgagctgcaacctgtccctccgaaaggcacttgcaagacagggttgaaactgggctgtggcaacaaaaccgacaaccaagaacactggatcccttgtgagggagaactggtcaaagacgacggagcagggccaacagggatcagacgcaagacactggagaagataaaaagcgacacaccaaaggctggcagcgcaaactcaaccgggtatccaacaatagcgaagagcacggtcgacaaacctataaacgaagagttaaagacggcagtcaaaccgttgaaacaatctttaaaaaataaaagattacgaggtaaaggaaggaaaatggcacaaaaagcggaacaagaggaagaaggcaacgaacaaaagaaaaaacagagagaggaagacaagacacgaaggggacacgacaaacgcagactaacacccaccgcggcggcgagaaagcaagcagaaggggaggacacacacgcagcgaaaagacaaagagagaataaaaaaagggggcaaagaaagcggcagcgggacaggagaaacagacaccagtgccacgccagacaagcgcaga

SEQ ID NO: 682535 - DNA, 395 bp, Homo sapiens
  misc_feature (3)..(3): n is a, c, g, or t
tcnaaaggggggggaaaccggtttggcccccttttggtttttgtttagccaaagagagagccttcccttaaaaacccctcccccccggtttttcccgggggaattttccccggggggttcccttttttttgaaacccccccattaatcttgggagggcccgggttttggtaaaccgggcccccaatggtttaagggtaaataggttccaatttctctttaagccttggggggaagggtggtggttttttttttcccccaggttaggcccccggctttggaaaaaccttggtttggggagtttgccggtctttcccggggcaaatttttttgggggtttttgggtccctttaggggtttccaaaaacccggttccgccgcccccggttttgtttta

SEQ ID NO: 682536 - DNA, 124 bp, Homo sapiens
ctgcagttgacgctgtgacgactctagagatccctgatgtaggtggaagcgcccacccttgttccactgtgacccctgtacccatgctgacctgtgtttcctccccggtacatgcaatgggtac

SEQ ID NO: 682537 - DNA, 377 bp, Homo sapiens
gccggccctaatgtagagagacgagagtgctgtctggcatcttctgacctcagacagacagtataagtggtcttgttggctaagatacgtaccaccagttacttagggccaagatatccacatccccttgcgtatgggaggtgggtgtaagagtgtaggatgcaacagatggttattatgggaagtagctcgatggtaaaaggacaaacagctatctatcttaaagcttacgcctgtatgtgcttattcccaagggagatagaggtgtataagtcacagaggacagcatgagttagaggacactggcatcaacagctgccacagccgtgcacaccagggccagagcagcccactgacatctcgtctcttctcttgta

SEQ ID NO: 682538 - DNA, 106 bp, Homo sapiens
  misc_feature (65)..(67): n is a, c, g, or t
ccaccgactgcaacagtcccgactcagcggcggcgcgtcgagccaccctggtcttacgggcagcnnntcgacaacaacactcaccagggccgcgggacaggtacag

SEQ ID NO: 682539 - DNA, 1030 bp, Homo sapiens
tcagagggagcagagggacagaaaagtaacctctttcttaagtggaatattctaataagctacctttggtaagtgccagtgtttattatctaatcattccaagtttggcattgatgtctgactgccactcccttctttcaaggacaggtgtttttggtagtaaaatcacgtggtttatacaaagctttattatagggggtaaagttaaggctgctaaaaccccagtgttgggactgcgtgctgttgagatacgtgatgcttggggaagttaaaaaaaaaaaagttatatttcttgtgtcttataaagaaattttataaaaaatatagtcagtaaaacttattcatcttttccagggaacatacgtgatgtggtcttaaaagaattagaacagttaagttaaaagggtggctggaacatcatatttctctacaaaacgtggacaaaattgaaccgtggtctctagaagaagtgtaccccaaaataaacacagtgtgacagcacgtatggattcttataaaaacaaaaccaaacaaaaacacaacacaacaaacagaaaaaaaaaaaaagggggacgcccacacaaaaagccacacaggaggggcgccacgacgaaccagggctacacgagctatatgagacacaagaagaccacaaagaaggagcacaaagaacgacgcgcagagcaacatgccgacccccagcacacaacacaacaggacgaaccgcgggagacacaacgcagacagcaggcgcacacacctcgcagaacgcgaccacaacacaaacaaaacgtagagacgagcaggaacacccacatggtgcgaacacaaacacacacccgaacacacgaacatacaacagccgcccaacaagccgcaacacaacaacagccagcagacaaagaggataaaaagagggtgaaaaacaacgacagccccacaacaaaccggcagcacaacagaacaaaacaagatagagagaagacgaagatcgacacagacaaacaaccacaaccggagagcaggaaac

SEQ ID NO: 682540 - DNA, 257 bp, Homo sapiens
  misc_feature (58)..(58): n is a, c, g, or t
ctcctagcctcgcagtggctgggattgcgggcgtgcaccaccacacccggctaatttntgtatttttggtagagatagggtttcactttgttgccaggctggtctcgaactcctgacctcaaatgatccaggccacctctgcctcccaaagtgctgggattgcaggcatgagccaccatgcttggccaacctgagatgactttggtggtggctgatcacacttttgggaacactggcgaggaggaccactggcgagg

SEQ ID NO: 682541 - DNA, 336 bp, Homo sapiens
cagccatttcttaaagtgaaacagcactgaagttacgaacacagtgacgttcctttcacagcagatttctccatagcatattatgatttttgacattttcctcctatcttccttctttccttaattcctctccatctcttcccatgtcttcataaggtagtgtctcactaactcagacatcctcagactcacaatgtagcgtaacctcaaggcatctttcaaccctcctgcctcagcctcccaaattttgacattatagtcatgaactaccatgtctagactttttttcctcccttaaggaggtttttagaatgccagctggtcttacgtcgacgc

SEQ ID NO: 682542 - DNA, 343 bp, Homo sapiens
gaggatccccagttccagagtagttagacagagatggtatggtccacaaagcctgcctagtcccagaagggtttccaacccttctctaggatagcagttcttaaacttttttttttttttgggttttttccaattctcccttcaaaaggggggaaaagaggggtatatttaacttttgggcaagtctcctcagggtagggtggggttaattagcagacggtgactccaaagagcggcttgggcttcattctgttacaaattcacttgtcgggtggcctacagaaaactccagtgtatcctggtaagaggtggaaagttaaaagggcaatgtaattccttagta

SEQ ID NO: 682543 - DNA, 271 bp, Homo sapiens
atggcttatggaactcggtagctgggcagatttctactgggagatgcgcagtaggacagcgttaggtcttgaagcctgaccgtgtgagacgagcatccaaggctggtgactaaacggaagaatgtccaggccattcctgccgtcgctaactggataaaacgaaggccccaaaccaaactctagctgatccatgttgccttcaagtttgtttttctcgggggcatctctctcatcagataagacagctacatcagtctgcaaggaacccacg

SEQ ID NO: 682544 - DNA, 199 bp, Homo sapiens
  misc_feature (5)..(5): n is a, c, g, or t
ccccngactagcccgacagctaatcactcgtaccggagcttcctgccgaaagtgctggcgttctatcataacttggattctattggtctagcacactgatcagaatgaaacctaaactagctcctgctatactgtgtttgaaaaatcagtttctatgattactaaccccttgcccattgctctatctgtaaagtatgat

SEQ ID NO: 682545 - DNA, 301 bp, Homo sapiens
tctccagtctattatgtgtgatttgacatagatactgtgctagaatcgacctggtgtctattccgcaattatgcaataagactaatacgctatatagtcagtcaggtatatatttagttcaacgcaggagatctgcaaaagggtatgaagacattattcttttctttattggcatggccaacattaatatgtaccaaactagcataaagaaagttttcagcttgttgtggtggctcatgcctgtaatcacagcattaagggaagccaaggcgggcagatcacctgaggtcaggagtacgag

SEQ ID NO: 682546 - DNA, 314 bp, Homo sapiens
gatctccaccaccctttatcttaacccatacattcctttctactgacaaatagcttttttcaaccaattgccaatcagaatatatttaaatctacctatgatctggaagtgccctgctccctttgagttgtcccacccttccagaacaaaccaatgcaaaccttacatgtattgattgatgtctcgtgtctccctaacatgcataaaagcaaactgtaccccaaccattttgagcatgtgtctgcaggacctcctgaggctgtgtcacgggtgtgtccttacccttggcaaaataaagttaccaaattgaaaaa

SEQ ID NO: 682547 - DNA, 352 bp, Homo sapiens
gaatcacaggtgtcgtgaataagggggaccgttctgtcagagggtctaatgtcagtctcttgtttgggatgcgggtgcttctaagtcatctgccgtcatggttgggcatgggttcaggatccctcatctccatcaagttctcttaattcctcgggtgtgtgtggtcttttagctcttacatttctctaagatccatatcttaaaacccttcactccctacttctttcacttttttctttttttttttgggggccattttccaaaaccccagagtgattccctgtggaaagggcccgggttataaactcctgggaagagtttaggcagcgacacattgggtgaatgaggggac

SEQ ID NO: 682548 - DNA, 481 bp, Homo sapiens
tgccacctcccgggatcagggatctcccacctcagcctcctgagtagctgggactacaagcgtgtgtcaccacacctgcctaatttttgtagagtcagcgtttcaccacgttgcccaggctgatcttgaactcctgacctcaagtgatcctctcacctcagcctcctgagtatagctgggactacagttgcatgccactacacacagctaatttttgtatcttttttgtagagacgggttctcactatgttgcccaggctggccttgaactcctatgctcaaatgatccgcccgtcttggcctcccaaagtgctggggttacaggcatgagccccagtgcccagccagcctcagtattctcatgtaaaaatgggaccacatttaaactctgagcttctcgtaaggagttgacgtggtaactgatgaggtggcatatataaaatgcctggggtgtattatgctctcaagaagatgaggccca

SEQ ID NO: 682549 - DNA, 383 bp, Homo sapiens
cctttctgctttcccccattttggtttcctttctccccatcccctgatccagcaaagatggtggggacaaaggctaagcttctcttcagaatggtctgcgcaccatctgacctgcatcattgctggcacccgttgagaacagagttggggcaacagcgtggagaacagacctgtgacttttgcctaatgctttcacgtgtccaaagtcttccagtggccggttgatcccctttgaggacagtgctcagctgttagtctcagagttggaaatggaaggaaggagagggagtctagtttcattgactcttcaacaaatatttactgagcacccactacgtgctaggcctcgatctgggcgctggagacactgcacagcaaaacag

SEQ ID NO: 682550 - DNA, 1511 bp, Homo sapiens
gtactcgcagattaattgtatatctcttgggaatggatcgcataacatagtaggcaactttatcatcactagttgagccatattatctatcgtgacctaataaggcttttcctcatataactacagcctagcagggggacgattatttacatatctggtaattatctatgtgatcgattgatcccttgagtacacattactcgcaggtcgcctattataacttgattcttgcaatggcactcgctgagagatattggatcaggtcctatgggtctctagatgaagctcgatctcgacagtatttgatgcactagtataagtgcagtgaaaccatacttatttcaacacggattcactacacactttgcatgagcgagacactactcgataaattcttgtgtgcatgcatacttgagatattatagagtttgcgtggattgatagtttggtgactttaccctttggatttataccaattaccattggtggatttgtcagtacctacaattgctttttgttggaccaaacgtcgtttacaactacttggtaaaggtggtttccacctttttaggacgcactctttttaccatgaatccacggttcatcttctgaatggcagatactaacttatggttaacagacaggttcctataagctttactgcataaccaattgtataggataggtggaggggccaaaagacccgataatcaaatatttgtaacgggagaccgtggctttgttgcagaacacgcacgattctaagcattgaacctttatttcctacggatttggaattgcaccagataggaacctggggaccatccctgtgggatcacccaagcttagagggttcactttccaaaaactctctgtggttttccgcacttacgcattggacctttaacatttgaagtgaattaccacgcctacgtctgtgataaaagcggcgcgttagtatcacttaaagggtcacatttggcatgtgtctcagtacacacttgcagacattccttcccttgtgacccctaaagaattttcttactttccccctgtgtgtgaattgcattccatttcctaaggcgggggcaatatcggcggtaattatacaggcggtatgccccttgctggaattagcgctgtttgttaaacacaaacatcgataattggccactatttcctccagatttgtgaagatgcccctgtgtccattacacgccaattgtccctttgtctctgacaccatttacacacgagggctaatagggaaatctcccatgagacgggcaacatgtcggtgcgccccggatacttgtaagggggaacaatgacactgttgagaagcatgatcctccacgcgtatcaccataccggactaacgtcaaactggtccggcgcactccgaacattcaacagtataggaagaacctcggctaccacaaatccacatagtgttgcggagcgcgcccgctccatgcgaagtataatataagtagttgctacatcacaag

SEQ ID NO: 682551 - DNA, 380 bp, Homo sapiens
ttcccccaggggtcagtccccaaggggccctcctttccccccaaagagggccccaaggttaaagccccccccaattcccccgggcccccccccccccctttgggcctgcccctaaggagttttgtgggcctttctgggaaatagcccccttggggaaatttcccaaattgggtaaatttaaacccggaattggggggccatttattaaaaagcccccttaaagccgggaacttccccctagggggggggggggaaaaggttaaattttttattccggggttttttggggcctttttgggttttttaaaaattttttttggggggggttatgccccaccccttttttttttcagggcccaaaaaatttaggaaaacttcca

SEQ ID NO: 682552 - DNA, 727 bp, Homo sapiens
  misc_feature (46)..(46): n is a, c, g, or t
  misc_feature (101)..(101): n is a, c, g, or t
  misc_feature (123)..(124): n is a, c, g, or t
  misc_feature (126)..(126): n is a, c, g, or t
  misc_feature (159)..(159): n is a, c, g, or t
  misc_feature (197)..(197): n is a, c, g, or t
  misc_feature (241)..(241): n is a, c, g, or t
  misc_feature (275)..(275): n is a, c, g, or t
  misc_feature (316)..(317): n is a, c, g, or t
  misc_feature (321)..(321): n is a, c, g, or t
  misc_feature (324)..(324): n is a, c, g, or t
  misc_feature (347)..(347): n is a, c, g, or t
  misc_feature (352)..(352): n is a, c, g, or t
  misc_feature (386)..(386): n is a, c, g, or t
  misc_feature (404)..(404): n is a, c, g, or t
tgggaagccccggcacactggccaaactgcaggcccggagcagggngccttcgtccacgatccctccacgggcacagttcaccacacgcacccccttcttncctgggcaaagggtgtttgtcnntncagcaagcctgtcgtggagggcaggagaggagntgtgcacaggtgatgaaactcacagagaggccagattntccctccaggggcagctgctgaacaccaaaggaggccgagaccntcgtggggaaagtgagtggggctcataccctatnagtcttcatcccaaaggacgtgcactccgggtagctacctnntctnccnaatccgtgcccaggccaagaatntcccnggggtcttcccattcagcctcgtggtcccagtgnagcttcttccgctcccantttgccggtccttcatcgaagccgttcgccgtggggaatctgcctggccaggccatgatcattccacaagtgacgttctgcggcctgaggctgtcccccatggggggtgttcctaacccagatgcccttccttggtgtggggccccaggatccccattttgccccccctgttgcgtatccttgcgcccaccctgggggtctccacgtcgcgttatacactcgggcgcgcttggtggggagcggcacataaggcgcgcagactctgaccccgtataaccctctgtgagagggtgtgtcccccttggcccccttggagactccgg

SEQ ID NO: 682553 - DNA, 676 bp, Homo sapiens
taactggcgatcattttacggctcccatcgttttaaatacaaagattgggcaccccaacgcccgggattgccagcaaccaatgaacattactataacattataaacttgatttaccgtaaatgcgtcccgaattacattacctattacagtatccaacgttatcactgactaactccctaatacacaccactccattatcgacctccgtacgtttatacttcgatcagcggactaaacacttgctcacgcgccattcactgaagctcttcatggcatctatatctgcatacggccattctcaggttcctcaactttccgaatagtttcgcaatccctacttgattcaatttgtcgattcgaaccagatatacggcgcgatgcggctgctctacagaatgcctggtgagccctattgcgcttgtacccaatctgccttattctgtgactctatagaatggtaggttatgccattggctcattccttactgggatgcctgtagcgcgctgcacttctgtataactagggactttcctcgctcattgccaacttttcacccttcactttgccctgcttagtccatatcgcctctggtatgcattccccccatctctgctctaataccttttcgcatccacttttcttggtcaccgtgtcttctcccaggaaccctgcca

SEQ ID NO: 682554 - DNA, 207 bp, Homo sapiens
cccccccgggcccccccgggggggggagagggttttttccccccccccgccccgggggggagggcggaaaaaaagggggggcagcccccctcccccttttttttttgcccccggggtgggggggggggggtggggggttttttttttttttccctttggtttggaaataaaggggggcaaaaaaaaaaaaaccccgtttttttccca

SEQ ID NO: 682555 - DNA, 196 bp, Homo sapiens
aattcaagagcagatatgcaagcacgccaggatattgtatgtattcttagtagagatggggtttcaccaatgttggccaggctgatctcgaactcttgagctcatgatatgcccgcctcggcctcccaagtgcgggggttacatgccctgagccaccgcgcccagcccggtcctccttttattttcgaatccactc

SEQ ID NO: 682556 - DNA, 969 bp, Homo sapiens
aactgcagggttctcccatgggcaggtggtctctctggatgatgctgcgccccttccaggacccagacctgagctccctgtcaggccggttctgcgtgtctgggcaagcagcaggatgggcctctggtcacgacagcacgcatcacccgcatgtgggacaatcggctagctacacagtcaagttcgactcgctggtgctgagggagcgccgtgggtgtgcaacgggggacggcaatcctgtccccccatcatgcgcacagatgtgctcacagagtccgactcagacagcgacggtactgggtgactccagtcttatgcacaggagtggtggggtcagagtgcatggtggactcgtggggacctgcagctctgccttagcgggctgggaggtgcacaggcgaggtatatgctcgagcattacctcatgcgaaagatgggctatgatgtagggcaaggggttagcggccgagatctgcgcaaggccggggggcagccgcatccatgtctgatggtgttgccctcgagtgcaaggtcgcatggaccagtggtgtggagaccctggcagtaagcacacccagggtgggcaaccgctggctaccagacagaccccccgaggtgcccggggaatatgggccgggctgggggccgccagcctcctcggcaaatgtgtttgacttcctcagtgcaaacagttgcaggtccggctcctggggcccgtagaaagccgcgggcggccccagcggagaagggcagcacgcagggaatggaccactgccagcaagagtgcatcgggcctgaggccagcggctcatacagatgacgcacacaactggcgacccagcggacaaaccgcgcccggaggacacgccgcagctggcgaaaaccgggacccacgaacaacgggcacacacgcaggcgcacccggctacccccggagactcccccagacagagagacgccacccgcacc

SEQ ID NO: 682557 - DNA, 159 bp, Homo sapiens
atctagatcgtaaacgtagagaagctgcttgagtttattgtaaagtaaactgttacgtgaggatggtgggaaaacagctatggggacagaggagaggaagccagcgggcggcatcgagatcttcgtggtggtcgtgggccggcaggtgaattgagcccc

SEQ ID NO: 682558 - DNA, 215 bp, Homo sapiens
ctctcgaggatttcaagtacagcagagaagagaagagaaaagaaaagaaagaaaagaaaagaaaagaaaagattgtttccatgcctgctaacacaacatccattcttcagcccatgagtcaaggagtaattttaactttcaagtcttattatttaaaaaatatatttcttaagactatagctgccataaataatgacttctctgctggatacctt

SEQ ID NO: 682559 - DNA, 115 bp, Homo sapiens
ggctcggtctcagctatcatctcaacaaactggattgagtgttcgtgaccattccagtggaacacagttaacagccctgacgtgatggttatatgtacccactatctcccctatc

SEQ ID NO: 682560 - DNA, 341 bp, Homo sapiens
tgtcacggtctccacatgtgtcccgagagctctgaggggtaaatgtgtattttccctattacctgtccccccactcttattctctgttggaggagcgctctcagaaatgtttgtttcacatgtccccttaagttttttgttaaaagagtgtgtattgttatcactgtgtcttataaccctctgagggaaaggggagtgttttgtgggccccactgggtttcttttttgcgtgtggcacttttaagtttttagtgtttaaaatctctactttttattggagacacattgtgcacaaatttgtcacagagttttgtgagcccctataaaagttttatgtgaga

SEQ ID NO: 682561 - DNA, 301 bp, Homo sapiens
gcgttgaaactcatttttcttgcacgccaacttgttgagcaatatttgctgtgatgcatcattgacgtactcaacgcagattgcactgctcaacaacagaaaaatcaagattacctcgtttgtttaagctcttcctcaaaatatagctgtcatttcttgctgttttgtgcaccgatattatattttgctagcatgctatctagttgtctctgcaactcatctttttgttcgttgaatgttttgagagataattctgcaacggtcgtatcaaaaccacggtttcacgtacattttgcgattt

SEQ ID NO: 682562 - DNA, 107 bp, Homo sapiens
gatatttgaatataaatacttctccaatgatatgatttatgattctcctgttcataaaccacctctgtcaattttcacatttacaagccattactcgttgttgtctg

SEQ ID NO: 682563 - DNA, 796 bp, Homo sapiens
tctttgttcctgatcgtcgttctggtccatggcgcgttgtgccgattgccatatgtcgtcgcgatgcggtccctcccgctggcccggtcccctggcgtgcgggcatccggtaggtcgcccgcggaactcggacccctgtttgtgcggtcatccctatatctgggtccgtgcagggcctgtaatcccttttcttggtccccttttgccggattttttgacccgcgtgggggacctcttcggtcccgcggtgtcgcccatcagcgtcgacctcgggtgtcccgcccctacgtcccttttcccgcccgtcggtacatttccaaagtgtgcccacgcaggatagatctggcctgtcatggccagcacgtgggcaggaccaacgtgggtggatcacctgaggctcacagagttcgagccaccctaggggacatagtgagccctccatctctaccgaacacaagtcgagtgtgaaaccaaacacttccggttccgggcatgttggctcactcctgtaatcccagccaactttgggagagctgagccacggtgcgacttacctgaggtccacggagttcgagaaccagcctggccacactcgaggacaccctcatctctagctagaatagccaaaattaactgggtgccggtggcatgtgccatgtaataccagctacttgggaggctgaggcacggacaatctcttgaaccccggtagggggaggtttcagtgaccccgtgatctgctcccctgcaccccagcctgggtgacaggagccagacacccatctcacacaataca

SEQ ID NO: 682564 - DNA, 133 bp, Homo sapiens
ggctaaggcctggatgcggtcaccttcatgtcagcatcctcttggtcttgcttggcacccactctttgtcacagctttgtggaggaggcgtacacatagtgcttctgccacatgataacgagaagcggtgaag

SEQ ID NO: 682565 - DNA, 293 bp, Homo sapiens
gcaggtctctactctctctaaagcaatcaaaatacaacattcctggagtcctcagggagtccggctcacagaagggctcgtttaccttacaggaagacgatgctgacactagcttaagcacgcattcagcacaccacagttacagtgaatcacacaggaattccacacacattccctacccagggtcagccttagtttacataggggcgtcaacagagaaaaggcaggggtgcctaaaggtcttctcaaatggcccagtctccaggtcctggctcattgggctaagactgaat

SEQ ID NO: 682566 - DNA, 554 bp, Homo sapiens
  misc_feature (496)..(496): n is a, c, g, or t
ttacatcgggggaaaaagacacgtgctgggctatgggccggggcgcagtttatgtgtaagcctttcctggtgggattccattttcttatttcccgaatacttctcagccccacaagtccacggagtcttctgtctccagagacggccgggtttccatccccgagggcatctgcgcatcacttaccagggggtaccaggcacctccagggtgcccggcacggtgtcaggagcgggggatacaggtgcgggtccccacctcactcccctcaagctcggcaatatatgatacataacccacacacacagaccatatgcaaaaggggggggactccttggtaccggtcaccggcatcagggattatcagcatttggccagactggtttcatcagggtctcccaacacactccccccagacattacccataggtgctcaaatagattggggtgtgcgtgtgtgtgtgtgtgtgtgtgtgtgtgagggtgtgtgtgtatttntacagagacagggtctcgccctgtcacccaggggggagtacaggggcgagatcatagc

SEQ ID NO: 682567 - DNA, 155 bp, Homo sapiens
agttcgagagcagtgtgggcagatgttgaaaccctgttgctagctacaactacaaaacttagccaagcgtggtggcactgcgcctgaaatcccagctactcaggaggctgaggcaggagaatcgcttgaatctgggaggcggaggttgcagttag

SEQ ID NO: 682568 - DNA, 231 bp, Homo sapiens
aggaggcagaggcacgaagggagaagtctccaatggttctggtttccaggcctggtccaaggaagccctgtattcagggaggctaccatttaaaggttggcagatgagcttatgggggggcaatcttcaaaaagtccacagcagaatgcatccgggctcgcaggggccatcaggctttgaataaattgctggttccaagagcccagtgaatgccaggcaggcaccccttcc

SEQ ID NO: 682569 - DNA, 1209 bp, Homo sapiens
agcggggcgggtcacgaggtcggaggatccagaccatcctggctaacacggtgaaaccgcgtctctactggaggtgcaagaaattggccgggtgtggtggcgcacacctgtagtcccagctactcgagaggctgaggcagtggaatagcttgggcccgggaggcggaggttgcagtgagcggagatagcgccactgcactccagcctgggtgacagagcgagactcaatctcaaaaaaaaaacaagttcttccagcctaagaacatttagtttcttggactagcattctccagcacagaagtggagactagtacgtgtgagccagctatcctaagtagtataggtgcagcttgtgccattacacgttgattaccaacgccttgaaaagcgtggaacatgtcagtattgacacatcacgcagttgatacctcagggcaagaatacgtaaagcaagttgagtcccactttgcattcatgcgttagacaaatttcaatcaccctatcgtgtcggacaactcgtccacgcaagtcgtacgtcataacgggcgacggaaaacacttgaggccagcacgtcgtatctaaacaggatactgtgggctacactcttactgtaggaccgcctatctccattacgaggaaaccgctcagcaccgcagactccgcgagccgtgtacatccagcaaacaatcgcccaatccaatgttcgcacgcacgttcgaactagcgccttcttggcgcgagccactgaggctaacaacaaattcaagtatgaacccacattaccacggcacactaatacacacccagacgaccccgacatcaacaaacggcgtggcgaggatagctataacaacggcaccaacaacagcaacctctacacacgccacgtatccaaaccccacagcgagcgcgcctagacctacaggcattgcaaaccggggacaaagttgggcaacaaaagttaaaccgaagacagaccccggactcagacagaagagagggcaggaacccgcagccacacagacgaaacatgccatgttgtgacaacctccgcgacgacacacccacaacaagcaccaccaggagtgcatgtcaacaaccagccagcacgcagacggtgcacaaaatgtcacaatcagaataaccgcaaataagacataaccccacgacacatcacaccaccctccacaccgacaacaaatctacac

SEQ ID NO: 682570 - DNA, 877 bp, Homo sapiens
  misc_feature (12)..(12): n is a, c, g, or t
  misc_feature (69)..(69): n is a, c, g, or t
  misc_feature (182)..(182): n is a, c, g, or t
  misc_feature (209)..(209): n is a, c, g, or t
  misc_feature (255)..(255): n is a, c, g, or t
  misc_feature (258)..(258): n is a, c, g, or t
  misc_feature (270)..(270): n is a, c, g, or t
  misc_feature (281)..(281): n is a, c, g, or t
  misc_feature (286)..(286): n is a, c, g, or t
  misc_feature (294)..(294): n is a, c, g, or t
  misc_feature (668)..(668): n is a, c, g, or t
gcagagtggaancaggtgtgagagggtccagcagaaggaaacatggctgccaaagtgtttgagtccatnggcaagtttggcctggccttagctgttgcaggaggcgtggtgaactctgccttatataatgtggatgctgggcacagagctgtcgatctttgaccgattccgtggagtgcagngacattgtggtaggggaagggactcanttttctcatccccgtggggttaccagaaaaccaattatctttggantgnccgtgtctcgancacgtgtaatngtgcncagtctantcacgtggtagcaagacgatttacaggaatgtcaacatcacactgcggcatcctcttccggccgtgtcgccagccagcttcctcgcatcttcaccagcatcggagaggactatgatgagcgtgtgctgccgtccatcacaactgagatcctcaagtcacgtggtggctcgctttgatgctggagaactaatcacccagagagagctggtctccaggcaggtgagcgacgaccttacagagcgagccggcacctttgggctcatcctggatgacgtgtccttgacacatctgaccttcgggaaggagttcacagaagcggtggaagccaaacaggtggctcagcaggaagcagagagggccagattgtggtgganaaggctgagcaacagacaaaggcggccatcatctctgctgagggcgactccaaggcagctgagctgattgccaactcactggccactgcaggggatggctgatcgagctgcgcaagctggaagctgcaggaggacatcgcgtaccagtctcacgctctcggaaatcactacctgccagcgggccagatccgggctcctcccagctgccc

SEQ ID NO: 682571 - DNA, 165 bp, Homo sapiens
gaccaagaggatccccgttccgtcgaccgcattgagcaacaggaccttcagacagtcatcgagatctaccctgacctcagcagcaacgacatgctcctcttcatcgtgcaagggcatccaacttgcccacacccccaggactgtcccctgtgcgatctgcgatgt

SEQ ID NO: 682572 - DNA, 576 bp, Homo sapiens
atgacccaccaatcacatgcctatcatatagtaagaacgcgcagcccgatgactcgcgcataacaggggccctctgcagccggtcctaatgacctcgcggcctagccatgatgagttgtcacttccactccataacgctcctcatactgaggcgcttacgaacctagacacagtaaccatataccaatgatggggcgatgtaggcacgagaaagcgcataccaaggctcacgcagacagccaccgtgtccgaaaaaggccttcgagtacgggataatcgcgtatgtatgacctcagaaattgtctccttcgcaggatttttctgagccttttaccactccagcctagcccctaccccccaattaggagggcactgggccccaagcaggcatcaccccgctaaatcccctagaagtcccactcctaaacacatccgtattactcgcatcaggagtatcaatcacctgagctcaccatagtctaatagaaaacagccgaaaccaaataattcaagcacgtgcttatgacaattttacggggtctctattggaccctcctacaagcctcagagtacgtc

SEQ ID NO: 682573 - DNA, 277 bp, Homo sapiens
caagacctgtctcaaaaaagaaaaaaatgcataccttcagaaaaattaagtatgccttcaatatattatacagattgtactatataaagcatacacaaaaatagaaattaaaaatgatgatagctgggtgcggtggtgtgtgcctatagtctcacctactcaggaggctgaggcagaaggattgcttgaggttaggagtttgagactagtgtgctaagatcaagcctgtgaatagccactatactccagcctgggcaacacagcaagaccccatctc

SEQ ID NO: 682574 - DNA, 119 bp, Homo sapiens
acccgctatcaaggagccaattccttatttggtgaatccacgtttactcttttatggattattctttgtgccatatttaagaaatcttgtctaacacaggtattttatcctgttttctt

SEQ ID NO: 682575 - DNA, 1628 bp, Homo sapiens
  misc_feature (874)..(874): n is a, c, g, or t
  misc_feature (897)..(897): n is a, c, g, or t
gagctgaacatggacccggctgcgcgggtggtgctgggcgctgtgtgcctgtgtgggtgcgcctatgtgcctggaggctgttgagtgcctgccccagcctgctgctacccacgcagagcctgggctggcttcgctgggggcggcgtggctggccctgagccccgtggctgcagctctgtaacggggagcccgctggctgcttgtgttagctgcggctgctgggcctggggggaagccctggggcgtgtaacaacaatggctggcggtgtgcaccatgcgctgcccatggaccatcccaagcaggagacgctcagacacgcggcacgcttcatcccctgttccaggcacaggccatgccaagactgatccactgatacacaagttacaacgacgtgatccctttcttgccagcaagggtccagaagacctttccatcgacctatcacatgcacctggcacatacccaggctaggtggagcgttgaaccccttgttgcgcacgggcattgacgattcaccgctacgtcgatcattacacgaaaacggcgtggccccagtcactggacggggcccaaggcacacgcacgaacacagctcgaccgaaccaaactcacagctgacatccctcgtggtcacaatcagttcaacctgacaccttcaacggacgcttacaccttggtaggtccgaagggaccaagacacaccattgagaacacagagctcacatcaccacttaccattagctcccggacccaattgcaaaggcgactgtctgaaccagacgccaccggtgacacaaaggcccgcgcctcacaccggcggcttcactggtgtcaacacacaacgactactgggctttcgattgcatcatcacnggaacaacagcgcacggcacccnaccacaccggctgctcactgcggtggcgcacactgcccgcccacgtggccgccgcgacaggcacaactgcaccagactgggcaggcacacacaaagccgcagggacaacaaaacatgaacaaggctgaccgcccagcactaaccagcaacacccaagggatgacacgcaagcgacggcacaccacgaagaggaaacagggcgccacccttgacacacaccacatgcaccgccggaacgcgcacacaccccggacacgaccacaataaaacgagacagagcaccacaacaccacgaaggcgacaggcgctaagtacgcacacacacaagcgcacaccaaatcaggacgacacacaggacactaaccgtagcggcacataacacagcgaagcaaccgggacgcatccgctacgacaagagccccacagaggacccaacagaaccaacaatcagagccgcgccgacagcacacgacgcgcagccaccacctcgaacgacacccacgacgaaaggcgggacaaacagacacacacagctccgaaaacaaaacaaggcacgcaacgaaatagatcacaccaatcctattgttcgctctgccccaggctcaacacaacacagcaccaagcagctgaccaagctactggctcaacgcccaagtaagcggcaagcaaccggaaacacgtggcacacagcacgaggccgacccactacagaagccgacagcacaccaact

SEQ ID NO: 682576 - DNA, 128 bp, Homo sapiens
ctgctattcatctgaatgtcgcatcgtctgtttctcactaggggccgcctctgctcatctcactagtatcatttgtaggaacctccatgccttgtggttccgattttttctcagataaaatgaagtgt

SEQ ID NO: 682577 - DNA, 294 bp, Homo sapiens
tccactagtgtaggcatgtactctcagctactagggaggctgaggtgggagaaccactggaacccagacaatcaaggctgcaatgagctatgactgcaccattgcacaccagcccggtcaacaaaataagaccctctctctcagaaaaaaaagaaaataaactgattatctgagttccgcacactgctctagcaaagtattaaacccaagaagacagatacgggaacccccgattggcaacagggtgctcaaaagtatggcgacaacttatgacttgccattggcatctgaagt

SEQ ID NO: 682578 - DNA, 513 bp, Homo sapiens
  misc_feature (11)..(11): n is a, c, g, or t
  misc_feature (128)..(128): n is a, c, g, or t
  misc_feature (389)..(389): n is a, c, g, or t
aaacccccttncgggggcagtttccttccttttcaaccaaggaatgcttcgagcacccacagggccaggacgtctttgactcaattcttgcttgctgctgcgggagctggatgcagaggggtggaagnccgtgcagcagactgtgggcagccggctgcaggccctgcgtggggaagaggtgcaggagcacgccgagtgaccgcaggacctgaacgccgctccagcctccacggggaccccagtgtcttccccagcccccgggagctggagggtggctgccatggccgcagcccccggccccacacaacgccctcccggctttcccaaatcgttccaggacaggagtaggtattagagcctgtatatggggagagggagacactcctgtnagctccatagcagtaaccaggactggctctttgaggtccgcaggttttagtttgggttaggatgcaaaagggaggattttggagtctaccctccggaataaacaatttttccaaggttaaaaaa

SEQ ID NO: 682579 - DNA, 516 bp, Homo sapiens
ctgggtttttccttccatttattcttcttctaggtttgacaatttatgatagatttgctctctagaaagaaacgtctttatttaggagggcaaaaattttggtcatagcattcacttttgctattcccaatctacactggaaagatacataaaaagtgctttgcattgaattttgggatacttcaaaaattccattggtggtgttaagggatagtattaagcctttcaggttccggaaaattaaaaaaatttcctttttgaaatgattccctctttggaagaaaaaaagccagccttttagccccaccaaattgaattatggaaaaccaaaatgggtcccttccatgggcaggtcctgtccccccccgccagtcctccacaccccaactggttttgaatggcctttaaccttttggtggttttttttttttttccaacccctggatttggaggcttttctgtgatttttaaaaggaaacttcctgaaggtggttaataaagtttttttcccaaaaa

SEQ ID NO: 682580 - DNA, 1058 bp, Homo sapiens
gaccggacggagggccggcgaggtgcggggtctggtgatgcgagctgacgcctctcggcaagatttcgcgctgcccatcccgggccctttcatcagtaatcggtagtggatcactctgccaagcggcaggaagaattaaggaaacgacaaggagacgctcggctctctcccgcttggctccttgcggcctcctcttcccttcgctccggcccggctgaaactgacacttataatcgtcactggacttgtacagtacccgaggcgaagcagagctcgctgagccctgatttctcttgacgtgtcttcgttccgggcgcagctctcgtgacgcttgaacacgtactctcctgctgggcttcctggcgccgccaccccgttccgggggagccgccactttgcctttcctgctctcccctagctagctagcgtgcctctctccgcgctgctccggccagccggcacctagaggcttggggaccttggcactcgccatcctgcactttacatgcaccccttacagctctgcgcaactaacgcctctcgcgcctcacccgaccgcgctctccggctcaccagcatactcacagaccacagaccttggacgcccttaccactatccacactaacgcggccaccctccaccgcctccagcttgctcgcatctacccgcacgacccctcctcgcctcccttccccgcactccccctcccactagccacacaccggcccgcccccccacccccaccccgccacctcgcctctcgcacacccttccccaccctggcacacccccgccacttcactcgcccccccccccgcacacccaccaacgcacacccttccaccacccgccccctcaccccccgccaccgaaccacgacgccccccactcccgacaaccccggcggctccgccccccccaacaccccaccccctcggccccctcccccaactactgcccccctcccgcccgccacgcgccccaccccgccccccgcccacccaccacccccccccgacccccccctcccatcgccccacacccgcaccgccacccc

SEQ ID NO: 682581 - DNA, 291 bp, Homo sapiens
  misc_feature (35)..(36): n is a, c, g, or t
  misc_feature (58)..(58): n is a, c, g, or t
  misc_feature (63)..(63): n is a, c, g, or t
  misc_feature (65)..(65): n is a, c, g, or t
  misc_feature (108)..(108): n is a, c, g, or t
  misc_feature (127)..(127): n is a, c, g, or t
ggttccgagctcgaaatacagttagctcctgctcnnattgtcacccgtgttaaatttntttcncnaaacttagcaaatggagattaccaccctaatagccttaacctnggagactctagcaaaggancgtgctgtggattttaacatctaaacaattccttgggatggatggccgtggaggtggcagatccctggaatcacgcagcagtaggcagcccagagagaggcctgggcatccctcactgccccaagttcctgcatccgtctcctgcagctgcgtttcacttccga

SEQ ID NO: 682582 - DNA, 149 bp, Homo sapiens
  misc_feature (2)..(2): n is a, c, g, or t
  misc_feature (4)..(4): n is a, c, g, or t
  misc_feature (19)..(19): n is a, c, g, or t
tncntttcaataaattttnatttaatatccagtccagggcatactccggtttctccagttgttccagaaatgtgtttttacagctggttcatcaaaccagggtccagtctagatcttcacgttgcatctggttatgaagagaattatat

SEQ ID NO: 682583 - DNA, 524 bp, Homo sapiens
  misc_feature (7)..(7): n is a, c, g, or t
  misc_feature (22)..(22): n is a, c, g, or t
  misc_feature (34)..(34): n is a, c, g, or t
  misc_feature (175)..(175): n is a, c, g, or t
  misc_feature (178)..(178): n is a, c, g, or t
  misc_feature (187)..(187): n is a, c, g, or t
  misc_feature (194)..(194): n is a, c, g, or t
  misc_feature (215)..(215): n is a, c, g, or t
  misc_feature (246)..(246): n is a, c, g, or t
  misc_feature (293)..(293): n is a, c, g, or t
  misc_feature (308)..(308): n is a, c, g, or t
ataaaantgtgtcgtgcaaggnaagttggcccgntgcctgaaaaaatccaaagccctaaaaaattgtcccctttgtctgttggtccggcccaagatcccagaccacctcctcgtcccactcactgaccgccttctcccccggcccagggcaccctaaatctactttgactacganaantggggccancggaaanaaggaaggcttcacctttgantaccgctaccctggaggaccgggacctccantgaaaccggcccctccctctacccacccccttcccccgcatgctganccccctgcccaggtngagccctgccctggaagactggagggagccccaagccacggggcatccccctctcccaggaatcagggagggggccgggaggttttcctttcaacccaccctgggggcccggggcgagggctgccccctcctcccctccccagtgagggacattttttggtaaacctattttcattttggaaaatatttatgaataaatagttttatatgaaaaaa

SEQ ID NO: 682584 - DNA, 524 bp, Homo sapiens
cttagtagagggccggagtcttgctccatcacccaggctggagtgcagtggtaccatcacagctcattgccatctcaacctcctgcgctcaagcaatcctcctgcctcagtctcctgagtagctaggaccacaggcacacaccggctaacgttttaactttttgtagagatgtggtcttgctgtgttccccaggctggtctcaaactccctggctcaagggctctttccgcctcggcctcccattacaagcatgagccaccgcacctggcctcatttattgcttttatacttttaacaataagagatactatgattcatatctttaaacttatgcaagtcataatgtgaaataaaatcagtgtaagttcatcagccattttaatgtgctatgagaagtttagacttctaaatttggaagagaagtcttttaaaattggaaggccaatgttctatttatgaccagattcaaattccattcttacattcctctgtaatatggcatggcaataaatagttttgctca

SEQ ID NO: 682585 - DNA, 306 bp, Homo sapiens
caatatcacacaactactctgagcttcaggtagacattcaaaactaggaggatctccttttcaaaagcctttacatgattcagaaatgctaaacagggtaacaagaaagaaatcttagcatatgtcgtattaagtacatgtagacctcttaaaaataaacagatgagcatgtagtagttctctagatctgaatgtgcaacacaaaaaaaacttcgtcagatatttctaggttttaggtttaaacttgcagcccagcacaaatacattagtaaatatgaggtacttccatcagtaaattgcaaaaac

SEQ ID NO: 682586 - DNA, 416 bp, Homo sapiens
ggaagatcgagaagaaggaggaaagaaggccgtgtaagacgattaagaaggaagaaaaagaccaggatgagctggaaaccgcgggacctgacatagatcgtggtcttaggagtcaccaaagatctaggcaagcaggaggaatggagcggtacggtctgtgatgggataacatcgagagaggagagtcccgtcgatttagcgtggataaagccactaagcaggtccataagagagaagctccaacgagtcagggactcgcaaggtcacggaaagcaagagacatgagagagacatctcgtcgtttgataataatcataacgaagaaagggagagagagcgccagaggcgagcgggaacgggagatccgcgaaacggagaggcgggggagcgcgagcagcgggagcggggagcaacgc

SEQ ID NO: 682587 - DNA, 542 bp, Homo sapiens
cgctttaagtaatggcttgctgcctaaaagtttccggtctccatttccatcttaggccagtctcagtgattgtaggtgctgtgctatcttattcagtctggcttttctacttcccactgcagtttcaaggaatcccaggtgatagagtgttcatttagaaggaaaaataatgagcaaaaatgtattgagtatctaccatgtgttagtcattgtgttaatcattgcaaacataaatatccattttacagatgggaaaaataaaactcatgcacattaagctctttgcctaaagtcagacaatccgtaagtggtgaaagtataattctacacctccgccatcgatcaccctcaaacaagtcagttcccggttggtccccacccccctgtgagtggccgccaccgacctgcatgtgagcccggctcgcagaaggtagcagcctgtgcccggcagagctgaggctccatgtgagccgcgcgggaggcgcagagtcgtctgcaccggacggaaggttgcaccggtggcgggcgcgtgcagcggccgc

SEQ ID NO: 682588 - DNA, 503 bp, Homo sapiens
cgctttaagtaatggcttgctgcctaaaagtttccggtctccatttccatcttaggccagtctcagtgattgtaggtgctgtgctatcttattcagtctggcttttctacttcccactgcagtttcaaggaatcccaggtgatagagtgttcatttagaaggaaaaataatgagcaaaaatgtattgagtatctaccatgtgttagtcattgtgttaatcattgcaaacataaatatccattttacagatgggaaaaataaaactcatgcacattaagctctttgcctaaagtcagacaatccgtaagtggtgaaagtataattcaaagccatggctgcttgactccaaaagctgtgccccttcaatttcatcaatgctatattgtgattaaacaaccggatattgattatggaacaagcagaaatgtccattatctcctctactatttaatattgtcagataaattagctaaaatggtaaagtcctaaaaagcaaatagagg

SEQ ID NO: 682589 - DNA, 230 bp, Homo sapiens
tcaaatcgggtcagaagcacacagatgtgtgcctttttgtcttcttgtttcccctctttagagagacagtctcactctgtcacctagtctggaatgcagcgatcatagctcactgcagctttgaacttctaggctcaagcaatccttctgcttcagcctcccgagtagctgggactataggcatgtgccaccacacctgggctaattttaaaaagttgtttatagagtag

SEQ ID NO: 682590 - DNA, 390 bp, Homo sapiens
agaggatcccccggcgtttcaaagcacactggacgctcctagctcagactacgagcaggtgctggagaacttgaatctaagaggttccagcgtggtggattcaaggtctcaagggcggttcctgggcactgaggccggagctgtatgcggtaggactggattcgggccatatccgtggtgacgataaaatgcctatcatggacttcctgactgaggatggatctacgaaaagggccagaagagtctccgtgctctgttccagatcaaaaaggtggatctatcggagtcctttattggcatggtcgccaggaaagtcaccgcctgccacgtggccttggctgcctacctctgcggcaagcctgatgtggccgtgcacaatggcacgtggat

SEQ ID NO: 682591 - DNA, 243 bp, Homo sapiens
gggccttacctacccggttccagtgatatttcttgccctgttccccctggccatgtgcagtggggccagctcagagtacgccttgtagagcggggatgaggccgtcatctgcgaggcctatcccgcctatcccaggcatcccagacgaggactggctgaggctaggcgctctcattatccatcctgccccgggaggtcggcgcgcggaagacagagaaaagcaaacgcgttctctctccatct

SEQ ID NO: 682592 - DNA, 368 bp, Homo sapiens
  misc_feature (368)..(368): n is a, c, g, or t
gaaagatgcaaaggaatatgctaatcaatatatgagggagtattccactaattacggacaagctcgtctgtcactgtgagtcatgttacacctagagttatctttctatggtaggggcctgctgtacctctgctagcccaactgtatgctttatgagagagagactccagcttagacatttatcactgctcaccactctgtcaaatagagtatgctcacaatatgctgcttatggggagaagaaatcatggctcagcaatctcataaagttagcccataacatcctctgcaagatgctgtgagtctgactctgaagattgcatggcctgagagctgtctgaacacacagtgactctgtgacttttgcn

SEQ ID NO: 682593 - DNA, 227 bp, Homo sapiens
ggcacgccgcgatccttcgcgaagcccacggcgcgcagcgtcgcctccggcagtggctctccggggccgccgcgcatcaggtacgcggagatgactagcgccgcggcggagtcgaacaccgacggagggacgctctcggggcgcaggtggttcatcttgcccgcgctgatggcgaacgtgcgctctccgtcgggagtgatgagcgcgaagcagcggccgatcggccc

SEQ ID NO: 682594 - DNA, 878 bp, Homo sapiens
gatcatttgaggccaggagtttgacaccaacctggccaacacggtgaaacctcatctccactaaaaatacaacaaattggctgggtgtggtggcgcatacctgtaatcccagctactcagaaggctgaggcacgagaatcacttgagcctgggaggcataggttgcaatgagtcaagatcgcgccactgcactccagcctgggagacagagcaagactgtctcaaaaaaaaaaaaaaagttatttcactagcaacatattaatttcccattaaaacaacaaggagggttttacaattgaactacacattgcaaaattacacctagaaaagctagatatttttaaaaaccgtggctgaacttactcgggtaaagccaaaatacttgtcacatccataacgttactatttcccccaatggcactctatttcggtaacattgctggttccacattattgacggttcggtacaaaaaggcaaacatcatactgttctacacacatgggcgtacattaacaggatgtcctacacaattattagcccagaaggtctatggtgttaaccctggtattcgccacaaggacgtcgatggcgcacatttctcaattctcacaactggtttcccaacaatacttctcagaactggagaactaaaatcttaccaattggtacacaattggcccaccaaaagaccggctggcgacacacaccgagaacaacgggttatctaacaaagggcctcgcgtctatactgcatttaagagattacccccattttaaacaaacaaccagtcaacacgcagaatactacgcacaccacgaaagacaacaggggggggccgcgccgcccccacaaacgaatactccccccccacaaagg

SEQ ID NO: 682595 - DNA, 144 bp, Homo sapiens
cgagctcggcccccttcttcgaagaacaacggcatctaagcgttagtgctaacatggactgtgatacatgataataccaacgttagctcatgatagtccagacgagctcgattgaacgaagcccaggcagacgacggtggccca

SEQ ID NO: 682596 - DNA, 171 bp, Homo sapiens
  misc_feature (1)..(1): n is a, c, g, or t
  misc_feature (5)..(5): n is a, c, g, or t
naggntaccttacatgcatattttgtgtagtggtgaagtttgggcttgtactctctacatacatttaattaatttatttattaaatatatgtagagagtacaagtgcaggtaccttacatgcacttgtactctctacatatatttaataaataaattaattaaatgtttta

SEQ ID NO: 682597 - DNA, 84 bp, Homo sapiens
gcggccgcctactactactactgctcgaattcaagcttctaacgatgtacggggacatgaaatgtgaataaatgaaaagtaagc

SEQ ID NO: 682598 - DNA, 376 bp, Homo sapiens
aaaaaaaatttttttgccttggggtccggttgatttatgcccttccccccaatcctggggtttttgaaaaatggggggggtccccccagggttaaatggattaaggggggggcaaaatgtgcttttttaaacaaaaggttagagggaggaggccccttaagggttttcccccctccctttttttaaggccccggggaccccaaccctggggagggccgcggggtcttttgcctaggaaaaccaaagccctttgttcctttgtttttttggggcccttcccccccaaattgtcttatggcccggccaaatccccctttgggggaaaccccccagaatggtccataaaaaaattaattaattaattaattaaaaagga

SEQ ID NO: 682599 - DNA, 433 bp, Homo sapiens
cccctcgaactcgacggtttctcacctttgactgccccttacagtcacctggggagcttcacctggtctgacatcatcagtctggctgtggtctgggcctccctgccccgttaattttgcactgtgcagccaggattaggaatatggccatggactgggcgcggtggctcacgtctataatcccagcactttgggaggccgaggcgggcagatcacaaggtcaagagatcgagaccatccctgaccaacatggagaaaccctgtctctactaaaaacacaaaattagccgggcgtggtggtgcatgcctgtaatcccagctactcgggaggctgaggcaggaggatcgcttgaacccaggcggtggaggttgcggtgagccgagatcacaccattgcactccagcctgggaaacgagagtgaaactctgtctc

SEQ ID NO: 682600 - DNA, 1062 bp, Homo sapiens
ccggtgttctcctaggtttggtcgggtactgggcacgtgtcccctgttgcccgttgtttgaagcctgcttggcttctccttccttcgggtattggggtggctcaacccttgtgtttgccaggtcaatcgtttaccctccgggggagtttaatattctgtgtcctgttttactgtctacccatgagagctttagagtcgaagctccttcctcggggacaattttgggctgtcaatgtcaatgaatcatgtcttatcacggatgtttcgtcgtggcaaacgttagctggtgacagcacatgatgatcccaccaatggaaccagctggcttctactgctcaggtgtggatgttatgcctgaaccatccaggccaaatacagcgcacggctaatgcaccctagtattaggatctgctcacgacggctcaacatttggcagtgcatacgttgtgctgagactgaagcgataatagatttgattcggccgtttctggtataagatacgctggaagacttggccctataatttcttgcaagctctggtgatagctgccaattgttagatactgcgttccatcgggcaagcccatgatgtgtttgagagcattctcagaactatccgaccttatggcgtcgtctttagtctgcttcagtggatactcgagatcagacagttgccggtgggtgtcatcaaagcagtggacaagaaggcttgctggagctggcaaggtcaccaagtgctgccctagaaagctcagaaggctaaatgaatattatcccttatacctgccaccccactcttaatctagctcggtaggaagtagacggtcatcaagaacctgtgtgtgtattcacatgtgcgccgattatcaagctcttagttgagcttagagaagacatggtgtaatcgatgaagctactgctatcgttgaaaccttcagataggataaggagaactgttattgtggaccactatggttttcattattttgcgtgtggcagttttaagttacttagtttttacaaaatcaagtactcttttcaactggaaacaacctgaccgga

SEQ ID NO: 682601 - DNA, 1029 bp, Homo sapiens
  misc_feature (4)..(4): n is a, c, g, or t
  misc_feature (767)..(767): n is a, c, g, or t
taangagcatgggaattttatttaactctaggtaccagggattggacatcagtaggaaagactaatgaataagcagccatacaacttttggggtcacgtgggcttcccaagcaccaaaaaagggagctattttctccaattcagtttcatctttaataagctagacagatccgtggctgcattctttgggtttcatagtttataccagttacattcatttagtgtagttatacgtggcagtggtggtggagcaagctcattagtggtagttaccaagtttatacattcactcaataggacctacaacagtggcacatttcttactcttaagtggtagccctcaaagccaacgaggaaatacagagaagaacagcgggtctagtggggtgggagaactgggccctctgtggacaagagtctagtgaatcaccactaaactttatgagggttctagacaaaatccttatctaaggggaggtaacctaaagaggcgggttccttccaagtgggcttattgagaaactatcactatggctatggcaccaaggtggctcagtggctagaagaaatgcaagcgcggaaagaaagccgcgtgtggcatgcgaggcacagcagggggacaattagacgagtgggatgatgccggggtatcggggcagttctcaggtttccacagtaagtctcgtggtcgtggtgagaagagcgctgcggggcaacactttggtgcctcatgatcggcgaagtcggatacgacattctagaaaagncaaatcctgtacttcctgggtgtagacattcagatcccatagagcccataccggaccatggactcccatcggaacccggagcactctccattgggaagacggcctcggttaaaactggggcaaagttccagacttacgaaatttctcagcggagccaactcaagggcgatacaggcgcagaacagaactcccggctccaagggtccaacgccgggcaaacgttgacgtccccatgcacgggcatacccgggacgaggcaaaa

SEQ ID NO: 682602 - DNA, 303 bp, Homo sapiens
ctccattagtcagagagattgaacatggtgtaactgtagagagcctgtcatcctggtgggtgcacttgctgaaagatccgctgaagagcaaccttcgtgaacattggcgggggactggtgctcctataaaacgcactgttttcgtcactgcgaggtgggtctctcaccgcgatggactggctgtgatgacaggggacttcttcgctgggcggtccctgtcacactgatggtgtgagtatgtagggcaggggtgggagtgggcgatgttagtgtgttttgaataaacgtgattttgaagtagaa

SEQ ID NO: 682603 - DNA, 140 bp, Homo sapiens
tgaggaggtagttgtggcataaaaatgattaaggatactagtactaagagatcaggtcgtcctttaatgttgtgcactatgtatatatggtgggatccgtctagtatgtcgaactgcatggctatgcaagtgttggtaca

SEQ ID NO: 682604 - DNA, 1433 bp, Homo sapiens
gctccagagggttctgccggttcccccagtctctggataccacggtactgcatcgcgtacaccatgtatgcgagcctatcgtcccattgctcgtgctcagccattatacatcaaatgctgttgcaatcctggtgataccatacagtacacatcgtggaaacatcctagagtgtcttgcccatgactattgcaagatatcatcctgagcatgatttggtgacctcaaggtccatgatgataggatgctatgcggaccctactgggaggccattttgtgcattgaaccagattgtatgagctaatagacctatttctatcatagaaggcatacagtgatctcaggcgatactcaagctggctcaaagctccaattgaatccgtaacattcaagcccgggaacccatcgccttgcataaaacgtgcttgggaacatataggagcaagagccaaattacaagtgtaaactttaattccacttctcgtaaagaggtgaccaagttcgcatggcccttcgctatcgattcagaataacagggatttgcccgtttgggacgccacctggacataaatttgccagcgccctaataacgatggtcggcgaaagaagtcgagagatcgcaatataactccggagacagaagcggatattatcggggaggatgcacattagttaggatatcgacgcggtaagacgctccattatacgcaggaaaacagccattacaccgattaggttcgccaaaaggatcttgaagcaacctattaccgtgtttgtaaacccccgattgcataatcaattgtcaatagtccacttgtaaacacggcagcttctaagagtctcacataacagggttcgttacactccgtttcaacgtttagacgccatacattgagcgctacactcccacaagttcagttgcgtttggagtctcccacgctacgttttgttatgagcgacgttctagaacccactatgcaaactcgtagggtcctcctcgttgacgcaaatttgccattggatacacagagcgcaaattgcgcccctaactaaggcgccattttgcccaccgcgacaaggaaacatactgggggattcgcggaggcgacaatactgagaaacgccataactgttggcatgacactttcccgacataaagaacacatattaaattctgattccacccacgccaacttagttttggtgaagataacggcttagaaagctataagcacctattcgtcgtgcatgtctgtgccccaacagatcacaagtccatgacaaacaacaaggaaactatccacacaataggaatgacattcacttagtgggccgcagcatggagaacaggtctacaatgttagcaaagcgtatattaagcacacgcatgtaggtgacaattagaatggcagagacactcacaagttagcgcaga

SEQ ID NO: 682605 - DNA, 178 bp, Homo sapiens
aattatgtcgacagcgatttctaggatagtcagtagaggtagaattgtgaagatgatatgtgtagagggaaggttattgtatgatattgctagagaggcgcttccaattaggcgcatgagtaggtggcctgcagtaatgttagcgattagtcgtacggccagggctattggttgaatg

SEQ ID NO: 682606 - DNA, 721 bp, Homo sapiens
caacattctgaaggatttctttgaagaattttaacaataaatgaacatggttttaccagtacatcctgaagacaaagtacaatcaaatcactggctaccaagagttggaagtgagagcagaagcagactgatcaagaacaaaggtcatggcaacactttttttgggatacgcaaggcattttgctcgttgacttttgggagggccaatgaatgccaacatctgcttattgtaagagtattttaagaaagttagctaaagcttgagcagaaaaatgcctaggaaagcttcaccagagagtccttctccaccatgatagtgctcttgctcattcttctcatcaaacaaggtcaattttgggatagttttgatgcacatttattaggcatccaccctacagtcctgatttggctccttctgacctttttatttcttaatcttaaaacgtctataaagcgtatccatttttcttcagttaaaaatgtaaaaaagactgcattgacatggttaatgcaggaccctcagttctttaaggatggactaaatatgtgttattattgcctacaggtgtcttgaccttgatggagcttatgttgagaaataaagtttatactttctattttcatctaattccattttttccacaaactttttggagtccccttgtattaccagaatactgtgaattggctttcaatattggcctaaatattatcccaattt

SEQ ID NO: 682607 - DNA, 1259 bp, Homo sapiens
gctgagcgtctatgtgcagggcgaggacgggccgggatcccagcccggcacccaccctcacccagatgcgcagcgtagctgccgggagaccgctgaggcccggcggacggacacgatagcaagcgccggagagaacgaggcaggacgacgcagcgagcggcagcaacgggagggggacagagaggacaggacggaggccaagcagaagagacaacgggaggacgagacaacgccgagagccacacaacggcagagaaagagggagagcgcgcaggaggagaggaagggaaggggagaaaggaagaagacgaggaaagaggaagagaatgagggccaagaggagaggaagaagcacgagcgagcagcgagggagaaggaggcagagaggggagagggggaatgccggcaagagggagggacgcgacggagggagagggcgagagggacagaaacgagagacgcgagcacgaggcgaggcgaccgaggcagcgagtcagagagggagaggagcgaggcgggacagaagggaggcgaggaagcgaacgacggcagaaggcgagacgagagggaggaagagggagagggacgaaagagaaggccggaggagagagcggagaggaagaagggaacgagaggacgacgagacggagggaggggaggagacgcgagggaagagagaaagggagaaacaccgcaggaacgagacacgcggagagagcaacagcagaggagagaaagagggagcgagaagagggaggaaaacgaaagacaggacgacgaagcaggacgagagcagagcgagggcgccgagaggcgagcgacgacacgaggcgggaggcgacgacagagaagcgggagcgaggagagaggaggagaggaaggggagaacagaaacgagagacaagaaacgagacgaacaaccgcgacaaggagcgggagacaaggctcaaggagagaggagagaagaagaagcaagacaagcaagccggagagagagccggacacgggagggcagcaacgagcggagagagacagacgacgcaaacagggacacagaagaagacaacaggacaacgaacagacaagcgtcagaaagatcggaaagagacaaagcagacacagagacgtacagcacgagagcaggaacggcagagcgcgaggacccgagagacggcacaggagccagacgagagagagaagagagagaagagaaagaggagaacggagcacagaggagaaaagacgaagcgaggagagcg

SEQ ID NO: 682608 - DNA, 349 bp, Homo sapiens
  misc_feature (349)..(349): n is a, c, g, or t
cccacacccaccgcccaccatgtgtcagacttccaaagtgctgggtctacatatttgggaggctgaggttgtgggatcacttgagcccaggagttcaagaccagcctgggcaagtttgagagaccctgtctgtgttagttcattctcatggtgctatgaagaaatacccgagactgagtaatttgtaaaggaggtttaattgatgcacagttccacatggctgagaaggcctgaggaaacttataatcatggtggaaggcacctcttcacagggtggcaggagagagaatgagtggcaagcgggggaagccctttatctggccctgtgattcagatatcttccctggtn

SEQ ID NO: 682609 - DNA, 109 bp, Homo sapiens
ggatttgctggtgcagtacaactaggcttaatagggacatgcgaaggagggcctcctttgtcttgagcatctgaccctggagcctctcaagcctgcactgctgcaaaaa

SEQ ID NO: 682610 - DNA, 1136 bp, Homo sapiens
  misc_feature (744)..(744): n is a, c, g, or t
ttgactattctctacaacagcactagatagaacgattggaacactgatacctattattcggcgcatgagctgtagtgcgtagtgcaccatgctcataatgcctctcttattctgagccgagctgtgggcccaggctcaggcaaccattctaggctcaacgagcactatctactaacgataatctgtcacgagcgccatgcaatatgtaataatctacttcatagtaatacaccatgcataatacgagagggcttctgagcaaaacatgactaaggttaccactctgaagtacatccggagtccacctcgactagtgagacgatttaccctctgctagttacaacaagcgattgaagactctctgaaactctaacctgcccatctcatccctaactcactgacgcgactattctagctcatcagcttggggagtgcccgtgtagccagggaaagcaagtgtttgaaaacgagtcctagacactctcgctttcaggcgaggcggcaaactaaagtgccacaacggcacttgggagtcccatcacgttaggacgcctaaaaacccaactccgtgtcgatactcagttagaacatacccgttaagcagagaggtttgcatcactacacctgtgcgatgaattcacttgtccaagttagagaggcacgacttgcaaacagcgtttcttcgaattggcgagccagaaccaagaacttttccatgctgaaactgagcgtatcaactagacncaccacgcgcctttggtcacaatcaaagctcacctacagataactacaagacaagtcgagccctccgccattgccttatacagggtcgcctctggaacatcgcacagggatgcgacgtaaaaactaccactagctaggagtgaagtataagcagttgaaccaatgccagtgcgcgaaagtaaattacatcgcgcacgcaagtatccccgtactaggtccatttggcgtgtggggcggattcttacagcaactaacactaggcattaagcagtaaacaatcgaggtagaagcacggcgatcaacgccctactactagaactagagcccaaaccagtttcatacagtatagtcgaaatccacccacgagcatctaggggagagaggaacatgag

SEQ ID NO: 682611 - DNA, 485 bp, Homo sapiens
agccttaccttactgccaaaatatgccgtgtcccagctacaggaggagcgggcctcacccttctgatttaagggctgcggggaaggggtcctgcccgggcagccttctcatccactccgtgaggacttccccgccacgagggccaggtggcgcggccttggcagtggacagattaacaggactcccccgccacgagggccaggcagcgtggccttggcagtggacggattaaagggctccccagcccgcgtgggttatggggctttttctatgcccgtcgatctggcagcgaacgccaggtgcccgtagacccaccaaacccccctgcagttggtttgtaccccagctccttttgccttgtagcagatcaccccataatttagtggcttaaagtgactgtttcattttgttcacaatcttgtgggtcaggaactcgggaaggcggatgctgtcctgtgtggcggcccccatcacaaggctcacag

SEQ ID NO: 682612 - DNA, 528 bp, Homo sapiens
  misc_feature (472)..(472): n is a, c, g, or t
  misc_feature (478)..(478): n is a, c, g, or t
  misc_feature (492)..(492): n is a, c, g, or t
agcgcttgatgcaagctcaagttggtccacctgacggcggcacccgtcagtgtggagcagatctcgctgcaaggttttggtctgccttttaccaataccttgagccattcgcctgcgtcgtatgacttgcgtaccaaatacgctcacgtattcgattctgctggcttctatcaaaatagtgttcgcgaaacaatcctggcggtcagggcatacgcgcagtctgagtcccgcacgattaaacctgaaacagggttgaaggcatgaggttggctatatccaacattgcgtgggacatatgcgaggatgaggccgtcgctgccttgctttcagcagttctcggtggatgcggttagatattgcccctggaaagtattttcctgaacttaccaaagcgacaggggaagatatcgctcaagtccaagcttggttgggctgagcgaggagtcgaaatcaccggtatgcagccgctgtngtttgntacgaaggggctgnatatctttggtagtgctcggaggaagttattggcat

SEQ ID NO: 682613 - DNA, 801 bp, Homo sapiens
tccccagacgcccctcattgaggtggccgcccttctaaataaagcgtgggggccgccccccctctctttccagaagatgtctcgaacaacatttgttgtccaaagccccccctctctctggcgacaatataattcaagtatgcctcaatatatggcggaccccgcccccccccccaacctctgtcctaaattagcgcctttcgggtcgcctcaacaagagactgtttccctacccagataaataatggtcgtgaggatagatatagttacagagccgcacgcgcgatcaagtcttatacgtgatatgagtaaaccccacattacggacctccctctctttgctggttctgaaactttacaacacacaaagaggatattctcttttcggggcgggccccgcacactattctcacagagagcccccggcggttattatccccccccgcccgacactgtgtgcggcgttcttcatatggtgaaccctctttactgagtgactcttatagaagagcaaagaaaatcttcaggtgtttatgtcaaacacccgccgtataccacgatgtcctgtgctacacgagagtatatgtttctcgaagcacccaagaacctcgcccatgaacgatcccataatcaatacgtgcgcacaattttgtcatctccttcttatcgacccgcgcgaggattctttgttctctacttcgttgtcacgcggatatgttgtaagaaaaaacagttttacgccgtggcgccccggcaagcttctcgaaaaacaagaccttactaagggccccccacaaaaca

SEQ ID NO: 682614 - DNA, 256 bp, Homo sapiens
ggggttctggctctaccctattattcggcgcattacactgatagtataggtcatcagttctaagcacatacttttttcagtcgatctggggcaaccatgccatcttctatgtgatgatcacctctacaagcgtttctcgtcacagccccactgcggtttcgtaataatcttgcttcatagtaatacctcatcatacttttgtcaattgtccctggattattagtgagcttgagccccttttcctatagttctttgt

SEQ ID NO: 682615 - DNA, 100 bp, Homo sapiens
acaccccgaccacacactactaaagtagcctagctcaaaaattgtatacacttcttaccgttcattacctagtgtaccagaactgcatacccacgagcta

SEQ ID NO: 682616 - DNA, 406 bp, Homo sapiens
gtattgagttagacgagcaggacgcgctaccctggtcggaggagaatggaacccgataaccctagctgggtatggctggtcaggctcgggtctgtcaccctgagtgcacgcaagcttcctatctcctctggtccttactttttacagtgtttgaaagggaggaggccagaggccccgtcaaggccccgtccaggatggggggctacacccactagggttacgcatgtctgatggcaccaacctatgaagcggtctttccagagaagtggaaaacacaaacaggatcatgaagaagatgtcacgacaccactaacgcaaacctgaaaactcgcgtgaactaaacaatgaatgctggccgggtgcggtggctcatgcctgcaatcccagcactttggaaaacatggaa

SEQ ID NO: 682617 - DNA, 939 bp, Homo sapiens
  misc_feature (939)..(939): n is a, c, g, or t
gtgtgacgcgagcgcggcgctcccgatgcgctcgtgccgccccgccgtgctcctcggagccgttgctcggccggtttggtaggcccgggccgccgcaggttccgctggagcccgcacccgccattgacaactacgcagatctttcggataccgagctggaccaccttgcttgcgcggggtacaacatcccgcaacggccttggtgttaggatcacctcgtaggcttacgagaagaaagattcttcgagtacgaagacccagaagggcgggcgggttctcgccccccccagtttcgtcgcgggccctcctcttaataagcttcttcttgactggaatgcgaacttagagcgggatgccagcatattgtatgattcttctttcatttaaccactttcatgcaggctgaagaaggcaaccccctttctagaagcgaagccaatggaggggtctgggctccagagctcaggtcttcggggaaaggtccctgctgacttgcctcaaccagttgcgggttgcggcgtgcgcggccaggggcaggggctcatggtgtatggctgggggggcgctgggcttagcccagaagtagtgttgttcccctgctttgtcccaaccaggagggcagagactcagggcctccatggtcttctggtcattttgtggaaatgcatcctcctttgtcatctgttgggggggggggatcaccaaggcacctgattgttttgggaccacaataaaggccgttttttggaaaaacaaaacaaaaaaaaaatgtgtgggcggcgcgaaagtttaaacactgttggggggccatggagacgtgtctgtccagagtgttaagtgggtccaaaaacggggagggctacacgtgtggtggttcagcattcatttcgcggggggaggatgggcggtgggaggaaacgtgctgtgtatctcttgtgn

SEQ ID NO: 682618 - DNA, 590 bp, Homo sapiens
tcgagatggccggttggcttagtgtcacttcttcctagagccatgggagttttctgtcagcatgtttttgagctgtccgtggtaacttggacgggaagcagtctggaggtgggtgccttccaaatctctgccacagaatctgaacttgcactttgcagcctgttagtcagagctgctaagtttgctctacctggtgtgcctcttggcaccacctgagagatgtatgtagagaggctgctaagaaatgagtgcccctggcatgaagacgtcatatcccagatgtttaacttctggctggaaaaaaaaataaaagagcaaacaaaacaaacaaaaacaccacacaaaagggagggaacttaatttggttcattatctactgcgtacctttcctgtgcggaggggaggaccagtgactttccataatgagctttctcctttaaaaaaacttcagactcttacttactcttttggttcacactaattagcattcattttccagagaaagctgcttgactttgaggaaacaaagacaggtgtccttaaaaatggactggaaatctggatcagtgtcaggtctgctttagggtcca

SEQ ID NO: 682619 - DNA, 571 bp, Homo sapiens
agcgggagagggcgagcgagcgcgggttcccgggccggcccggcccctcccttcacatcgccggcctccgccgccgcctccgttccaccatccgtctcaccccccccaagttgaggcccccatccgggggggggaaggcccgggaccgggaacccgtagcgaatcatcctaaactcccgtcgaactctcactctcgccgcggcccgagtgtgaggagaaagggcccggaccggactgagacgagtggaaggaggaaccacggagacggacccaacgggccggtgttggggagcacttggtccgggctccgaccgtggctgtgctgaaaggaacaccgggggatccccgggtagtaatgacaccgaggaccggcaaagaggcagaaaccaggcaacaggggcaagcgggggtcccagtggaaaccgggaagcacggagccagaacgtgcagatgcaaagaggcaactgggtacgacaccgagaaggcaccagggactgaaccagccacagacacgtcacgaaccagaacggaacacgagaatgggcccccaacaacagccagagactgcaac

SEQ ID NO: 682620 - DNA, 511 bp, Homo sapiens
gcaggcatcttggggacccctcctaggagagctgcagtctcttccctcaggggaacatcccagaaatgcatatccgactcagactctcagccagtgcttcgacaactctcgacacacccccacataaggtggactacattaatgattatagtgttatcttccccttgggcagtcacaatgcatgcgcgcctagtaggcaacgctagaagcgtggtgcctttcgagcttattgggacacaggtcatgcgccataagagtatctccatttctatacacctctgagcaccgtatctcatcggaagagcatgtgtacattcgcgcgaaggctaaggcccgcgtatgcatttggtcacgtatgaggatgggagaccctgaagcgttcgtggccacccataccgcgttccctgaccacaagctctaggagaaccctaaggccctcaaaggtccttagtacgcccaacgcacctttctgtgtgacctatcccaagaagagcaggatgcccaagatttg

SEQ ID NO: 682621 - DNA, 394 bp, Homo sapiens
ctcgacgtcgcctagaacgtcgtgctggctctggccgagaccgggtgacagcagacaggagactccaggacatgctgctgagcaatgctgggagctccgatattacatcagccactaaggctggctggactcagaaacccaagagaagaggacaggccaaggaggttgtcaaagcccaaatactggcgaatggctgaacctaaattcatgcaccagcatgtgactctatcccctgactaacgacgccataacgtatcactaaggctcagcttcaggactgataaccaccacgacgctaaggagccagtgcttgacactgatgtcgaaatggcgcgatggcgcatgaccgagactctgggaatcaaatacctcaggccctgcatcttcaggttgc

SEQ ID NO: 682622 - DNA, 578 bp, Homo sapiens
tttccatgatgatgatgatgggacctcaatgtattttttatttcagtcactcctggataaataacaaattggagaaataaaaatatctaaaataaaaaaaaaaaaaaaaaaaaaaaaaaaaaaaaaaaaaaaaaaaaaaaaaaaaaaaaaaaaaaaaaaagggggggggggaaaaaaaccccgggggggcatggcccgtttttggaaaagggggcccccataaaggaggaggcgctggaatataaataagacgaaagggacgcgggggcgggcggttaaaaacacaggtgcgtggtggggggggaacaaacggagcgccgccgtggggggacaactcgtgtgggaagagggacccccccactactactcgggggggggggggggccaatattgtggggccacaaactcatcctcgatcgaagatagtattttaaagccctcagggagggaaaaattaacaaattttctaagggtggtaatgatgggtggtggtaaccaacagcggcgttaatgtgacggcgggcgcggaggaagaagatgtttgctacataggaggatatatattttaggaaacaagt

SEQ ID NO: 682623 - DNA, 398 bp, Homo sapiens
ccatgaacaactaggtagaattcggcagggaatccaccgggtcctggaacaaaaaacggcaggcaggcgaacaatcatacgcctcgataacagagcctgtcatatggtctattcagagatacacgttcttccaggttaagtcttgggagggtgtatgtgtccaggaatttatccatttcttctagattttctggtttatttgcgtagaggtgtttacagtattctctgatggtagtttgtatttctgtgggatcggtggtgatatcccctttatcattttttattgcgtctatttgattcttctctcttttcttctttattagtcttgctagtggtctatcaattttgttgatcttttcaaaaaaccagctcctggattcattgatttttttgaaggg

SEQ ID NO: 682624 - DNA, 266 bp, Homo sapiens
gcgttcatgggactgagctagcacctagccgtgcggccgtccatccactcatccatccattcacacccccacccatacacacgcccactcatccatctatccacacatctatccactcacccatccatccacacatccatccatccatccatctgtccgtccatccatccatccagccacccatccactcacccacttatccatccacccatccatccacttacccacccatctatgcactcatccaccgattcatcgaacccgcg

SEQ ID NO: 682625 - DNA, 360 bp, Homo sapiens
  misc_feature (13)..(13): n is a, c, g, or t
  misc_feature (33)..(33): n is a, c, g, or t
atcagtggctgcnagctctaggtcccggatcangatttctctactctcggcagtttactagttaagtatcaactttccatgtttgtaactataataatgtagataatgataaactgaactttaaagaaaaccctatatatttcactttttccaccaccttctctttgaaagtagtaatgaccatggcaacataaatttatttttccctaactacgtgaatcatctgacctttgatttgtcaatctttgtgactcctattaatgtatagtccaccttatatttgtttaaattaagttatcaaattccaaataagccattggttttaaaactacaaagtattatctttttgctaccaaaaac

SEQ ID NO: 682626 - DNA, 827 bp, Homo sapiens
tggccattcaaagaacaagtaaatagcataagccaaggctatgatatatcaattagaaatacaaaacaagagaatggaatggaaggagacatggaagggaggggccctctgctgtcttcaagaaagctgccaacctgggggtattcaggataaattcacaggttacaacctgagaagtaaaaagaaaaagaaaaaaaacataaggaataaaaattcatcagagttctctggaaatttttaaaatacccttggagcattactgcctgagtagcagatagtggccaaacactgaatcattcgtctagatgcctgggttgtggagttttaccagaagagagtgagacagaggaggcaacagagattcagaaggaacaggaacatgctcacagatggaaagaaagaatgtttccccgaattgaggaaagtcgtgcattagagcagattcacacacaagagtctataagggacaaaacgcagattcacggaaaccaaattgccaagcaacttaagaatacattctacaatcacaacgaacttcaaaaggttaagaacactatccacaaatcttatatagcgtgacaccgaccaaaaaagagaattcctaagtcatggaacaagccttcttactggtgacaaattagctcaaatagccacatcacaccttcagcagacaaatgaacttccaagaatctgaaactccttcagagtctgtcaatacttatgccccagagaactattattcaaatcgaggatgcacaaaaccaattatcatgcatacgcaacctacgaaaatacaattaaaagacaaagggacctaagaacaatca

SEQ ID NO: 682627 - DNA, 281 bp, Homo sapiens
tgtcagccggtacttccaggcttgagtgcaggcgtgagccatcttgtccctaagcttcacttctagctgtgtgaatcttgctgacatcattaaattctctgggccttaatttactgatagggttcttgtaagtattaaccattagctactattgagaggtgaagaccgctgggcttctgggtcgggtggggacccggagaaccactctgtctagctaaaggactgtaaatgcaccaatcagcactctgcgtccagctaaaggcctgcaatcaagcctggaa

SEQ ID NO: 682628 - DNA, 808 bp, Homo sapiens
ggcttacctagtatcaactgcattgccccttcatactccggtgactactctagagcaaatctaggccaaaatcgatatcacttgtacgatctggcatcggacgttgatctggctgtctcccctcatatcaactatcgtagggtcgcttatccggacattgctccgctgcaggtgtcattgcaggaactatcggccggtaggccattactgacacgcagagtagacatacgattaccatcatacatcgttgtgtagcttgccatgccatattattcgtacacagaccacgtccatcattcaatgactttacatgcatgagtagcacagcctttcggtttacgcaaggacgacacctaagtacctgagattacgtaacgtagatggataggcactactccattagatagcccctggtgaggttgtacccttcgttcttgtgccattggcccgctcgcgcaaacgcgctaaaccctaaacaaccatttccggacaagaataaggtccccgtgagttaacaattcccttatagttcttcatgacccacaaataaagaggggggaacgaggacagcatctggataatggcgcacactccataagttgccttcggtgtatttgcaacgactgtcgctaagagcctcccttattggggcccataccaactctgaaacttatgttttacgacaagaggttgatacttaacgcgccattcaaaagagggaaatctttgtcccccaaatatacgaaccccattagataggacaccattagggcacaaatcgaaacgttgtgcccgtgagcactttcgc

SEQ ID NO: 682629 - DNA, 1311 bp, Homo sapiens
  misc_feature (208)..(208): n is a, c, g, or t
  misc_feature (974)..(974): n is a, c, g, or t
  misc_feature (1310)..(1310): n is a, c, g, or t
cgctgccgttgcgaagcgctgtccgggagtcctgtgctttgctgtgccggtcggcagcaagaagccgccctagcttaagtgcccggcgggctccaaggagtccatgagtgcattacgttgttgtggactcttggacgcaagagacgagggtgacatactggatgcctactttggtagacggttgtgagcccacagagctcagctattncggggggcagagtcacagcgagaccggtcttgtcacttaaatgcaccatcacttacagtctagtgtggataggctccaggctccagtgccgtaggtcgccattcacggtcctgatacgcctcagcgggctacatgtcccctcttgagacggccatgcagcgaggtagtttctggtccggaacgacttgtccattgtgacgtatccgatcgtgccctactagcatggttaccttccgggcgagcgtgtggggccggcagcatccagctgggttgacagcgggtctgccgtaaaaaggagtatcgcgcggtcggctcctttttattcattcctaccttgcgttctatctacgtttcccgagagttgccccttgcattctatgtgcgcacaacattatgaactcttaccgtaccaggggccgcggcgcttctcggaagatgtgctgacaccttcggtcatgcgatacgtgctcgaagtacattacgccagtaccgttcgatagaccgcggctgcctagggagagaagcgcatactttgcgtagcaacacgggatatcgtccgcgcacggtgcgcatcatgccctttggtgccaagctatcgtcgacgaaagttgtgccctagcgtagctgggggtgctatcggccgggtgggtattgcgcctattttcactacaagtcgagccgtccttaaggacctcccccccggtagcttactttggagtggctcgagcaagtgctgcacaagcgtggcatccgtgcctcctggctnactcggcgcgctcggggctcttgctgcgatccagcctgtgccctgttggtaacctgtgttgctcgctgggagtccccggagggccgtttggtttcccattgcgcctggggaacgaccttgcggggcttctggggtcgttcttgtgccccgctaatctcctgagtgggggatcgtctggcttatcccgcgagcgagcatctcagggccgatcgcggggtgtcgcaaacggtccggcttgctgcatgatgtgttcgccgacctagcaccgcacggcggcgtggccgcccgcttgtgggtgcaaccgcgcgagacgagtgtgctttatttgtgtgctgnc

SEQ ID NO: 682630 - DNA, 220 bp, Homo sapiens
aaggacttggaatgtgtggtgtatgtctgcgagttcgggaactagacatacaatgcgatatgtaggtcgcacatatatacggtgtcaaattaggtaatataactcacataagtgaactattaatgttacaagacttttcaaccccaaaagatgctagggagggtattacaaatgaaagtttgtgtatgtcgtgcacatacacgaccataacaccacacaa

SEQ ID NO: 682631 - DNA, 400 bp, Homo sapiens
  misc_feature (253)..(253): n is a, c, g, or t
  misc_feature (276)..(276): n is a, c, g, or t
aacgcccagctgaggatgatcttcccatgaaagccaaaggataaaccatcgaggggctggctcagttcctcaagcaatataaggaagccatacatgatatgaatttcagcaatgaggacatgataagagaatttgacaacatggctagggtggaggataaaaggagaaaaagcaaacagaaattgggggcgtttttgtggatgctaagaaatttacaggaccccttctattctaggggtccaagggaattcangggtggctgcagggccccacganagtacactatatacattttttttgtctcttgtggctcccaagcatatgtcaagccatgtgttttatacctaatcgtattaataggatttattttaatcctttcgataccctattgcgttgtttt

SEQ ID NO: 682632 - DNA, 260 bp, Homo sapiens
gcggaggcgaacatcggcgttcccgtgcgcccgttcccgcgctggatgcgctgcgtgaagtgcggcttgttgtctcctttcgataccggcctgttcgagatcaaggagcaccgtttccgtccggagcgcacccgcttcgtccacaagagctgtcgtggttccaagggcgaccagccggcgaaggaccccgatgcggttcccgcgcgtttcctgctggcctgccgaaacggccatctcgacgacttcccctggcactactt

SEQ ID NO: 682633 - DNA, 413 bp, Homo sapiens
ggacatgataaatcagccggtacccagcagcatagatattaccgacaggtgtagccaaaatctaccatcttaaacatttgtttgttttaaagacagggtcttgctctgtcactcaggctcgagtgcagtggtgtgattgtagctcattgtagccttgaactcctgggctcaagcaatctttctgactcagcctcccaagtagctgggactacagatgtgcaccaccacacctggccaatttttttagtttgtttttaatatagatcggggtcttgctgtgttgcccaggctggatctccaacccctggcctctagtgatcctcctgcctcagcttcccaaagtcctgggattataggcctcagccactgcacctggcccatcttaaacatttttaagtgtacaattcaattgt

SEQ ID NO: 682634 - DNA, 210 bp, Homo sapiens
tctgagtgtaacaggacggcgagtatagctgtttcggattgtaacaggagggcgagtgatagcggtttccggatgtgtaacaggagggcgagtagttaccggttgccggattgtaacacggccgccgagtattaccggccgcctgattttaaccggcggcggagtataaccggaggccgacgtcttcacgggccgcggagtataaccggc

SEQ ID NO: 682635 - DNA, 429 bp, Homo sapiens
tgataggagcaaaatggattagaaggagtcgactatggaatgcacagatagggtatagatgacctggaaaccatgccagatgacctatctgaccacgttggatgacacttgtgatctacatatgcccaccatagaccagagagactaatcaaacagcccccaccaaacggtgaaacccaataggaccatcatcccagcaaagtttacacaataacccgtaccagagttgcccccattcaccattcttacacacctcttccccatttccccagggagtcctgtccatccactccagaatcattcctattaattaagagctgaagcagatgacagtgaatatcactgaaggcagataggaagccagactacactgcatacgtagccatgatccctcagtgcataaaggaggaagacaccccttcagataat

SEQ ID NO: 682636 - DNA, 118 bp, Homo sapiens
gagtctgctcgtcactcctatatcccagatcctcagctaagaatggttctaaaggacccctgtccacagtggctccagccccatctactccctgtgtagaatggttctgcgctgacag

SEQ ID NO: 682637 - DNA, 999 bp, Homo sapiens
aatacctgtctgaggacagtcgatgcgcctgccggtgtgcgtgtcgcccgttctttagtctggagcgacgtcactgtctcacaggcagctctgtgttaaaaatgtgatagtaattgtagaatgactcggatgccatcacgatgagaaatgtgagctgctaacaatgggggtggcgtattaaatagagttagcctgggaagcgtgaatgtgattggtaatagttggctcttgtgacacaacatatgctcgttcgtaacaatgtttgccccctcggtggaggaatagcatatggatgcggtcgacatttataattcacctggatgtccactggagaacggtgcttcaccgggtaactctggggttacgtagacaccctttatactaatgactggtggcttctcagggaactccgggaagtaatccacttgggtcaaccgtaggcccgcaatgactttccccctcgtgacatctaacttaccccatttgaacctcgggagtgggcgtgtcatcacaaaggagggctatttctcaggatgacaacatttgctgagtgccagagaagttacgattatagacacaagtctattatgaacacgacggggacgaatacttaggccagaactccagatgtagctgattctacgcgcaacaacatatggttgggttgaacataacaaaaagatggcggaatgcgagggacgtgcggccaactcatttggaatacctatttaatttgcaagggctattgggcgagacatgtgtgatcacctgtggacggcatccggttgctccgtggcaaagaaaggcactgcagttcaagtacgatatgagaactccgtaaacgacatccaaacagtactgggaaacaagacgcaagaccttaccgtacaacaaaccaggcgtaaaaggcagttaccggccagacgtaccggccaacgttgtccacacccagtgataccgcagggcatactatggctcaaagaaccaaaaacgcgttcc

SEQ ID NO: 682638 - DNA, 527 bp, Homo sapiens
  misc_feature (1)..(1): n is a, c, g, or t
  misc_feature (44)..(45): n is a, c, g, or t
  misc_feature (123)..(123): n is a, c, g, or t
  misc_feature (128)..(129): n is a, c, g, or t
ngtgactgaatcagcagtgctgccctagtcatagctgtgctcannaaactcagcatgattagtgtgggagcaaacaaggatagcaagcacatactgtttttgaaattctatctggtgcttaanctatnntgtaataattaaactttgatgttgagaaatcacaactttattgtacacttcattgcaacttgaaattcatggtcttaaagtgagatttgaatttctattgagcgcctttaaaaaaagtaataccaaaccataaagttaaaatctatgtatattgagtcatatctaaaaccacgtataaacataaattgtatttcctgttttaattccaggcgaagtactgtttgggaaagctattattaggtaaatgttgtacacaattactgtttctcactttcagtcataccctaatgatcccagcaagataatgtcctgtcttctaagatgtgcatcaagcctggtacatactgaaaaccctataaggtcctggataatattagttcgattatacttgaagaaca

SEQ ID NO: 682639 - DNA, 636 bp, Homo sapiens
aacgttttttcttcttttgtttcccaaggccggcataattacaaagggcgtgcaatgaaaacacaggggccaccatcccccgccaacaggcggggtccaattacttggcccttgcctccttggaaaaagacccccccccccctaatggcccaatcccccaacccaaaaaaaagggccctctcccaaaaaaaaaaaaaaaagcccccccacattcacaaattttggactaacaaggaaaaccgggctacacccccaaaaaatgttgccctatacaccgggaccaaaccattaaaatctttgccccagaaaaaaaacaaaaaccccccccaaatttcccaccggggaaaccccgggaaaacccttcccccggggtcaccccccaaacccctcccaccttgtcttggccttatccccccccccccccagttaaaacccaaactccctctggatttcccacccggcccccaaagagtatagccttaaacaagggaataccccaatcctacgggaacaattttttccccgtaaaacccccaccctaaaaatggggcgggaaaataaaagttaaaccctccgtgcgccaaccgagaccctacccacataaatgggcgcgccccccccccccgcaaacaaacg

SEQ ID NO: 682640 - DNA, 387 bp, Homo sapiens
aatctttaaaaaaatcttttgctcttttcctgaacggaaataaaattcccatatctttttctttgcccgaaggttaatgacttatatttaaaaaatgaggtggaatttattccccccggttgctcccccttgatgaaggaagcaaaatttaatggaaccaaaaccttttggctaaaattttccctctcttctttaaccttttttttagggcccaggccccaaaccatgtttgccccagttgaatttgatgatgaggaagccaagaatgagcccgaatgggaaaaacgtaaaattttaaaaatttccttttaaagccgtttgcatgagtgggagggggatggggcagggttggggtttttttttatgctcatgaaattaaaaattcct

SEQ ID NO: 682641 - DNA, 119 bp, Homo sapiens
acgtcactattcatcggcacctcgctattcatcggcacctcgctaattcatcggcacatcgctattcatcggcaccagacttgccctccaatggatactcgttaaacggatttaacagt

SEQ ID NO: 682642 - DNA, 813 bp, Homo sapiens
gggaggatcaggcatcccagggttataaatggggacaagtgctgtcattccatagctgaaacaggacgaagacccgcggaggagagaatatacttcgcagcgctaacggagcgaacactaaagaaaccaaagaccgcaaagccccggtcatccatcacaaaggcaacctgggagagtaactattttggggtgcccttaacaactgtcgtgactccagagaagccgatccccatttgtattgaaagatgtattgagtacattgaagccacaggactgagcacggacacggcatctaccgggtcagcgggaacaagtctagagatggatgagtctgcagagacagtttgatcaagagccacaatcctggacctggcagagaaagactttacggtgaataccgtggctggtgccgatgaagagcttgtagcgtcagaactagcctgagcgccctgggtcccgatataagcatgcagatcgacttggtggaagcacacaaaatcaaacgaacgggagcagaagttgcatgccctctaaggaggtatcaggagaagattgccaaaggaaaacccacgaagtcttcaagtatgtcatctctcacctaaaaccaggtcagccacaagaacaaggtgaatctcatggaccagacgagaaccatctccatctgcttctggcccacattgatgagacctgattgacagcagctaggacgacactcacagcacacgcgcaaactaccagacaatcagtgaaactctttgattccaggaagggccaccctacattccttctacaatcggaccatcaaccgagacc

SEQ ID NO: 682643 - DNA, 173 bp, Homo sapiens
gggcgagtcgaggtgactctaagatctactaagtgtgaacagatactccaccagccaaagcagtgtatgatagaaagcccctctcgagatctatgcatcttctggaaacacgaatattctaggcacatatactgaggtagtatgagcaaatgagagtcagccattgggggtac

SEQ ID NO: 682644 - DNA, 430 bp, Homo sapiens
  misc_feature (5)..(5): n is a, c, g, or t
  misc_feature (46)..(46): n is a, c, g, or t
  misc_feature (329)..(329): n is a, c, g, or t
  misc_feature (362)..(362): n is a, c, g, or t
  misc_feature (421)..(421): n is a, c, g, or t
gtggnaaatttgttaaacgggaattaaacaaatttcaacaacaggnaaaacagctatgaacatgaattacgaaatttaaatacgactcaactaatagggaaatttggccctcgaaggccaaagtggtcctcacggcgatcgtgatcggcttcgcaccaccggcttcgtgatcgagcttgccttgcgcagcggcatgacaaccggaccgaccatgtcgacggcacgacctggcatgccgagcgcgacgagcagcgcagggggcggggcatgatgagcttcgtcgaccatcttcccgtcctgcctgtgctgctgcccgcgctgaccgcgtngctgctgcttctgataggcgaccacggcgcggnatgcccacggcggccacgggcacctcaagttgttgtggggcgcgccgcaagctttattnccctttagt

SEQ ID NO: 682645 - DNA, 313 bp, Homo sapiens
  misc_feature (12)..(12): n is a, c, g, or t
  misc_feature (39)..(39): n is a, c, g, or t
  misc_feature (62)..(62): n is a, c, g, or t
  misc_feature (99)..(99): n is a, c, g, or t
  misc_feature (113)..(113): n is a, c, g, or t
  misc_feature (119)..(119): n is a, c, g, or t
  misc_feature (128)..(128): n is a, c, g, or t
  misc_feature (140)..(140): n is a, c, g, or t
  misc_feature (160)..(160): n is a, c, g, or t
  misc_feature (172)..(173): n is a, c, g, or t
  misc_feature (179)..(179): n is a, c, g, or t
  misc_feature (189)..(189): n is a, c, g, or t
  misc_feature (207)..(208): n is a, c, g, or t
  misc_feature (239)..(239): n is a, c, g, or t
  misc_feature (242)..(242): n is a, c, g, or t
  misc_feature (246)..(246): n is a, c, g, or t
  misc_feature (261)..(261): n is a, c, g, or t
  misc_feature (274)..(274): n is a, c, g, or t
  misc_feature (276)..(276): n is a, c, g, or t
tttggccgcttngtcaaggacatgaagatcaagtccccngaggagatctatctcttctcccngcccattacggaatcagagatcattgatttcttcccnggggcctctctcanggatgnggttttgangattatgccagngcagaagcagacccgtgccngccagcgcaccnngttcanggcatttgtngctatcggggactacaanngccacgtcggtctgggtgttaagtgctccanggnggtngccaccggcatccgnggggccatcatancnggccaagctctccatcgtccccgtgcgagaggctact

SEQ ID NO: 682646 - DNA, 258 bp, Homo sapiens
ttgcgcctcaggcttgaccgctacttccgcagcgttcgcgctccttccgctgctgcttcttggtcttcagtgttctcctcgggcttgtatgagccggctggcggcttggaacgtgtctatcttaggcctgcaggtccaggggcttgtacttcttgcccttgtagaatttcctgaggtattctttctgagtctggttaataactgtgagaacacgggcaattggttttccgggaagaggtccgggatcttaagaagagc

SEQ ID NO: 682647 - DNA, 93 bp, Homo sapiens
ccctttatatgtgatgattgctgcaaatatgctgattgttctatgctcactccatgcctgtgctccatgtgtgacatgagcaacacccttctc

SEQ ID NO: 682648 - DNA, 1036 bp, Homo sapiens
  misc_feature (617)..(618): n is a, c, g, or t
  misc_feature (631)..(631): n is a, c, g, or t
  misc_feature (633)..(633): n is a, c, g, or t
  misc_feature (659)..(659): n is a, c, g, or t
  misc_feature (663)..(664): n is a, c, g, or t
  misc_feature (705)..(705): n is a, c, g, or t
  misc_feature (724)..(724): n is a, c, g, or t
  misc_feature (727)..(727): n is a, c, g, or t
ccgggaaacgtgtgacctgcataccatagcttctgccaattccccagctctacccggccccaacatatgtggtaatgcccatggatacaggactagatttgcttaagacgtgcgtcctaacaagacctgtcgtagaccaaccgctgtgaaccgcgtcgggcccggttggtcgattcttctgggtgccaccgataacattgttccacagctcggttattgcaccgtgattgtacattggctgtcggacattcctgcagcctcaaaggagatgatctagccccggatcagctggtaccttccgtcacattatcacctcgatactcagggagaccttgcagacgtcttcgagtaggtgccgccaaggcccccgtgattagtctgccgtacatgggggcctgcagtggccagaggtttggaccttagtcactcgcctgtgacatccggtactgtgcccaggatgctttcttccaggtgaagcgagctagtacgatcgggtttggctgcccgatgtaggaacactgcagcgcctgcccaaggtcatcgggtacccagagcctcgtcaacgaagcttggccttcaccgcccgacaagatcgatggctgacgaggcctggcagnngggctggtcagcngngtgttcccagacaaagaggtcatgtnggannctgccttagcgctggcggccgagatttccagcaagagcccngtggcggtgcagagcacanagntcaacctgctgtattcccgcgaccattcggtggccgagagcctcaactacgtggcgtcctggaacatgagcatgctgcagacccaagacctcgtgaagtcggtccaggccacgactgagaaacaaggaactgaaaaccgtcaccttctccatagctctgagagccctgcgcgtcccaggccaccagcaaggggcccggccttgtcccgcgctcatccacagaaagggaggatgggcgatgacagttgtgttctaatgccttctgacccagtttcccagtttataaaacttaccgaggatgagtttctca

SEQ ID NO: 682649 - DNA, 923 bp, Homo sapiens
  misc_feature (617)..(618): n is a, c, g, or t
  misc_feature (631)..(631): n is a, c, g, or t
  misc_feature (633)..(633): n is a, c, g, or t
  misc_feature (659)..(659): n is a, c, g, or t
  misc_feature (663)..(664): n is a, c, g, or t
  misc_feature (705)..(705): n is a, c, g, or t
  misc_feature (724)..(724): n is a, c, g, or t
  misc_feature (727)..(727): n is a, c, g, or t
ccgggaaacgtgtgacctgcataccatagcttctgccaattccccagctctacccggccccaacatatgtggtaatgcccatggatacaggactagatttgcttaagacgtgcgtcctaacaagacctgtcgtagaccaaccgctgtgaaccgcgtcgggcccggttggtcgattcttctgggtgccaccgataacattgttccacagctcggttattgcaccgtgattgtacattggctgtcggacattcctgcagcctcaaaggagatgatctagccccggatcagctggtaccttccgtcacattatcacctcgatactcagggagaccttgcagacgtcttcgagtaggtgccgccaaggcccccgtgattagtctgccgtacatgggggcctgcagtggccagaggtttggaccttagtcactcgcctgtgacatccggtactgtgcccaggatgctttcttccaggtgaagcgagctagtacgatcgggtttggctgcccgatgtaggaacactgcagcgcctgcccaaggtcatcgggtacccagagcctcgtcaacgaagcttggccttcaccgcccgacaagatcgatggctgacgaggcctggcagnngggctggtcagcngngtgttcccagacaaagaggtcatgtnggannctgccttagcgctggcggccgagatttccagcaagagcccngtggcggtgcagagcacanagntcaacctgctgtattcccgcgaccattcggtggccgagagcctcaactacgtggcgtcctggaacatgagcatgctgcagacccaagacctcgtgaagtcggtccaggccacgactgagaaacaaggcacgtgggaccgtcaccgttcatcacagcatatactgtccccgggtggaaggcgcagggtcagaaagct

SEQ ID NO: 682650 - DNA, 82 bp, Homo sapiens
aagacagcagcatatatctctgcagcgtcgtcgaggggggcgggagacccagtacttcgggccaggcacgcggctcctggtg

SEQ ID NO: 682651 - DNA, 206 bp, Homo sapiens
cctgggatatacaaatgagaatgaagatttgaactttatactctagcagtggggaaacattggaacaggagcaagacaggtacgcaaagaggaaggactggaggggttagcgcacaaccacctactatgggtggaaggaggatcatatatcagataaggagctgcctaactcagcaaatgacctccatccatgtgaaatcactgac

SEQ ID NO: 682652 - DNA, 440 bp, Homo sapiens
tgtctcatatgcgtagtaatgtatctataccaacaagcgctgcacagtgtcttatcaaactcctcgtgtactaaggctcgtgcgtgatcatgtatgtccattaagcagtatgcactggcagttctacagccagcagtacagtccctcactagctcttcccatgatgattatgtcacagcgatatcattgctcttcatccatcagctttcacgatgatctgacatacatgcccagtagtgcacagcatgtagcttggccatagtgaacttctacggcatgtagctcgataaggaagtcgcatcatagatttgtcagaccacattgattccattgttcgatggaatcggcatatgctttcctgcaaatctctggggtcatcatctaggcatgtcctccagcgacgtatacaactttccagctctggcagttcatcctccgtt

SEQ ID NO: 682653 - DNA, 914 bp, Homo sapiens
tccctaccgctcgcattgcagggagatggctcagcgacattcttctgaggaggttcctggcctctgtcatctccaggaagccctctcagggatcagatggccaccccatcactatccagcagcccatgcagacccccacaactgcagctccctgcgctggccctgaacctgctacacaccgcaagccccagccaccgggcacacctactacacccaccgcacggaactctacccttgcacacacccatctcaccctactcccacggcactggcacccctgcaccctctccacagccacccgaccgctggctccaaccagcctgcaagcaccaccccagccgcgcctccgcctgcgcacctcacatcccaccggcccacccagcctgcgactggctgggaacccacctgccccacgaactcacctgcgcgcgccaccggacgcggatctcacgccagccacacgccactgcgcctcgcgccccaacagaaccctgacccaccgggcccacacacgcgctggcgcctggcacctgggccccccccacgcggcccgccgccacttacctgcggcactcggcacccccaaccaacccagcaaccccaatccggcccccaacctctgcacacgctaactggcaacgaggctggcccccaccgcccgacgcacacgagaccccccacaacaccacatgggccctggggccccctgcggcgccgccccccaaccccgcgccaccacaaccgcacacacaccctcgggccccacggacggcacccccccgccaccggccgccccccggggccgccaccacccacacaaacccgcacgcaaccaccccgccgccaccacgccgcgccaccgcaccacacccagccttccacaccacaccgcgggcgctcaccacaccatggcc

SEQ ID NO: 682654 - DNA, 141 bp, Homo sapiens
  misc_feature (81)..(81): n is a, c, g, or t
tcactctagaggatctacgactagccgacaggcatctgggaggacgaggaagaagactatgaggaaagagctgaccgacanacggaaccggggccggaataagtgccgctactgcgctagagggtggcggggtccaaggtt

SEQ ID NO: 682655 - DNA, 352 bp, Homo sapiens
aacagtaggtgaatgggaggattgcttgagcctgggaggctgcagtgagccatgattatgccgctgcacttcagcctgggcaacagggtgagaccctgtctcacaaaaaaaaaaacaaaaacaaaacattcatgtgcaggtgtttatgtggacataagtgtttgagtaaatatcaaggaattgggtcatatggtaagagtatatttacttttgtaagaatctgccaaactgttttccaaagtggctgtaccattttgcattcccaccagcagtgaaggagagttcctgttgcttcacatccttgacatcacaactggtgttgtcagtgtttggtcttgtggccattcagcct

SEQ ID NO: 682656 - DNA, 402 bp, Homo sapiens
ttgtcgggccagtctcgacactcctgacgtcacgtgatcttcccgcctcgtctcctgttatccagtgatcttcccgcctcggcctcccagagttgctgaggagttacagacgttaacccatgccttgcctggatttttgttttttaggaaggctttctactattggaattcctggcctttagaggatgttatctttctaaggaaaggatttttttgtttttcttcgaacctcctatgctgaagattcccttaataacaagtactgtccctcgtttcccagtgctggaatatagaacatggatagattactgttacttaccatgaaagacttctgaatccaggaagagaaaatgactgggtctcatgtttttcagagacagcgtcttgctctgttgcttatgc

SEQ ID NO: 682657 - DNA, 274 bp, Homo sapiens
gataagattggacctgatgaaacggtattatgcatgcaaaataaaaatgttgtacctgccctttccgttttgtcatgcttcttctcttctccactgtgtaactaaaatcctgagctttcctcacagctattttagttcatggatggctatctaatcatagatgtatgttctttagtccttctgtatatgtgtactggaggaatgcaaggattgaaactaacaacaggatctcctgctctgccgtatttctgacatcactataatttgtctgttt

SEQ ID NO: 682658 - DNA, 149 bp, Homo sapiens
ccctcctagtttgggtaagggctaggctggagtggtaaaaggctcagaaaaatcctgacgaagaatcaaacacttctgaggtaataaatagtattatccctgtatcgaacgcctttttggacaggttgtgtgttggtcacttgcttgct

SEQ ID NO: 682659 - DNA, 232 bp, Homo sapiens
cggcacgaggaacactagtgctgtgatgtaaaccatggacttcaggtgataatgatgtgtcatgtaggctcatcaatcatagcaaatgcaccactctggtggcgggatgttgataacgggggcagctgtacatgtgtgggcacaggacataaatgagaaatctctgtaccatccactcagttttgctgtgaacctaaaagtgctccagaaaaaaaataaagttttttttaga

SEQ ID NO: 682660 - DNA, 229 bp, Homo sapiens
  misc_feature (13)..(13): n is a, c, g, or t
agagccgaggganccagcgcggtgcctagcggaactccagggctggaatcccgagacacaagtgcatctgctagctgttagcacttggcagacggagttctcctctagggtagttctaactttgggtaataatgtttgtcagctacctgatattaacattgctccacgttcaaacagcagtgttagcaagacctgggggagaggtaagccaaataaaatatcttgtcag

SEQ ID NO: 682661 - DNA, 514 bp, Homo sapiens
actaattggttggccttcgggctggtgatgtcttcccaattaaagggggggccgggtgaggacacgggaacacatctgggtgggttctcttctataccggcactatcgggcacaaatagtgatgggatggagggatggatggatgaatgatgggatgattgagtaaatggattggaatggaatgagcaaatgaattaagtcctcataggattgattggatgattggatgatggggcaaatgatttaaatcctcacttcgggatggacagctcttccagggcagggtcctggtccccaggtcatctcagtagcctcccccaacggtagaggggtcactcaatggaatggggggtggaatgattaagtggcccagggtgggcccagggctcaccatggcagaaatcagaccaaaagagctagaaccacccaagagagcccttcaggggacctccaagataccacaggaggaagggtaccaccttcctctcgtgcagtaggcatggtgccagttgag

SEQ ID NO: 682662 - DNA, 253 bp, Homo sapiens
  misc_feature (10)..(10): n is a, c, g, or t
  misc_feature (167)..(167): n is a, c, g, or t
  misc_feature (213)..(213): n is a, c, g, or t
  misc_feature (240)..(240): n is a, c, g, or t
accccccacntggtgttcctgtgttccaggacaagcactttttcagaagcccgtggccctgctgaggagagacagcccacccccagcttgcaagagaggcagccagaggccaggtatttgttggccgctgatgaccagttccgcagtgaacagagggggccttgccnggattgattgtgtggcatggagcatggtttttcccccaagtgcaanacttgaaaattgggaggaataaatttntgtttttaatttg

SEQ ID NO: 682663 - DNA, 169 bp, Homo sapiens
gagctctcagaaaggcaaaatgtgccgatgcttgaatagtgaattgaagaactgtgagcgaacaacttgaatgtcactggaggctcaggctgaaaagtactctcagaacgtagacagagtatgaggaagagatcatggtcctttccgacaagctgaaggacgctgagac

SEQ ID NO: 682664 - DNA, 111 bp, Homo sapiens
ccctatatctctgaccatcttcccctagccttgtatcataaatgctgaagagtgacacagcagctcatgctcaccagttatgtttttcatgaaatgtcagtcatcattgtg

SEQ ID NO: 682665 - DNA, 784 bp, Homo sapiens
tccatgatttataaatgcttaatgggaattgcaaccgtaacaaggtaaaaaacaaaacccaagcatgtggcatttggccgaaaattatcttagcgttaaaaggaccatgagatggagtactcaaaccacggcccgacaagggtgacccgaggtcggcgagtgccaacaggttgcacattcaggtgtagtgcgcggtgggaggctctacacaagggtagagggacaagaagagacggggactccacaaaagaggggagaccccccacatgtgacaaaccatttggggagaccacccgagagagacagagacaaccaacaactggaagacgccacgcagcacatatagcgcaccgggacaggctacaaaacgaggccagcccgcggggcccagagaagtggtataagagagcgccccaagggggaacaaagctgtgaaaaacacctgtggagtacacagccaaagaggagccagtgagaccaggaacagtagtgcacccccgtgaaaaaacaccccacacaccgagcagaaaggggacacaaaaatataataaacaccaacgagcgagactagagacagatgagagggataggatcacagagaaaaacacaaaagtggggacacgagggcgaaaacaaaatcccggggagaagggagtgacaccaatcagcaaaagcaacgacataaagaggaagaacaccaacaacaacggggacccaacaaagtgaatagagagtattcccccaacacaaatggtggggtatcacaccaacactcatgaggcgc

SEQ ID NO: 682666 - DNA, 165 bp, Homo sapiens
tatctacgccgaggtttggtcgaggtcgtgccagccacggggtcacacgattaagccaagtcaagtagaagccggggtaacagagtgttttagatcaccccctccccaataaaggctaaaactcaccgtgagtcgtaaaaaactccagtggccgaagctggatca

SEQ ID NO: 682667 - DNA, 394 bp, Homo sapiens
atttttttacaagatacatggtaaaatgcatcccgattaaacgcagtggattacatgcagcatggctaaatggatcccgagtgaatgcagtagattccatgcagtgtcattgaatgcagtggattccatgcagcatggtaaaatgcgtcacgattgatgcagtggattccatgcattgtcattgaatgcagtggattccatgcagcaaggtaaaatgcatcccgattgatgcagtggattccatgcagtgtgaataaatgcagtggattccaggcagcatgataaaatgcatcccgattgatgcagtggattccatgcagcggggttaaatggatcccaattgaatgcagtggattcgatgcagcgtggcccaatggagtatcttgtaaaaaat

SEQ ID NO: 682668 - DNA, 377 bp, Homo sapiens
  misc_feature (358)..(358): n is a, c, g, or t
  misc_feature (369)..(369): n is a, c, g, or t
gacgcacagcatgagtctggacggagtagctccaagagctctcactgtgacagcccacctcgctcgcagacaccacaagataccaacagagcttctgaaacagatacccatagcattggagagaaaaacagctcacagtctgaggaagatgatattgaaagaaggaaagaagttgaaagcatcttgaagaaaaactcagattggatatgggattggtcaagtcggccggaaaatattccccccaaggagttcctctttaaacacccgaaggcgcacggccacccttcaggcatgagggaacacggaggcgttcatggaaggaaaggggggcttatttctcttgccaggattttcttgnaaagttttttncctttcca

SEQ ID NO: 682669 - DNA, 327 bp, Homo sapiens
aactagtgcgatccccgggctgcaggaattcggcacgagctcgatttcctgacctcgtgatctgcccacctcagcactttgggaggccgaggcgggtggatcatgaggtcaggagatcgagaccatcctggctaacaaggtgaaaccccgtctctactaaaaatacaaaaaattagccgggcgcggtggtgggcgcctgtagtcccagctactcgggaggctgaggcaggagaatggcgtgaacccgggaagcggagcttgcagtgagccgagattgcgccactgcagtccgcagtccggcctgtgcaacagagcgagactccgtct

SEQ ID NO: 682670 - DNA, 667 bp, Homo sapiens
  misc_feature (3)..(3): n is a, c, g, or t
  misc_feature (35)..(35): n is a, c, g, or t
  misc_feature (69)..(69): n is a, c, g, or t
  misc_feature (100)..(100): n is a, c, g, or t
  misc_feature (103)..(103): n is a, c, g, or t
  misc_feature (107)..(107): n is a, c, g, or t
  misc_feature (119)..(119): n is a, c, g, or t
  misc_feature (132)..(132): n is a, c, g, or t
  misc_feature (226)..(227): n is a, c, g, or t
  misc_feature (233)..(233): n is a, c, g, or t
  misc_feature (235)..(235): n is a, c, g, or t
  misc_feature (237)..(237): n is a, c, g, or t
  misc_feature (251)..(251): n is a, c, g, or t
  misc_feature (253)..(258): n is a, c, g, or t
  misc_feature (268)..(268): n is a, c, g, or t
  misc_feature (272)..(274): n is a, c, g, or t
  misc_feature (281)..(281): n is a, c, g, or t
  misc_feature (283)..(283): n is a, c, g, or t
  misc_feature (302)..(302): n is a, c, g, or t
  misc_feature (310)..(310): n is a, c, g, or t
  misc_feature (321)..(321): n is a, c, g, or t
  misc_feature (327)..(327): n is a, c, g, or t
  misc_feature (339)..(339): n is a, c, g, or t
  misc_feature (341)..(341): n is a, c, g, or t
  misc_feature (346)..(346): n is a, c, g, or t
  misc_feature (349)..(349): n is a, c, g, or t
  misc_feature (352)..(352): n is a, c, g, or t
  misc_feature (360)..(360): n is a, c, g, or t
  misc_feature (362)..(362): n is a, c, g, or t
  misc_feature (380)..(380): n is a, c, g, or t
  misc_feature (386)..(387): n is a, c, g, or t
  misc_feature (394)..(394): n is a, c, g, or t
  misc_feature (400)..(400): n is a, c, g, or t
  misc_feature (406)..(406): n is a, c, g, or t
  misc_feature (408)..(408): n is a, c, g, or t
  misc_feature (439)..(439): n is a, c, g, or t
  misc_feature (446)..(446): n is a, c, g, or t
  misc_feature (453)..(454): n is a, c, g, or t
  misc_feature (458)..(458): n is a, c, g, or t
  misc_feature (466)..(467): n is a, c, g, or t
  misc_feature (476)..(476): n is a, c, g, or t
  misc_feature (484)..(484): n is a, c, g, or t
  misc_feature (493)..(495): n is a, c, g, or t
  misc_feature (497)..(497): n is a, c, g, or t
  misc_feature (504)..(504): n is a, c, g, or t
  misc_feature (507)..(507): n is a, c, g, or t
  misc_feature (514)..(514): n is a, c, g, or t
  misc_feature (520)..(520): n is a, c, g, or t
  misc_feature (537)..(540): n is a, c, g, or t
  misc_feature (543)..(543): n is a, c, g, or t
  misc_feature (548)..(548): n is a, c, g, or t
  misc_feature (554)..(555): n is a, c, g, or t
  misc_feature (558)..(558): n is a, c, g, or t
  misc_feature (564)..(564): n is a, c, g, or t
  misc_feature (572)..(572): n is a, c, g, or t
  misc_feature (589)..(589): n is a, c, g, or t
  misc_feature (603)..(603): n is a, c, g, or t
  misc_feature (661)..(661): n is a, c, g, or t
tgntaatgttgtatcagtgcatattctatggaaanttcatatctcaagtaactagcctagaaatcaganacagcactatgtcaagctagtatacaaggtnaangacncaatgctgccantgcaattagtatntagaaataatacgcagctgttagaaaaagtctgtggccaagtggataaaacagtagcagtgcactgcactgacatccagaacagaaaatagggnnggaccngngnatgcacttcctgcnannnnnngtccggtggntccnnngcacaangngttcccaactgtctcaccngctctctnactcatgtgtncctgcnccttcctcttgnantctgnacnttntaataccncncgccactttccgcctccngtgggnnggctccngccacncgccgntntttcgtcctgcttcccgtcatctcatatctnaaggtcntggcttnngttnggcaatannacctgtggntttgggcntctttggtnnngnggctggncanatcccanattttnttcccattttcttgtgnnnntanacttncataanncancagacnctgttcangattactgagttttggntgatggcgaaatantttttatgtaagtatactgaataaacatacaaacaaatatccttaacaaaatactgtncgacca

SEQ ID NO: 682671 - DNA, 157 bp, Homo sapiens
  misc_feature (10)..(10): n is a, c, g, or t
  misc_feature (14)..(14): n is a, c, g, or t
  misc_feature (118)..(118): n is a, c, g, or t
tgagataatncagncgggagaagggagggaaaaaatttttttccatgtgaaaaactgcccccccccccccccccagcaggagagcagcaaaatttatgcaaatctttgacggggtttnccttgtcctgccaggattaaaagccatgagtttcttgtc

SEQ ID NO: 682672 - DNA, 157 bp, Homo sapiens
acagggtactatcgaactgtagtggtaccggtgggccggcatccatatagtcactccagcgtttatgcgacgggttctactactattaggacttttcgcttcgaagcgaaggcttctcaaatcatgaaaattattaatattactagctgttagccga

SEQ ID NO: 682673 - DNA, 674 bp, Homo sapiens
  misc_feature (674)..(674): n is a, c, g, or t
tgcataagcaaagcagacttatgcactgaggcactcaaactgcggctcaacctggtggggggcatgtatgacacggtgcagcgcagcacccagcagaccacggagtgggccatgctcctcctggagatcatcatcgagcggcactgtcgacatgcagtcgcgaacaatgagctcttcactgactgtgtgggaacatgctgagcagtgctcatcaatgggcacattggctgcaagtacatgtctagcgatctcgcaaggtagcatgtgaggacaaccaagcgtgcatacttgaaccgtggcgaagcaacttgcagaaggagctcggcgggagcggccagtcagacagtctggcaaaaggttcgccagtgttgcgtgccacatgaccaagcagaacctgagatgtcatcaacgttgtgaggccacagggcatcccgttatcgataccaaggccaactagaagattgctggcttcgaatctccatctttcaacgacggacgggctctacaggtttccaccaaacagaagatctcgtcccttggcgatctttactgaggggcttgacagccgtcagcaccacttctcttggagctggtttggaaacagtccgagatggaccggcgcagtggctcgagcaagagggagcagcacgcaggtcgctgctctacgcactacn

SEQ ID NO: 682674 - DNA, 440 bp, Homo sapiens
ccgacaccctggggcatcacggtcctggtagggtagatctcagaacgcgacagatcaccagatcggacaagggggtgcaacagcgtcagagcacaatacaagtgttgatgggtggtgtacaactcgtggcgaagagctcggttagctctatccagcccatcagcatgcagaaccaggttctgatggtagaagggctctcaggtgacagtggagtaggcagtagtgtagtacccctccgcaccaacatcggatgtgatagcaatgtgcctgaaaggggaggtatccaactcccaatactctccacgaagacgtgtcagagcagcataagcagcatcgtggactgccatgtcgatagtcactccaacaccatgagcagtgtgcaacacggtagtggagtcatactcccgagagtagaggtggaccatggcccggtgtcgacg

SEQ ID NO: 682675 - DNA, 586 bp, Homo sapiens
  misc_feature (71)..(71): n is a, c, g, or t
  misc_feature (423)..(423): n is a, c, g, or t
  misc_feature (447)..(447): n is a, c, g, or t
  misc_feature (491)..(491): n is a, c, g, or t
  misc_feature (522)..(522): n is a, c, g, or t
  misc_feature (525)..(525): n is a, c, g, or t
  misc_feature (547)..(547): n is a, c, g, or t
gggaagggccctggcatgaggtgatagggagtggtggggcccgttgcaagctggagggcacaccccaactntgaagcggctcctgctttgctccagcgggctgggccacgtggcgtgcaggcccagagctggacatcacccaggttcccaaaagaagccagaaggcaggaatttacctgctggtttaagatactgtcaacagattcaaatattttgaaatatgtgattcaaaacccatctactggccaaatctggcccatgggcccagtttgtggcatctgtttcaggaagagacaagacctagtttgtgttttttttagtgggggcggggaggatgcggtgtataagaaattttgagtgaattaaaaaaaatttatgaaaaatttcaagggctgggtgcagtgtctcacgttcgtaatccanctctttgggaggttgaagcggganaattggtttaggccaggagtttcagaccagcctgggcaacatancgagacccctacaaaaataaatttctccctntanaaaattttttttttaaaaattntacctttgagggggggccggtccccaattcccctttgtg

SEQ ID NO: 682676 - DNA, 374 bp, Homo sapiens
aataaacagatcccaactccagggtgacccggatgttgaattaacagacaaaacttttaaagcagtgattaatactttatctatgaggtaaaggcaaacccaattgaagtgaatgaaaatacaaaagttctcaccacaaaaataaaaactattaaaaaaatgcagatccaaattttagagacagaaaaacacaatatgtgaaatcaaaatttcactggatagactcaatagaagaatgaaaaaaaagtcagtgaacttgaatctattggatcaatataaatgatccactgtgaagaacaaagagaaaaaataagactgaaaaaaaaaatgaacagcatgtaaatgatgcatctgtgggacaatatcaaaaggtt

SEQ ID NO: 682677 - DNA, 214 bp, Homo sapiens
acccggctccactggtgctgtgtgaaaagactcagatggagggaaagtagatggagactggtaggagatactagagtattaggcagagatgacgtactaggactggatgctagtggtggagtggtgagccgtgatcagactcgatatattcctgaggtagagtccacaggattggctgatggactgcatgagggtgtgagaggagagtcaggat

SEQ ID NO: 682678 - DNA, 683 bp, Homo sapiens
  misc_feature (1)..(1): n is a, c, g, or t
  misc_feature (19)..(19): n is a, c, g, or t
  misc_feature (90)..(90): n is a, c, g, or t
  misc_feature (98)..(98): n is a, c, g, or t
  misc_feature (117)..(117): n is a, c, g, or t
  misc_feature (148)..(148): n is a, c, g, or t
ntttaaagtctttgaaaanttagtaagtggaaagcaaactccaacccacttgacttgtagtagctggctgagctgagaaatggccatagnaaatcaantgctgctcaaggttattantgcatttattctcctctgcatccaaaggctnttgaagggaattaattcaacatattgcatattgcctgtgacctgtgggcctgtccatgcagttgacaagacacgctgagctgagccagcctgcctgcaggtgtcttcattcagcaccatagaggctgcaggacctgcttcactctgggccctagggtccattagtcaatcctggcttccccatctgtttgccatctgtaagcgggctcaatttgatcacttttcctagtgtcttcaagatgcaaggatcattgcaaccagctgagaatgacatgaaagaaggagcactcacacctgtaatcccagcactttgggaggccgaggcgggtgcatcacgaggtcaggagattgagaccatcctggccaacatggtgaaaccccgtctctacttaaaatacaaaaattagctgggtattgtggtgtgcgcctgtagtcccagctactcaggaggctgaggcaggagaattgcttgaacctgggaggcggaggttgcagtgagcagagattgtgccactgcactccagcctgggtgacag

SEQ ID NO: 682679 - DNA, 243 bp, Homo sapiens
gcagcattggattcactggatagcagtgcaatcaagtgtctctctgatattggggactcgtaaatttctgattctcatggtggcagcagttagtggactgggtacacccaccacctctctcctagttgatgaatgactcagaggtgtcattcagttggatgaataatagaggtggagactactctcaccaccgagatgaaagaaaccatcatagcctttgcctgggaaccaaatggaagtaag

SEQ ID NO: 682680 - DNA, 1500 bp, Homo sapiens
  misc_feature (228)..(228): n is a, c, g, or t
  misc_feature (613)..(613): n is a, c, g, or t
attaaattcatgtagggtggcgaataagaagcttggatgaagtggatcttcttcaccctgacgtgttcgtctaccgacgtgtatctcagtgatacagtatacgatctatgcgattcgtggaaagcgtatcgtactaccaggaagattagtgaccactatgatatgtggaacatgtgaagtgtccactataattatccacactactcttggggcatgacttagattggnggcgtactgtaacctcacatgttgtctagagatcgagcaacacacacttatgatacactaaaccgaacaacatacctacctacctgactaactgactagtgtttccactggtgcacgcaatgtaactctcacacgtacgtacaattgcgctgcgcgcgcaatgcacctgtgatacagaaatatctgacagctgtccttatgtgtttttatcatgagcggacgaagggagggggtggacttgactatagggagaagacacaaactgatacgtttgttgttggccaggtctgaacaaagtttatatggccaatattgggcagtgacttcactaagccgtgtaggcagagaccacatacagggttgcattggtacaccaatcgaatgnactcataggcgctaagcacacatttacccatgcgtaaagtctgatttgatgggcttacccaaaaattgcggctttatatggaggattctctcgtacaaggaaattttactctctggaagataatctttcatgtaagttatggcacatggtccatattcatattctctatgaactcgcatgtagagtaatccatatctccctagtttcgactaccaggggtggcaagcaaggaatttgattcatatgcgctggatagtgtgaggcccctttactgctccgtgtggtacgaaggcagaaagcacgaatgtgctttaacctttagtggtgggggcacccacttgttggccttctggcgcaaaaaagagggtctgtcgaatggaatccttttaactggagccttcccagacgtccaaggtagttactaaaagggcgacccctgggctgtcccttttgggacttgggctttcccgacaggaaggaatatgccgcttcaaatcttaatttaacttggcagtgcacaattctacttccattaagtgtggataaggacctggggtgaataaatcgcatatgatagaaccctgaacgtatatcctggaataggggtcgggccatagggtctggacttgtaaaacacgttcggccatgaagccaccacatatatttctaaataaggatgagggggtaaaatatatgcccaaggcccacttgaacgagatatcccgaaaacaggcagaaacaccaaaaaaagcggttaaagaaggggactccgctgaaagtcacaccaaaaggcacatacagggggaaagacaaaaaaaaaagcacaagaacgaagcggaggccacgaagacaaagacaggtgacgaaagaacccgaagcacaggaaa

SEQ ID NO: 682681 - DNA, 94 bp, Homo sapiens
ccgcagggccaaacccaacttccgtgatgtgatctggctacagtttggagcccacatatttcaagccaaccccatggcctccatgactttttca

SEQ ID NO: 682682 - DNA, 704 bp, Homo sapiens
agccgtcgcgtacctaatggatgccgcgtggaagccggaagccagcacctcccgcatggcccctccggccagtccgggcccctctagatgagagctgcacccaggccagacaccagtcgctcagccaccagcagcggcacccccatctgcagttggcatcttctgctgcttgctgccccggcatgccaggtctgatggccctagatggcaaccacatgcagctggcgtggctgtgggcctctgcctgtggggcacacaattgggtcactgccattactggcgggcttcagtgagaggaagtaagagctgagcctgcgaggcctgacatcacttagccaggtagcctcagggaacccagccagcacagctagcagcagccttgccttctatgagatcaaacagtttctggagtgtgcccagaaccagggtgacatcaagctctgtgagggtttcactgaggctgctgaagacagtgccgacttgcaaacggattggcctaatcgaagaagttcaacctggacgacgatggaacaatcagctctcataacgtaagttaatttagtatactaatcagcaattgatagtgcagggtagtaagtgtaaccatcagttaaacctctcctgtcattcctagcttcttgcttcagaattgaaatggaagtgggggtgtcctactctgtgaatctggactgggcccatgttgt

SEQ ID NO: 682683 - DNA, 186 bp, Homo sapiens
  misc_feature (59)..(59): n is a, c, g, or t
  misc_feature (74)..(74): n is a, c, g, or t
  misc_feature (110)..(110): n is a, c, g, or t
  misc_feature (116)..(116): n is a, c, g, or t
atgtccgcgtctcgtcgcacagtgatacagcgggcgtagtattcagagctcaggctatngagctccatgaaggntgtgctcgcggatgtgtcccgttttatggagactcnggcctngtcgccaacgctatctcttccccaacgctatctcttcccaacgctatctcttccaacgctatctcttccc

SEQ ID NO: 682684 - DNA, 420 bp, Homo sapiens
aaatcagtgggcccacctcagcaagagctcttcagtgagagagatttcatgcaaatactccaggctctcaccttctctcaaaagagcaatgcgagagctagcatttctgctgagtacaatgtcagcaaacaacccagatcttgatgacttgccacaagaagtcccagtgcaccagtatcatgtgcttcccctccttcaggtcctcagtcccctatgttgaccatatgggtcccgatgcgctgatggcagagttctgagccaagttcagattagcctgaatgatgaaaaggggtcagcttcttctggttgattgttctttcatcaattgtgtctggcactgaccggttgatcattgtacaaaggacaatgccatctccaatagcattaaagagatcatccgtgtcaggattcattgggatg

SEQ ID NO: 682685 - DNA, 124 bp, Homo sapiens
ctaagatccgcagtggtgtggactggccgaggcggtctgtgtattgctgcgtctgctcacagcgctgtaggtgcgacatgctaggtcaggctttgggggtgaggctggcagattctccgtcact

SEQ ID NO: 682686 - DNA, 613 bp, Homo sapiens
  misc_feature (377)..(377): n is a, c, g, or t
  misc_feature (427)..(427): n is a, c, g, or t
aatgtttactaaagagacccagtcttgggaatgtcctaatatcccgatatcttgagaacaaagacattcctaattttgctttaaagataataatattgattcttgcaaaatatagtaattaagtttttttatcctgtatataaacaagcattatacctagggtggacgcattcctcctcttgctttcaggaatgccttactctgtctatggagtagctgtgctttcaccactttactttcttaataaacttgcttttgcttcattctgtggactcaccctgaattctttcttgcatgagatccaagaaccccctcttggtgtctggatcatgacacctttcctgtaacattctaaatattaatctcttgtcatgcangtagtttgcaaatattttctcccatgctgtgggttgtctctttactttgntgattgtttcctttactgtgtagaaactttttagcttgatggaatcccattgtccatcttttgctttagttgcctgtacttattaggtcttactcaatacatctttacggataccaatattctagatagtttccccatattttcttctaatatttcatagttccagactacatttaaatctaacct

SEQ ID NO: 682687 - DNA, 314 bp, Homo sapiens
cggcacgaggttggtgcacggctccgcggaatcccggagacattggggcaggtagcaaaacccttggagaagtatccagccccctccaaggaggaggaagttggagttgatggccactccgaagcgcccgagaaagcagcccaagttgggttattgtttcttaaactgttagggaaagttgagattgttaagaattccttggtcgcccttgcatggcagacggccttgcatcacttgccaggacccgtttatatttttcccatcacacacagcttggagcacccatggcccactccgagctgtgtgtgttggca

SEQ ID NO: 682688 - DNA, 241 bp, Homo sapiens
gttatcgtgaatagtctttgttatacatgaggtcactatggacttaccctaaagattatctgtacttctctcttccatcaggcacacatgcatacgtactcaccatacctcatctcttgaggttattcattgtagtctctgcataccattgttcatgcaatttcacacatcaataccaattcatggaaatagtaccaaaaaaaaaacaaaccacaaaaccaaacaacacaacaaaacacaa

SEQ ID NO: 682689 - DNA, 456 bp, Homo sapiens
  misc_feature (103)..(104): n is a, c, g, or t
  misc_feature (215)..(215): n is a, c, g, or t
  misc_feature (250)..(250): n is a, c, g, or t
tatccgttgtgcgatggcaatcccactttatggcacctgatcactaaagtcctactttcgtacctgcttccacccgtcggtgtcgcagtcaagctcccttctnnctttgactctttgaatggtttccgaccattctgagggaaccttcgagcgcctccgatactctttcggaggcgaccgcccagtcaaactccccgtctggcatgtcccccggncggataacggctgcaggttagaaatccagcaatanaggggtggtatcccaacggcgactctgcattaactggcgtccatgcttcttagtctcccacctatcctgtacgagtattaccgtatcgcagtaccaaactggagtaaagctccatggggtctttccgtcctgcgcgggtaaccagcatcttcactggtacttcaattatcaccgggtgcattgttgagacagcatatttaggatcc

SEQ ID NO: 682690 - DNA, 117 bp, Homo sapiens
gagaagtgaggtcctaggtggaggtagcagaggacggagccccacaacagagctagtcggtcacagcctcggcaacaccaaccctaacttggcaaagaccgccggggacatacataa

SEQ ID NO: 682691 - DNA, 1355 bp, Homo sapiens
  misc_feature (287)..(287): n is a, c, g, or t
  misc_feature (731)..(731): n is a, c, g, or t
  misc_feature (753)..(753): n is a, c, g, or t
  misc_feature (917)..(917): n is a, c, g, or t
  misc_feature (999)..(999): n is a, c, g, or t
gccgaggtccccgtgccagatatgcagtcggggcttcccatacattccacacccatctgcgccctctgttcgcctcttctccgggagccagtccgtgcctccgccgccgtcctaggtgctcagtcgctctccctccgacagaccggtgtccactatggcttgcgtgctcctcgctcctcctaccgtcaggcatgttcgtgctggtccgcgtggcgtcctcgagccggccgggctcctgccgcgaggcgactggttgactttacagttccacgcactgctaccatacnagcccctcgtggcgagtcgccgcgtgtcgccgctctcatttagcgatcacagtcttgccttcgtatccgctcctcagtctcctcggcgtgccgcgctcgttgctattgctctcggcgcttccatcgttgtcgcgcttgactggccgttgcttggaccgtcacgtcgcttgccccgggtgcgtttgctgggactcccccttgccaggggtagcttgcggtgtttgtgcagcgtttgccgtcgggcgttgcgccccgggacctggcaccatctgctacacctatccgttacgatttcccacggagagccattccccgaccacctcagaccgtccagaccatagggtgttgtgtcaaggccgttggccccagtcgccagtccttggcagagtgaaaacacctgccttaatcgtggccccaaacaacaatttgaggcactcagaaccnttgaaggggtgttgtcgggtcnttctcccccctttatgaggataggccacaatcctccaagtaaacactccaggaggcgaatcaccccttggctttgtgagccacgggttaaggcccctcctggggagtgacccaaagggcgcttgccgaaattgaggacggccaacgagaaacgcggcccgattncggattacggggcccgagcccgcgtataggctgtgggggaagcacctttccattaaccaggacaagcgcaacagtgcaacgnaattatgcccagatggggaaccgcccttttgacagcgcccaggtgtcaacacgggttttggggaccaccatgacgttaataaccccataggcaggaaccattagaaaggccccccggtcggattccgcaaggtgggttgaggaaatgttccgccccgaaccaagaaacaccgttgttgacccgaacgtgcacccattttcattgagccggccctttccgggggaggaagacaatttcggccagggcgaagcggcacgaactttgctttgtcagccacgtttaagcaacgagggaaagtgcgtccgccaaaataaaaggggtttccccttgagaaaacttttttttattccagcgac

SEQ ID NO: 682692 - DNA, 899 bp, Homo sapiens
  misc_feature (666)..(666): n is a, c, g, or t
agcgggggttaggcgctgagacggatttggcggtgagatcgctgtggccaggctgcagctgaatgggcctcgtgaaacccgggaaactgtatagcaaatcacacacagaaggatcttgcgcgcattccaggaacacgatcgagcgcggctactcgcatgcctccatgtaagtttgtcgggtaacgcccaagcgagccacgcgagggcgcgtggcagtgacatggcgcagcatgcaaaggctcgtcgtagagccttatggccgcgaggccgcgtgagcacagaacgctggtatgctgccggtgagatatataatcgagacgctgcgtcgtatggcagctcgatattacagaattagaaagtgggaggggaatacttatgggatgggggctaagcgtggtgatatgtaacgaagtgtaggagagtgcatacggatctagggagtaatattacggtagaggcgttgatatgagggaattggttgcttgggggaattactgccttaggaagaggtgccagcaaggggggtgcatgcttcaaaggaatgctgggggtgaaaatcctaaacatgggtagaatggcagcatgcaggacttggggttagggggtgtagagagattgtagggacatttccagtggcaagcagggaaagacagagaaggtaggcgntgaagcgaaacttgccagggcatataggagatccactttatgcaaagggaagataaactcttgggagagagtgggggacccgtggatacaagtgagatataggaaaaggggcgtaaacgcgtcccgggagaaataatgcgagatgagacgtgggcatacaaatagaataggtttttgaaacagatgggctctaggaacaagataaaattgtagtaagatggatggcaatggtg

SEQ ID NO: 682693 - DNA, 182 bp, Homo sapiens
ataaagggcatcatgtattctacagcatactacaaaattctaaaatatataatattatgccctagatattcatttcctatattattggaaacacctcagaatgcttttttatagctctcttaaataattatattatccccagatttttgaaaggttagatgtactttgatttccatgatggc

SEQ ID NO: 682694 - DNA, 863 bp, Homo sapiens
tggccctcaccctggcgaaggttggacacatacgagtacagcataggtccgggataagaagtaggggtttccctggcatccttcctgcccctagcaacctctcgatgctcgactcatcatgcaatcgcttgcacgatgccaaattcgcctcgtggattactttgagagaggggagccaatccagattggtgcgtgcaggtacgcgggtgtgctagaccacatccaatggtgctggactggacatcatgtgaggatggatgagcctcttccaaacgtgcgagcccttcaaccatccgtcatagaggcgccgatattctgactgcctagggtgagctcacgcacacaaatccgttgtcatccggtatgctgacctggcgacgatgggactcctgtgtactcgttgaggcgcacatagcgctcggcgtagcgtatatcttgccatgtacgccacagtcgtctggaacggagcactcgtccaactgataagcattgtcctaattactcctttctaaggtgcctggccaatagtggaacgccttgggcttgcccatatagggctcgaggtaggtgtgcccctgggcaaaagggaaggctgacgatttacacacgagaaaaggagtgcctgcgcgatgtggacttcgccttggcacacgtcctggcacggcagcacctttgcgtggctagcgttgctgtgcttcccttggttgtaactttgttgcgacaccgtgttctttgctttgtagttagcccggcgtagcttaccgcttactagtgtatgtgcttggggtcccagtaggccgggtacctgtttgcctttgtggcccttttcgtatccttgcttcctctttcaagtaggggggggg

SEQ ID NO: 682695 - DNA, 823 bp, Homo sapiens
ccatccttttccttatactaaaattaactcaagatggattaaatatttaaatgtaaaacccaaaactataaaatccctagaagaaaatcttggcaataccattcaggacataggcatgggcgaagatttcatgatgaaaacaccaaaagcaattgcaacaaaagcaaaaattgacaaatgggatctaattaaactaaagagcttctgcacagcaaaagaaactatcatcagagtgaacagacaacctacagaataggagaatatttttgcaatctatccaattgacaaaggtctaatattgagtctacgaggaacttaaacaaatttacaagaaaaaaaccaaccccattaaaaagtgggcaaggacatgaacagacactactcaaaagaagatgtttatgtggccaacaaacatgaaaaaaagctcaacagcactcatcattagagaaatgcaaatcaaaaccacaatgagataccatctcatgccagtcagaatagtgattattaaaaagtcaagaaacaacagaggctggcaaggttaaggagaaaaaggaacacttttacactgttggtggaaatgtaaactagttcaaccattgtggaagacagtgtggtgattcctcaaagatctagaacagaaataccatttgactcagcaatcccattagtgggtatatacaacccaaaatataaatcattctattataaagatacatgccatgttgtttcccacagcactattcacatagcaagactggatgaaccaatgccatcaatgatggatgcttacgaacagtgggtccctcctggaagttgccgtcgt

SEQ ID NO: 682696 - DNA, 377 bp, Homo sapiens
gatcgtttatatgactctataaccgcacctatccatgatgtgattacatgtgcggaatgtaatcaaagtacaggctcagaatagatactcattcaaatgtagtttgtgtcttagactaaaaatatcacagttaaaaatattcttattgaaaggccacttaatcttttaagtatgcaggacaatgatccagatcaaagcaccaagtacaatgaataacaacactaacagatattttcaaagcctattaaattttaaactcaagagatggaggatagaagacagcaaagatttaatatttgttaccaatatgccacaaatatagttctcagcccaataccaaatgagatgaacacagcaatactttgcatttctatgac

SEQ ID NO: 682697 - DNA, 295 bp, Homo sapiens
gatctttcttcagcttcttgggcaaacaggagctttcctgtggactcagcttgtctttaaatcctgctgtgaagccaagaactgctctggctccagggcagctctccagctgaatcccaggtgttcaggaatggaacccaattttccagtcgattcctggcggtggggctggcatctctgaaggaagcatgagggcccccaggtgatcaaatgtcccactgggtctagcttgggaagagtaaggcgcattgtgggacgattccgcgtggggaaaattgggcaggaagtggggaat

SEQ ID NO: 682698 - DNA, 165 bp, Homo sapiens
agaggatccttcgctatcatcggcaccaatgaaactccatgagtacttacagagctgtattgaagtgggggacacatgtattggtatgccctcaaccgggtggaagaacaaagttttcaagcctcgtgctaggctatttttgcccatctcttgcggtcccagtct

SEQ ID NO: 682699 - DNA, 324 bp, Homo sapiens
  misc_feature (282)..(282): n is a, c, g, or t
cttaaacagcagcaaacgcttctcacagttctggaggctgggaattccgctcaggatcaaggcatcagctaatgcagtttctggtgagggccctcttcccagtttgcagatagatgtccttctttgtcctcacatgagagagagatcaactctcttatgtctcttataatggcactaaccccattcatgagggctctaccctcatgatctaattacctcccaatggccccacctccaaataccatcatattggaggttagggcttaacacatgaattttggnggaacacaaagattcactccatcagcctctgtggggatcctc

SEQ ID NO: 682700 - DNA, 726 bp, Homo sapiens
cgaggatggccgtcatggcgccccgaaccctcctcctgctactctcgggggccctggccctgacccagacctgggcgggctcccactccatgaggtatttcttcacatccgtgtcccggcccggccgcggggtagccccgcttcatcgccgtgggctacgtggacgacacgcagttcgtgcggttcgacagcgacgccgcgagccagaagatggagccgcgggcgccgtggatagagcaggaggggccggagtattgggaccaggagacacggaatatgaaggcccactcacagactgaccgagcgaacctggtggaccctgcgcggctactacaaccagagcgaggacggttctcacaccatccaagattattggattggcgtggcaagtggggcgccgagagggcgcgataaccctcgcggggtgtaccgcggcagagacgccataagacgggacaaggattacatcgccctgaacgaggacctgcgctcttggaccgcggcggacatgggcagctcagatcaccaagcgcaagtgggaggcgagccatgcggcggagcagcggagagtctacctggagggccggtgcgtggacgggctccgcagatacctggcagaacgggaaaggagacgctgcagcgcacgagacccccccaagacacatatgacccaacacccaatctctgaccatgaagccacctgaggtgcagaggccgggcaataac

SEQ ID NO: 682701 - DNA, 395 bp, Homo sapiens
  misc_feature (4)..(4): n is a, c, g, or t
  misc_feature (250)..(250): n is a, c, g, or t
ctgngcaggacggtgtgctgagagaagaatctggggaccaggctggagtgcagtggcatgatctcggcttactgcaaccactgtgttccaggttcaagctattctcccgcctcagcctcccaagtagctgggattacaggtgcccaccaccacgcctggctaatttttgtatttttagtagagacaaggttttgccatgttggccaggctggttcaaactcctgacctcaggtgatttgcctgcctcggnctccctaagtgctggtatcgcaggcgtgagccaccgcgccttgcctaggattcttacagttaaatgttgctgttttaatcttgaaatcttgagaactgaatgggatgaatttgttctgattttcacttctgttttctttagcttt

SEQ ID NO: 682702 - DNA, 234 bp, Homo sapiens
  misc_feature (47)..(47): n is a, c, g, or t
ccttcgtattccgaggatgaacggtgccgtccggcttcgtgtacgtngtgtggacttatgcgaacagctttctatgcgccctcctacacaatcttcggggtgaacgtgcggtattaaacgccgagcatggactggaaggtgtcgttggatgtgaagaacttgaccaatgagaaatacgtgacggctgtgcagtcgttgtatgacgcgaaggggcaggatacggcgtcgtggtat

SEQ ID NO: 682703 - DNA, 245 bp, Homo sapiens
tgtcaacttagagaattggagatacaacagattagatgaaatatgtcagagttcgatagaaatgaagacagctagacagtagtgggagtatgaagatagaaaatatagagccaaaattggattaaatagcactgaaaaaatgaggaaattattggttacccatttattttaaaagccccatcatttaatttctggggggggcgaagttagaaggtaaagctggagaagatgaaggggttacgtgt

SEQ ID NO: 682704 - DNA, 207 bp, Homo sapiens
cgagtaagcggtctacaacactgcattgactccactgcattgaatcttgatgcatgcaatccactgcattaaattggtatcaattacacaatgctgcagggaatccactgcattcaatccggatccattgcagcatgctgcatggattccacttcattcaacctggatacattgccccatgctgcatgcaatccactgcattcactc

SEQ ID NO: 682705 - DNA, 896 bp, Homo sapiens
ggaatacttgtggcgatgcctactgggagacttgattcgaatgcccagttgggccgacaggtggaggaggagggggaggactgacaaatgtgttgcagccagcgagctcctcataggggctccctgctggcctcaggctgacaccagggcctgaggccagaggctactggcgggaggctccagctggccgaagctcccaaggtaggtcactcgagggaaatgtaacagacaggtgagctagagtacagagaatagatgaggagtgggcaagaaggtagcgagagtggtcgcgcaccgtgtcagggatggagagcccgggaaggctgtcgaaggctgtcgcatggaggaagaaactggaagaagttcgggaactgcagagtggagcccccccggatgccaatgtggcgatcacactgtcaggtgacgatgtctctatgacgtgcatcaccagcaaagaggagctgaactgctaggaggaggaggaccctatgaacaaactcgagggccaggaagatcgtgtcctgccgcatctggtgaggcgagcactggatcacccgctgccccttacgagggtacgctggggcccagtgcagaatgagctggcgggcagctgggctgtttactggcgagaaggagcaagctgcgggagaacttagagccggtgtaggccatgccgaaaccagacggggagtatgtgccggcgaggctgtggacggggccaaccgcgcgggacttcgtggcgccaccgtgaatctggtaagccgccccgggttccacctggtacggaccgggaacacggggaagttcggtggccactccgcatacggaaggcaaccggcgcacaggtggtgtaaccccgcgagggccacacgggggggaccccacttgggtcccca

SEQ ID NO: 682706 - DNA, 405 bp, Homo sapiens
ttttgggtgtatttttttgggggggggagggtgggccaaaacatggggggagttttgagttgttaaaaatggttttgaatccagtttgtttgaaaacacgtgggcctttggaccccttataagatggtcataagaccccaaaactgataagctttggtttttttttggtttggtttggtttttgcttcatttaccccttcatgcctaggggtcccttattggaaccctaagcttgtgggagttatttttatcctactggtcaaggtcatcccccagatttgatttttcataaaaaacctttgtggccttcggcataaatggggtaaggggccctccctgaaactgcaatgcagatatgttcagataacttttattttttaattaaaaataaatctttccaaagga

SEQ ID NO: 682707 - DNA, 462 bp, Homo sapiens
gggtgccactgcaacacattggtttagtcagttttcatgctgctgataagacatcccaacactgagcaatttacaaaagaaagaggtttatggacttacaattccacatgctgggaggcctcacaatcatggcagaaggcaaggagaagcaagtcacatattacctggatgacagtgggccaaaaaaaaaaggagcttgtgcaaggaaactcccttttataaaaccctaagattcttatgagaaccatttcattatcagcacaggaaagacccctacattattcattcatctcccaccagctccctcccgcaattctgctgataaagatttacccaagactgggcaatatacaattgaaagaggtttattgggcttacagtttcctcatggctggggaggcctcacaatcacggtggaaaacaaggaggaacaattcacattttatgtggatagcagcagac

SEQ ID NO: 682708 - DNA, 190 bp, Homo sapiens
taacgatatatggagtgtcagcacggatgctcacgtgtcgagggaacttgtccagtgatgtgcatgcaccgcattggtgaatacacgtcgaccaggctccatctttccgagcttgggccgtcagcacggtgctcacgtgtctgacggaacttgtccagggaggcatgcaccgcagtggtgaatacacgta

SEQ ID NO: 682709 - DNA, 532 bp, Homo sapiens
tcggagctccgggcactcagacatcatgagttggtccttgcaccgcccggaattgaagtatctctacttctatgctcttcttatttcgctcttcaggatgtcgtagcatatgttgctcaccagagtacaacgtgctgcgatcttagatgcacagattcggatagttattgtccagagtacctgtggcatttgcagatttcctgtgctatcgtgtactcgaaaccaagagtatgacaaggactctacagtgcgttggaagagcagtcttacatcaagttgaaaacgaaaagcatcagaagtcaaacagctgataataagcaatccaagtcacttataattcctgatgaatcatcagaagcaaatatgatagacgcgtgttactttgaatgtccaggaagaatgttaggaacgagaattagtgagaatatgaacgcgatcgacttatgtgaacacatgtactctaagtattcgaatagttggcggacagtatataagttcaaataatcaaaatgattgttaatctgaactgacg

SEQ ID NO: 682710 - DNA, 1639 bp, Homo sapiens
  misc_feature (32)..(33): n is a, c, g, or t
  misc_feature (810)..(810): n is a, c, g, or t
  misc_feature (1327)..(1327): n is a, c, g, or t
ggctgcgtcattcgttgtctgatctcctggtnngcccgcgtctcgtccatcacactgtggtgtctgcttgctatgtgttcgtctcccctgccctgggtgtactcggtttggtcaccagtgttcggtgcggaatgtcttgagtgtctttctctgtgtctctattgtttgctcccccctctggggagtgtgtggctgtccctcccctctttctcttggccctcttcttccccgtgtgtcctatttttatgggggggggtgtctcgccccaccaaagaacgcgcctccctcgttgtccgtgggtgttcgccccctctcctttgttgtggggggggagatcctctcccgcggcgccgcttttttggttcctgttaaataggtggggtgttcgcgcggccccttgggggcctttttttacttgtctggcttctatattcggggcgcctatataatgtcgacccgcagtgcgccccaccccagggttgccccacctccagacagccctgttgaaggaaccgatatgtgcgctccgcgtaatatgaagcaattggtgggaggggtatttgatattggcctccttttaagggaagtcttccgtcccagacctcgctttgtgtggcagccccccaaaaaacgggggggttggtaaatttcgttgggcgtttgaacaaatgtggggaaggagcaacccacgtcaggaaggaaaaggaaaggcgccctcggtggaaccctccctatagagggcgcggtggccccccctgggagagaattgcgcccacaattctggaaacccatcgggaggtctttgacggngaatgttttcccaaagggagatactttgagaagagttgtgaaagtgaatgaataagggacaccgttgtttttaaaaatgtgtaatgtttgtggagatcgccttctgttccaacgtggcacccccacagtttggaggaaagaaatagctctgggaactttccccccgtggccctgttgggttctctggtggtccctggggcacacatatgagagtttctacatctccccacactctcacaaggtgtcacaccctgggctgagagcccccgacgccctggagaccacggccgccacacactcttcacattcacgggcttctcacgccaccccccgcagggaatgggagattcaccgcttctatatgaatataccacttgagataacccccgcggctaacacagtggcccccgcgggttcctctcctaagaaaatgtggcacgcccacttccacgcaccaccacggctttctgcacagccaattcttctgagaggggtataaagcccgcgttgggaaggnctccacagccacggccacggagaggtccccaaggaccacggagacttgcgaccctctgaaagcccacaggaattctcacacttgtggggcctccctctgtcacgccttctgctgtctcgttctcacgaagccacttctggaatgaagtgtcccgaccacccctctctcggaatgcccgggcacaggagccaccccacggctggtcagactctgatgttgggtagctggcctctgtggggattgtaagtgcccctgaggccctctgtactagaaactgctcttaataataacccgtgattattggttgcccgc

SEQ ID NO: 682711 - DNA, 535 bp, Homo sapiens
cctcctagccaagatgctcatcgtaagacaaagtccgtcgctggacgtgtctaggtgccagagctcatccatgccaaaatatgcccgggctatgcggccagatggtcctagaccaccatttagtactatgagaccagcttcttcacaggttccacgagtcatgtcaacacagcatgttgctaacacatcaacacagacgatgggtccacgtcctgcagctgcgagcctgagcaactactcctgctgtccgcaccgttccacagtataaatatgcggcaggagtgcgcgaatcctcagcaacatctgtaatgcagctagtcacaggttacaatgcaacaggctgcggtccatgtacaaggtcaggaagcttagactgattccatgtgggcatctgcccctcctcaagagcaaaagcgaatgttgggtgaacggctggttcctcttattcaagccatgcaccctactcttgctggtaaaatcaccggcatgttgttggagattgataattcagaacttcttcatatgctcgagtctc

SEQ ID NO: 682712 - DNA, 201 bp, Homo sapiens
ttatcaacctaggtacagaatgagtaccaaagtatggagagaggaagaaagagaaactagaaggaatagaactaacgatgtgttgccgaggatggggacagtgggcagatgccagaggacagtagaatgtcatttttcagagaggaagaataagttcaggatatctataggacaacatggtaccttagggtttcgatgaca

SEQ ID NO: 682713 - DNA, 338 bp, Homo sapiens
tggcggacacgtcggacacgaggaggagacaagatgaagccacgactaggcacggaggtcagacaggcagcccgggccaggatggttagtggcccaggggagagctgcaaacctggggacgcaaggggctggtcggcgagtgcccccgggaacacccactccggccactacgtgtccggccacgtggccggacacgtagctgtttctgtgtgtgtgctgtgtgctaggtgtgtgtgctgtgtgtgcatgtgtgtgcgtgtgctgtgcgtttgtgtgctgtgtgctcgtgtgtgtgctgtgtgtgcgtgtgtgctgtgcgtttgtgtgtgctgtgcgtt

SEQ ID NO: 682714 - DNA, 1004 bp, Homo sapiens
ggatgcttttttagatatagtccgaagcttcgttctcgctggttgcctgctccaggtgtctccctcagttagaacgtcaattccaatcgcctgtttgttgctcccttccatatgtggatagtaaacttccttggtacctagtttcctctagtcctttccggtacatcctaagtcgagtaagtacgcaggcggtgatcctgggttgtaaacatattttccaacacaatggtataactagcttactgacccatttaaggctctattttcagagtgtacattctataagaaaccaaaggttttgtaccaaaaaagagtcatgtcttgtgttctcggatcgctggaatttctccaggcaatttacaatatatcttagtgaaagacgatagtacagttagtcttagtactatctgattagcatctaaccttccctttgagaccgtccgctaaacatgctacacttcacatgtcctgttaagatacgtatccacttatctccaggcgttccgaacttgtgtaaatccaggtaccttcacaggtcgttcagagaatttgggagcctcgttccacatcacgttttccccagcctcagcagcacaataacgcatatcagctgacaagattcagtgttccacgttctcaaggcctctccgatagttaatccctccttatcgcacacgatatactgccctagctcagacccgtctcatacgttctgtgaaactgacacgagacaacctcacatttggaggctaactggtgctccttatctttaagtcccaaaagtacaccgtatttaccaacacagatccaaaacctcgtaactcctttctcaaaatcctgtaatgccctgtcaattgcattcagaagaaaaccaccttttcatcctttctccctttaagagcacattggtaagagtgtaaatcccagttctaccaccttagtaggtttatttcatttgtaacctctatctcatttgtaaaaaaaaagaatcatagacctgcgta

SEQ ID NO: 682715 - DNA, 518 bp, Homo sapiens
accatgttgccccggctcgttcttgagcgtctaggctcaagagatcctctcagagctgttgagcttacaggcgtgacgtcaccgcgcctggcctatccttccttttggcggtgagcagcttacagaattcttttttcacagtgctgctgttgttcctattcttttttggtctgcacaatgaaaatgaaatagtgctaaaactatctagttctgagtggaaatttggaatctgttacagtagcctgataactcaggtaaattattatggctctacattagctgggcagttgagattcgaagaatgattgcccagcacttgaacagactagaagggtctgtttaaacactcctaattcctggcggttcatttgttatttataaaacacatactttgtggccatgagcgcacgtggctcacgcctgtaatcccagccctttggaagccaaggcgggcggatcacgaggtcgggagatcgagcccgtcctgtgctaacacggtgaatagcctggtctctact

SEQ ID NO: 682716 - DNA, 507 bp, Homo sapiens
gaaaatgtgtcttctcaaaggctgcccctactccctattgccattcagctgcattccatcatcctcttcctcactggtcgctttttataccacctcaaaagggggctgagctctgggaccaggaactgagacgcctctggacacgcaccagcagcaacgggtgcagtgagggctggctagcttctccccagtctccttaaacacccagccacggccaagggcttgttgaggttaatgagtttctgtttaatctgcttctaggcttggggattttctctggagtgttgtttttgcagtgcaaggtgagtcggtgtgggtgtttgaatgctgctgtttgcctgtttttaaaagcctttttaccctcccatgggggttcttcaacaagaaattttaccttgtcttaaaccccacattcaaaactggtgcaggttcccaaggggaattaacccccgtttataaggggcctgtttggcaaaattgttcgttgcccatggtttttaaactctt

SEQ ID NO: 682717 - DNA, 235 bp, Homo sapiens
ccactagtgtaggcttaccaacaaatcagctgaacttgaatttttttttttgtgctgttaaaacaagagcaagcctcctttcgtgggcaggaaaggaatgtaaaaaaggaaaagcattaaaaactgtccaattcacattggttatccgtttgcttttttttgaaagcttggggaaggttataacggggttggaaacatcaacaccttgccttgcataagtgttaagactggaggg

SEQ ID NO: 682718 - DNA, 867 bp, Homo sapiens
  misc_feature (44)..(44): n is a, c, g, or t
  misc_feature (86)..(86): n is a, c, g, or t
  misc_feature (115)..(115): n is a, c, g, or t
  misc_feature (117)..(117): n is a, c, g, or t
  misc_feature (140)..(140): n is a, c, g, or t
  misc_feature (142)..(142): n is a, c, g, or t
  misc_feature (157)..(159): n is a, c, g, or t
  misc_feature (162)..(162): n is a, c, g, or t
  misc_feature (174)..(174): n is a, c, g, or t
  misc_feature (177)..(177): n is a, c, g, or t
  misc_feature (194)..(194): n is a, c, g, or t
  misc_feature (201)..(202): n is a, c, g, or t
  misc_feature (207)..(208): n is a, c, g, or t
  misc_feature (212)..(212): n is a, c, g, or t
  misc_feature (216)..(216): n is a, c, g, or t
  misc_feature (220)..(220): n is a, c, g, or t
  misc_feature (223)..(223): n is a, c, g, or t
  misc_feature (245)..(245): n is a, c, g, or t
  misc_feature (260)..(260): n is a, c, g, or t
  misc_feature (262)..(262): n is a, c, g, or t
  misc_feature (264)..(265): n is a, c, g, or t
  misc_feature (275)..(275): n is a, c, g, or t
  misc_feature (279)..(279): n is a, c, g, or t
  misc_feature (281)..(282): n is a, c, g, or t
  misc_feature (284)..(284): n is a, c, g, or t
  misc_feature (292)..(293): n is a, c, g, or t
  misc_feature (306)..(306): n is a, c, g, or t
  misc_feature (308)..(308): n is a, c, g, or t
  misc_feature (310)..(310): n is a, c, g, or t
  misc_feature (312)..(312): n is a, c, g, or t
  misc_feature (314)..(316): n is a, c, g, or t
  misc_feature (320)..(321): n is a, c, g, or t
  misc_feature (337)..(337): n is a, c, g, or t
  misc_feature (340)..(340): n is a, c, g, or t
  misc_feature (342)..(342): n is a, c, g, or t
  misc_feature (345)..(346): n is a, c, g, or t
  misc_feature (374)..(374): n is a, c, g, or t
  misc_feature (384)..(384): n is a, c, g, or t
  misc_feature (431)..(431): n is a, c, g, or t
  misc_feature (433)..(434): n is a, c, g, or t
  misc_feature (442)..(442): n is a, c, g, or t
  misc_feature (451)..(451): n is a, c, g, or t
  misc_feature (509)..(509): n is a, c, g, or t
  misc_feature (528)..(528): n is a, c, g, or t
  misc_feature (591)..(591): n is a, c, g, or t
  misc_feature (860)..(860): n is a, c, g, or t
gtggttgactgggacttcaccttttttaaccaaacaatgttaanataaacatatctgaatagaaaactgtatctggttcttttttntgtcaaatgtaaaatactttaatagagananttccatttttctgcatctatttngntgatattacaataannngcngtgtggattggngancatagctagtgagaatnttaggtnntgtcnntttngggngagnttngcttttccatatgacatcccanccatgatcacataantncnncatgattatncggncnncngtcccccnncccagtcccatcncncntncnnnttcnngtccggcacatatatnacncnctnnccccacatcaaacaatataacaccaatntctactaacntctactagcacagtaagggttactaaagcttagctaattattaaccncnnccccgccnagttccccnatgccttctgtcacccagaatattctctgtgccatgccagccggttgacgccccgtcnttttcaggattctccaganttcatacgtatttccccgtccactcctgtcgaaccccaccattccttattgactgtggttgancctcccaacagaccttcatttatgagaacataagcatatactcatcacaattttgaaaagaatggaagtccttcatacatatcagtttttaattttatccaatcattaattttctgcagagttgttttttcttgacttaatatttttgcaacttttttcattttttgttcatttctttctatgtatttcaacccttccaactgcagctgatccagcttttcatttcgactttcatctagaggtatgttttcacacattacaggattgantctaaaa

SEQ ID NO: 682719 - DNA, 361 bp, Homo sapiens
ctcccttcaacaatggctaagctttagtctgtaaacataaactctgacacttgaacccatcatcaattaccaacagattttcttcatcactgtctggagaccacattcatgatttctataagacagaaataaagcagataaactatactgtatgctgagcacagacttgggaacataatggtgtacatgaaaactactgacaacactccagtctctagagactagagggagagaaagtattaccaacaatgtactgtttttactgtagtgtaaagagcaaaccaagtgtccaagtgtcgacacgaaagtagtccatcgtctcccagtttcctgtgagacaggctgatacttgtcagattaa

SEQ ID NO: 682720 - DNA, 157 bp, Homo sapiens
acacaggactattctagccatgcactactcaccagacgcctccgtggatcccagcgagtgaaattgaggcatctgtggaagatgctccaactcctgagaaacctaggaaggttcatgcaaagtggatcctggacaccgacaccttcaactgaactgg

SEQ ID NO: 682721 - DNA, 390 bp, Homo sapiens
ctggcccctgatttccccgaccacctcctctttctcagctagcgaagtttaaattagcaagattattcgtttacggcagagaagaaatgttagcacttttccttaaagacaacaagataccttccgaccttctggataaagaatttctgcctatcctccaggaggaaccccttcccaccattggcttcctggtaccctttacagaagaagaacagagaaacttttccatgtctgtaaatagtgctgctgtcctgagattgacaggacgaggaggaggaggaacagtggtgggggctcctagaggtcgaagttcttcaagagggcgaggcagaggcagaggtgaatgtggtttctaaccaaagaagttttgatgaagtagagggtgttttt

SEQ ID NO: 682722 - DNA, 147 bp, Homo sapiens
gtaggacagcgttgtggaggtgaattctgagatacttgcgcccccagcaactaggcaggccacttccggtattcttcccgaaccttcttgttgagcaggcagtgcagcaggtagaggaagatggtggagcccacgaaggaggcagat

SEQ ID NO: 682723 - DNA, 321 bp, Homo sapiens
gggtgtgtatttcagtgcacgagggatggattctgcatatcattgactaggcctcattgagctgtcaccaaactcctacctgccagcggacgacgtggtcagcatcatcgaggaggtggaggagaagcggaagcggaagaagaacgcccctcccgagcccgtgccgcacaagtgaaagaaaaagaaaaaaaaagaaaaaaaaaagaaaagaaagcaaaaacaacagaacagaaaaaacgagacagcacagacgagaaagaaaagaatttaaacaaaaaagacagaagaacggcaaagcaacaaaacaacataacgaccaac

SEQ ID NO: 682724 - DNA, 1072 bp, Homo sapiens
  misc_feature (1)..(1): n is a, c, g, or t
naggaagagagtatagcggtaatttatggtgggtgtggctgcctgcctgggttcgtctgggtatttgaggttttcgttctttcatcacagtcgactggccttgtgggtttcagtcggtggactactgccagctgttgtgcttgaaccatcgcctgctgacctcaggccctgttaggcatggccggatctactgtctgatgtccgtaacatcttccgtggcccagcgaactcatggctcacttgcaccagtttggctggctccttcagtgggcatcagggacctcgattgctgttgtcgcgatcctggacgtcgggcgcttgccggcagagtgaaggtgggaaggagtgaccaagctgcgcgagggccggcgcaaggtggcccggcagcgcagcttccggatcacctttgactgagcgacagcagccctggggccccgcaggtcccttagggagttacaatgaggggaatgcgcccttggttgtctgtagtttggggttgctggcaagatactttgtcatgtttgtttctttctttcacaggactgcccttgacatgatcgctgtgtgctttgcggttttccatttaggaggctattctgggccttcatgcccaggcagcagcctcatgggtgtggcttctgtgacgtttcatttgagtatctttggcccacttttcacctactgcgaccacccacctcatcctggctcagcctggtgatggagaagtgctgatggtcatggtcccagccagggtcgtgtgggggcagccactctccatccaaagcatagtcatgggtgtcatgaaaagtatatccaaatgtaagagaaacctccaagatccacgggcgcagtggctcacccctgtaatctcagcactttgggttggccaacggcgggcatgattcgactctgaggtcaggagttcgagaccagcctggccaacatggtgaaaccccgtctctacctctaaatacaataattagtcaggtcgtggtggacgcatgtgatcgcaatctcaggctactcgggaggctgaggcaggagaatcacttgaacatacatggacgggtgt

SEQ ID NO: 682725 - DNA, 1289 bp, Homo sapiens
  misc_feature (98)..(98): n is a, c, g, or t
  misc_feature (101)..(101): n is a, c, g, or t
  misc_feature (108)..(108): n is a, c, g, or t
  misc_feature (112)..(112): n is a, c, g, or t
  misc_feature (118)..(119): n is a, c, g, or t
  misc_feature (124)..(125): n is a, c, g, or t
tgcagcctctgattaacgacggaggcagaacttggcaaatggaagagcaggagcacctcaggaagctggaggctgagagacttcgaagaatgcttggnaanggatganggantgaaanntgttnngaaaccaaaacactactgtcacgcagactgactctgaactgactggcttcgctgctacgactacaccgactgaccacggcgatttgctttccatacaaacgactggacacacgactgacactgtcgacggacacgactgtcccaggacagacgcaacagcaacggaacgccagtgacccctgacgacgcaaccgacggacacgaacggtagacagttcacggcggggacggacacagacggagacgcgaccacgcccagactagccacttggacctggaactccaacgtggcagcgtgaggacagccaaccgagacagccagcaacaagagcacgaggcagactcctgcggaccagggcagcatcacacgcggccacggaacagagctcgcgaaacagctaccagaagcacgagctagacctacacagtacgcagaccctgaatccataatgaggaacagagatctcacgccgccaggacagatcgatggaagacgcagacacagccggcggcgcgcacatccaccacgaagcaacacaaccgacaatctcgccacacggacacgacgcaacaacacgcaccaaccagaaggctaaacacgagcgaacacgaaagagcgcatcggcaacagcatgaaccaacaagaaccacacaggcacactcgaactcaaactcggacgcgagcaccgacacctcatcatacgcccaaaaaggaacccagcacatctgccagagcacgcaacacacaaataggcaccccggcacacgagacagcaggacagagtggccgaaagaggagaggaaacagcgagacccgggagcacaggcagagcagcgaacaggagaacaaaagaaacgaaaacacaaaggccacgcacaagacagccaagagaagacaagcaaccagagtgataaccaaggcgacaggcccgcacagcgcccccaaccggaagaaaagcacccaaagaaagactagaaggccagcaagagaccaccgacgcgaaaacaacaactgcacggagtgtaaagaagcagacaacagagacaacgacgagacaaacgcagacgccaggagcgaggacagcacacacaggcgacgtaacgacatcctggagagagaaagaagaggagaacagccgcgagcgcccgaggagagcaaccaac

SEQ ID NO: 682726 - DNA, 716 bp, Homo sapiens
  misc_feature (139)..(139): n is a, c, g, or t
agcggttaggtgtaagaattaggttgagctgagttttggtttgtttgtttgttttgtttgtttgttttgttttttgcctgtgaatgtccaatttctccagcacaatttgctggaaaggctatttttcttccattgaatngcttttgtaacttcattgaaaatcacttgggcatacttgtgtgggtctatttctgggttcgttcctctgttctattgatcgttgtgtgtattcttccaccagcatcaaacagtcccaattactgtagctatataataagtcgaaaatcaggtagaccgattcctctcattgtgttcttccctttcaaaatggtttcagctattctagttcattgcctgtccatataaattttagagtagtcttgtctatatctacaaagaaatcttgctaggatttctaataggaatttcattaaagctgtgtatcaatttggcaatgaattaaccctttgctgtgctgagtcttatgacatggtttgtctctccatttacttagatctttgatttcttgcaatatttcgtgttttcagcatgcaagtcctgcttatatattagatttgcatctgtattagtttgtgatggcttctgtaacaaaatactacaaaccgaatagcttaaacaacagaaatttactttctcacagttccagatgctagaaatctgaaatcaagatatcagcagagttggttccttcctag

SEQ ID NO: 682727 - DNA, 96 bp, Homo sapiens
gcctttgccacggcttgcggcaggagtttgcagccagccgggccgcagctgatgcccgaggacgcgctggacaccggtctgcagccgcttccaacc

SEQ ID NO: 682728 - DNA, 1489 bp, Homo sapiens
  misc_feature (78)..(78): n is a, c, g, or t
  misc_feature (1292)..(1292): n is a, c, g, or t
gacagaattgcggcaagtaaggcaggccatcggcggctgcggaagagttgtgcctctcgacttgtgtctgatgagatngaaggaatagtgatagacttcgctattcacataggtcggttgagatggtactttgggtagacgaagaatgggcgtaaggaagttgtgtggcatttgtgcaaggagaagcatccatgtgcgcaagtgggacgagccatcacgccggatgttgtgagaatgttcacggtgtaatactcgatcagcttcgaaccgcagtggatccacgacgtcaaccttcttctatctatactgccgcgtctgagccaggtcgctcctcccattgaagagctttaccaccaacttgcttgacacccgatcgagaccgcgtttgtgcatccgcacacaatcaaggtttagcctacacgaattagccttcaagtggctttgagttccccattatttgcttatcaaggaccccacgggagcacccacaaaggccaccccgaaggcacattcaaaaggcccatcaagaacatgtgctattgcgttcgcagagcggaccctgaacgcaccagcactaaggagtggcagtctagcgggcacaaaagcgggttgtacaaggtcccaccaagagctacacagccaagagaaaccgagaacggtggaatcccaatttcttgaagaagcagagaagtcgtaagttttgtcagttctattcaacgcttaagggaaccttgggcgccatttctgttgacttgtagaaaggcgctatatccagaaggacgattacaacggcttttccaggtccttgtgcgtaagagggtttcccattatatgacggcaccccttcggggcactggggatctggagtgtctttcttccccgacttctcgtggattagccttattggcggccttggaggttcctttcttctccttactttgtgcctcattttgccctccgcctataggtgtgttgtcctggtggacacaaaaggtttaggcgaagcgggggtccccccactgatcagaacgttgtcgacgagcttttgattctcccacatagggtgcagagaggcatcctgggcatctaggggccacactctggcgtttgagccagaggtccatccaccgttttcgcgtaccccactcgtggggcattaaacccggttgttgtcgccccgaagcgtttggtatctggccgcttgtttctgcccagacatagggagtttcgaccaacggcttccgggggatacccgcaggaggaacacagggtgcgggcgtaccaaatgagancgttacaaaggcaattcgactttgcgaaaagcgagccttaagatctatatgcccgcacatacatcgaaatttttaacgagcaagcacctggacacaccgcgactgttactcgcgagccatgcacttagagtccagagcgcccgtttgacaatatatggggagcttttggcccaacctcgtactccaaagggcagcgg

SEQ ID NO: 682729 - DNA, 166 bp, Homo sapiens
gacacttgtgctagctacaaacgcgtgacttgtttactgaagacacatgggatccaccttctgatgaacaaatctgagatgaaggcacgcattctagcattactctgcaccttttagcagaccattctggtctaggcagatagtgagattagctctagaagtcgaa

SEQ ID NO: 682730 - DNA, 214 bp, Homo sapiens
  misc_feature (6)..(6): n is a, c, g, or t
  misc_feature (14)..(14): n is a, c, g, or t
  misc_feature (52)..(52): n is a, c, g, or t
  misc_feature (169)..(169): n is a, c, g, or t
  misc_feature (172)..(172): n is a, c, g, or t
  misc_feature (209)..(209): n is a, c, g, or t
cctgcnagctcgtnagcccgagcgcgaacaggctgcccgcgaacacgtagcngccgacgctgtgaacgtccgacatccagaatgcgaagatgttgtacgagccccatgtctgattcttcaggggtgccaaatcttcgttgtacagacgttcactgtaaccatttcgcangcngggtcgccgccctcgccgccttcttccgccggattanggctg

SEQ ID NO: 682731 - DNA, 198 bp, Homo sapiens
ccagacctggctctacattggatatggaagaaccgggagaggatccttcagttctgggccattccaggaccctccagaaacacagtgtttcaagagaccctaaaaaacctgcctgtcccatgcctcattgttatttccatcagggttctgcaagacagtgacatctttcacaactgcaacgtctgccagctggctcag

SEQ ID NO: 682732 - DNA, 178 bp, Homo sapiens
ctcgggcctggattcgctcgggttactaacatcatgcagtagcttcttctattctctcttatttttttggaaacggagtctcgctcttgttgcccaggctggagtgcaatggcacgatcttggctcactgcaacctccgctttcgaggttcaagcgattctcctgcctcagcttccca

SEQ ID NO: 682733 - DNA, 100 bp, Homo sapiens
tattgttcccatcagaacgaactataagtggactagctgaaaacgctcccctacataccctggtgatggaggtgaaaactactgatgggagaagactgcg

SEQ ID NO: 682734 - DNA, 234 bp, Homo sapiens
gtgattcccctctgaccttggtgctgttctgggtcacaacaaggatactacagttggtccatagccctgctggttcgatggttcctatgctcagttgtacaccatagggtgcttgctcaggaggacggcctaggtcgaagatccaggagtcacttctggtttgtcaccctggaagtctagacacactgtagtccggagcatgtttcctcatcgcagcacttttcagagtaccag

SEQ ID NO: 682735 - DNA, 390 bp, Homo sapiens
gccaaacaagggccgccgcggttcctgtttccttactggggatttcagggctgggggttcagggagcatttccttttcctgggagtactgaccgcgaagttgtcatgtgccgcgcccttacatgagattgtgtatcctattgctggagactctgtctgacctggcactatcgaatgatcgctggcggcagaggtggcacaggacagtaaaggagatgctgtgctggccttcagcctggacagggtctctgctgactgccaggggcgggggctctgcatagccaggatgacggttttcatgtcccaaagaccgcgatgacatcatattttgattccctgtgattgccatgattatgatggacatgacagactttacccgattggactctgg

SEQ ID NO: 682736 - DNA, 305 bp, Homo sapiens
cgaccggggtatctcatcagttgcggctggtccgtattctgcgcagcaccgattatggttcgcgtaggtggaggatggatggccttggaataaattttgagtgaaaaatgatccctgccgagcaagaggtagaactaacattgaacttagagcgaaattcatcctaccagagggagcatcccagggaatgacccccttccgctcacggggtcagaaggtccaaaccatcttcccgggcagcttccccttactcgttccagctccagtgctagtccagagtaaccacagctgtacatccatgccat

SEQ ID NO: 682737 - DNA, 411 bp, Homo sapiens
atatgctcagcgtagtccataccctctgggatggctggcgagatgagactgtactagtggttcccgaagtaggtccacgggtgtactctgacccaaataccccctcgagagtggtctggcctgtgtctgtggtgacactgatagctgatatcaaggatcctctcgttccctgacacccacggggtgtgttctgaggacagaactcgcggttttcagcggaagtcagcctcattgatctccatggaatctcggatccactcagccccataccttcagctcctcaaggcgcagaagcagcagttgcacctgagcttcgctcaagcccttcccctggctgagctcatccagggcacccagcaaggtgcagacacaggacacggctgcataacaagcttcgatgccacccttgat

SEQ ID NO: 682738 - DNA, 404 bp, Homo sapiens
atcatgctctaacattagattatagtgatagtaggcacaactctaaatatactaaaaatcattgaattgtacacttccaattggtggactttatgatataaaagttgcctatcagtacacattgtatgtcagtaaagctttaccacacaagtggttgtcgcaaaatcaggactgtatgctttttccatactctaatgcccgtttaaagaatattagatctaaacgagcgactcaaatcactttataaacttttgccagaactacctctgtattataatggtatgagttcttagaaatagatatatcgaatgatatctaacactatttattatactcattatttttaagagaccgggtctctgtgtcacccccggctggattgcagtggcccaatcctagcacac

SEQ ID NO: 682739 - DNA, 411 bp, Homo sapiens
cagcaagaggactcgcatgatcccgggccactggcagggggccatccgcaacgaggaggagctgaacaaactgctaggccgcttgaccatagctcaaggcggcgaccttcctaacatccaggccgagcttgtgcctaagaagaccgttagcgaccacatggccacgggcaagtgataggacaggaatctgagctaccggaagcgctctccccagaaggctctttgcagggcccgattaccggttcataggacgagccaacctcactgatggtacgtagacggggaataggcactgaggttgcaagagcttctcatgacagagcgacgccaggatcctaagaggctgccagactgaccaagcttaaggattaagtggatggatgcttactgattcctgcattactgattgtg

SEQ ID NO: 682740 - DNA, 820 bp, Homo sapiens
ggaggctgaggcaggagaatggcttggacccggggggcggaggttgcagtgagccgggattgcaccactgcactccagcctgggcaacagagtgagacttcatctcaaaaaaaaaaaaagtagcctgatgaacagaaacagaagaggcacttggtcaaataagtgtatctaaaagggataataccatcattcagaattcggaccatttaaggagactctgtctagtagcatggtcatctcctgagtctataggccggtcagtgcgtcggtcggtaaggcacggtatcggtctctctgggcgagggagtctccactctgttggcccaggctggcaacgtgctagtcgcgggcaacatctcggcttcacggcggccctcgtgcataccgggggttacaggcatatttcttcgcttgtccatcggggcgtcccatagcgggtctgggaacttgacacggccggttgcagctacacacagtgccacgcagccatgcactggcgacaagtatttacacgtagcaacagttggggatctcgtccaccccatgggtgttgggcaccccagcgcggtggggtcccttcgggaagagcggcccttaagtaactgctccacaggcttggaattgcttcccccgcgcaccttgggggcacattccccccaaaaagtcgtgcctaagagcattctggccacggccccaaaatggaacccccatggtggccacccgccggggaccccaaaggtttatacattcatgcgtctacagtgtacgtcgtcccgctcagagggaacaaggagtcaacagtggggtgatcacatgctag

SEQ ID NO: 682741 - DNA, 908 bp, Homo sapiens
cctcccgtcccccgctgtgtgcctcggtccctcccccgcgggtgtctgctcgtaacgttcttggcccatgggccccgcgcatcccccgttttggatctcccgctgccccatggagacacggtgtccgtgccggaaagaactattcctggttcccgctcttttgtgtgacaaagcgtgctacaggggcccccctcattttcgtgcacgttcttgggggtgtcacgcgcctggctggttaataacgtgtcttctctgacgacacccacaatcttggttgagacagcttcttgcgcagcatcatcccccctctctctggggacagcctttctggcggcgcctgaaattgcggcacaccccctcggcccgcggtggcggcctgcctaatctgaatcccgctcgtcacatcacaaaaggctcttgctgaaagtctgcccccatgtcgctcccaataacttcgtcgcgaaagcatgcttcttacgacgactcacccacaccgtatgtcttattgcaccctattagtctcctccccgccgccccgccttcttacacgactggcgtgagaaacaacacacggcgctctctttgtagacacgagctttgtgtctaccagggcgcgccttattcaaattcggtgcgaccctgtcaagctcccgcgtttactgatgcaacgcaagggttggtggctgacccccccccactccgtaggaaaggaagacaattttgttttggcggccccactctgcctattattatggttgtcacggagtgagcccaccttgatacagggatgatcatcgcctcttgcttgaattcccatttgcttgtgttcatgcggggagcctcctctcccccccacaatttccatccgagggtagctttgcccccccaaaaaagaaacggcaacatgc

SEQ ID NO: 682742 - DNA, 237 bp, Homo sapiens
gtgcatgatagaatcgagctcggtaccttccgtgtgtggaatgacttcagtcacctgtggcagagcccagctcgagcaggcgtgcatgatgagcagtgaggcccaagacactacccagtggcccagcatcccccaaacgcaagctggaagcagccgaggaaccacctggtgaagaactcggcagctctggggttggcaactctgccacccgggcccgtttgctgagttcttcaccag

SEQ ID NO: 682743 - DNA, 214 bp, Homo sapiens
tggaaatactttcttttggtaaaaacacttcacgaagaaaatctaatgaaagtcttgcagaaaatgtaaaatctggcaaaccatatttgggaacttccgcaggaagcaatattgcaggactcaatatgaaaactaccaatgatatgcctattgtatatcctccaagttttgattgtatgagtttggttccttttaatattaatccgcattatct

SEQ ID NO: 682744 - DNA, 104 bp, Homo sapiens
tataggcgctaggtatctgcgcaccagcaggttttttttttttgggtcccaagggctagagattggccttggaaaaagcttgaccagaaaatctctcaaaagta

SEQ ID NO: 682745 - DNA, 258 bp, Homo sapiens
  misc_feature (228)..(228): n is a, c, g, or t
agtgatctagagtgatccacgcatcttggtggctagcactacagcttgtcagtgggctaacgcagtggtcatgctgtaatccagcactttcggaggccaggcaagctgatcacccgaggtcaggagctcgagaacagccgacaacacggaggaaacccacgtctactaaaaatacaaaattagctgggtgtggtggcgcatgcctgtaatcccagctactcaggaggncgaggcaagagaatggcgcgaaccccggag

SEQ ID NO: 682746 - DNA, 469 bp, Homo sapiens
  misc_feature (95)..(95): n is a, c, g, or t
cgccgggaatcgtggttgcccgactcaagtcgcccgcgcgtgtcgcggagccccgcggcagttgtggttgggtggcttctgtgatccaaggaganatgagccaaattgctacagaagttgagtcaacccactgccctcaaatcctgagatgtattcccagtgggaaaaggaacactccttcaggactttgtaccccaaattccacgagacccacagacaccctcagcccagcccagctccaggacagaccataatgaaagatgctttaccttgaaaactaaatggacaggacttgatcacaaagcatcacctctcccctggactccagaggatcgttcctaactgcttacttgacacatctattaggtatctcaaactggaaggtctaaaactgaactctccctcctccataatctgcctccccttagccttcccttcgtcagtaaatgatgagttttttccaaaaaaa

SEQ ID NO: 682747 - DNA, 552 bp, Homo sapiens
  misc_feature (59)..(59): n is a, c, g, or t
  misc_feature (85)..(85): n is a, c, g, or t
  misc_feature (124)..(124): n is a, c, g, or t
  misc_feature (217)..(217): n is a, c, g, or t
  misc_feature (270)..(270): n is a, c, g, or t
caaagaaaaaggtttttccaaaaaaggaaaacaaaggcttggtgaagggaaaggtggtntgcccctgtccctaatcaatctcccngggacatccttgctcatcatagtaccaagtgaaccccanagatccctactaaactggggtcaggaaattcctagagaacctttccggaaaaagtctggaaaaatggaaaaggtggaaaggggctccccctanagagggtgggggtgtagttacccacccagttggccagaaaacctgggccttgnagacccccttagcattttttccctttttttccttccctgctttctacttctttggggagccccttgtgttttggagtctgactggagtctcgcatcctggggcctgctccatccatccctcctgggcgccagaccctccatccaagccctgtgtctttccatagtcagggtcaggccctgcatctattccaaggggcactcagtacacattccataaattagctgggtgtccctgcacgcccaccccatgaaactcgagcaggtctctggaagccatttgtt

SEQ ID NO: 682748 - DNA, 103 bp, Homo sapiens
tcaagtatcttgatgtctggacttttttccacccaaaacaaggcctttagcgccaagtcttttcctttctttctgatttgacactgtggcagccacttcgggg

SEQ ID NO: 682749 - DNA, 213 bp, Homo sapiens
atccagctctgtgggcatcatgattcaattcgccaagtaagcatgcttcatcatcacagtgagaaaccggacgatgacctttggagcacggcctaataagcacctggcgtttgcctctctttacggcattgttgatacctacttgagagcatctgccaggacattcatgcgcaccattgtggcttagattgcaggatggtgcaacacgaagga

SEQ ID NO: 682750 - DNA, 1534 bp, Homo sapiens
  misc_feature (399)..(399): n is a, c, g, or t
  misc_feature (1221)..(1221): n is a, c, g, or t
  misc_feature (1233)..(1233): n is a, c, g, or t
caatagtttgtgtcgacccgcgaagaaaagatatgtgtggtcgttgggggtgtgtagagaacatactttaataatgaggaagcggtgtaattttcccggtggggggtctctatatactaaatatagggccccactaatgtgttggtcccctccctgataagtgtgttgtcgtcccccccctactaccactaagggggaggggggggacaccccctcccgtgggaaagtgttcctttgttgggtggtccagcagcaataaggacgtccccccccctcctttcggggtggttgtggttggtcgtccacatacggccgcgtggtgttgtgttggccgccccctcgttcctccgtcttcctgcccccgaggagttgttccaccaccaacacgcggtggggtgngctccccaccactatatgttatatagggcgctcctctggtctcaaccagaagaaagtgttgtggtgaagtaaaagtattatatgaaaaccaccacgtctggtgaagcagcagcggcggcgggggaagaaacaacaaccacactactaccagtaggtcctctacccaccacagagaatagtagtgttttttgcgagacaagaatgataattttccttgctggtgtgttttggaaaagacgcctctctctgagaacccccctcttatggcccactctctatacagggagagagatttctgagaggtgacagagagacgaccctctccccccacaaagtggttgtccccccccgcggggagtactccctctacttctggagatattgttcttcttgtgagccgtccccgctgttgtggccgccgaccaccacttgctgctcgttgtggtggtcacaccacacggctccccacaggggagtacttctctctacaggtagaggagacaccacagctgtgctgtgacgacacaccacggttgtgtgctcctcacactgggggtgtctgtgtcgcgtctcacaccctactctcacagagtatatatataggacgacctctctctctcacacaggcaccacacacgtgctcacagctgttgttcgtgacacacacatctcacacccacacaccacacaccacactgggctctgagaagagagatttttatagagaccctctggtgaacacacacaccacacattttttataagagagactctatttataggcgcacagctctcctgctgttttatccactctcgtgtgtngtcctcttgtgngggcacatagaatagtgtgttatacacctctgttgctcttataaagaagcacaccacgctcgtgaaaattctataaaaggcacctctttttgttaagagaggtatataaaagaaaaaactaagaatgtaaatataaataaagagatccactcgggaaggctcttatatgtgaaaaaaagttgaaatgttatatatagttaaaaaaaagatatttaagtaaggacccgtttggctaaaacccagattttgtttgtaattgatttcctttgccaattaattaatagaataattatattaaaat

SEQ ID NO: 682751 - DNA, 980 bp, Homo sapiens
tgcccctcatttacagtgaatataatactagcatttaccatctcacttctaggaatactagtatatcgactcacgcctcatatgctccctactatgcgtagaaggaataatatctatggctgtgcatcatagctagtcgcataacccgtgcaatcacccactcccgtcttgagcctggatgattgtgcctatatgccggtacgtgagatcttatgcgcgccatgacagcaaagtcacctggttgggtcgtgagtcccaatatagtcgtcatatctcgcaagacattatggaccttagaagataacgttacagtaaaatctaaacctaggtcgcatatgctctaaactcattcagtaccacatgaatgtatattactaaccacgtgagcatgattttcgagaaacacacttactttgtattgaacactaccagccacagcctgatttatagaggatcaatccctcttagtgatatcattatccaagatcaaacagacaagctagcatagtcctcgtgccgcacccttataacgtacacgacccccgtaaaataacacaattacttagtaatagtgacctgactcctggcccctcaataactcatggagaggccaagcgaggtatccaagagaatccagaatcgcgactaaatatggagctcttctacaatttaatgctccgttaggagctgcattaactaataagcattatgcgcaaggtactaatcctattttatatcttcttcgaacgcctttatgcccaactgtgtgtcttaccgagagggaacagcagcacgcggaggcaggaacataggtctgtctacaacggtatagagcgtcacaacgcggagccttaaccaagcgctggactgaatcatggctgcacgccaagataccggcgccttagacacacacagctctcaaagtcagccttccaaactgccctcaatcccaaggaggtcaccaccaccacaatctacaa

SEQ ID NO: 682752 - DNA, 364 bp, Homo sapiens
  misc_feature (167)..(167): n is a, c, g, or t
  misc_feature (180)..(180): n is a, c, g, or t
tgtgtattgagaacacataatactttctgcctcaataaaaatttcagagctataaaaaaaaattcatttcctctcaaactgatggataatttcgagaattggagactctaactcctagaaactctgttacctttccagaacgagtatataatcttgtagacatcagnacttacgtttttnccaggttaacaaaaaccgtggagtaacagagtttgaatgacgaataagaaaaaaatgtgtcttacatttttgagatatttacttacctctccaagcttttccaatttgatgtaggtttccatttttccaaagccaatttctgactgaaaagtaaacaatgaaaaatttagtatttacttttttt

SEQ ID NO: 682753 - DNA, 573 bp, Homo sapiens
agatcatcgagccagagattcacacagacacctgtcacttgattccaagggctgtgatgtggaagaagctctatactgttggcaatgggagcttgaagtctggaacaaagccctttgagtgttccgctgtgactcgtagtgttctggcgagcagtactgattgattaaactgtggagatatagtggctaaacatagtgtaggtatctaagtccctaagttttgagtatcttagctattgtgtgttcaggtatgtacagaccatctaacagataagtactattttgatgtcactctggcgttctctagcaagctcaggtgagttcaagcttaattgaggagagatgtgatctacaacactcttaacgcacgtgccttctattgacttgcggttgatctgtgtgcccgcggtgtgctggcacgaccttgaccaaccctgggcttagtataggttagtttcgctttcgtctcttgctcgaggttagtcactgctgtttcccgtgtgggtgtgggtaggctaggcgtggcgcgctgcattgctgctgtgtttgatgcttgtcccttttgctcgtggt

SEQ ID NO: 682754 - DNA, 405 bp, Homo sapiens
  misc_feature (228)..(228): n is a, c, g, or t
gcttattcagggcaggaatactaccagcagtggagccgggaggagggcgagccttgctccagggacatgtccacctatacccgggaggagctgggagcacatcacgtctgagtacacacttcagaaccaggataccttctcaggggctgtctccttcctgacgggccgaatcgtctacatttcgggagcaggcagcctgtcctggtgcgttgcaagcggggacgtgtncgggggtacccgcttctctgagctctgggctccccaggatgggggagtcttctatggttccatggctccatctcgcttgcccacctgggggcacaggggcctcagcaggtacaggcctcagggacttaacccaggagaagtccgtctactggcgaatcagaggaggtcctgaccggg

SEQ ID NO: 682755 - DNA, 194 bp, Homo sapiens
gacacgtctaggggcgggcaggcgacgacgtgacgcatgaagggcagcgtgaggtagtcgagtaccatgagcgaagcgagcggcgtatacgcggggtgaagacaaggcgaggttaaaaattttgcatgttatttatcttgtggatattacagaagtgcctgacttcaacaacatgtatgagtcatacgatccat

SEQ ID NO: 682756 - DNA, 1194 bp, Homo sapiens
gggcttagcatcagcaacatcctagacggcctattcctttgtctcagaaaatcctgagcgagcagactctgtactttgttatctggacgtgtgcatcgggctggtgctgacccatggctgctctggtgataattggatctcttgaccaaacagactgcaggacggagtcccgggaagaagatacctgcaggacagagagagcagaagagaaagcagagacaagcgaggacaggaagagaaggacaccgagatccagactactcataccgatgacggagacaacagacagataacgagacggacataaggaacaaagcaatgagatacaaaacatacatagaggagaaagcaaggacgccgcggcaccaagacgagctgagaagagcaacagcgacagcagcaatccaatacaaaggaacgaatcagagcatgaactgacaagacagcaggaagccacgaggacaccaaagaggcctgaactcgacatactacatcaggagaacgcagaaaggaaacccacgggaacaaacaacatggagggcacgaccatcggaaaaggaagagcagacactgacagaggaccacagaagaggacacaacaaaggaaaaagaaaccacagagaacaacacagaaaaaacaaaatggatgaatagacaggaggcacaaacaagacacagggacagatgggaccccatataaacaaaagcacccgaggaagacatgggcaccgaaaaaagggaacaacacaggtataatggagacgcaaaggagaacacaaacacaaaagccaacaaatcagacacaatagacacgggataacaacacagcggaagagaaaaaaacactccaaaatgagcaaatggagaacagaagacagaacccggaggaacaacagcaaacagagcaaccaaacaagacacagacaaaatcgcacgaaaaaacactagaaaacagaaaacataaaaaaaaagcagacacaagagaggcagatacccacacatgcacaagaagaggaaagacagaaggagaaggcagacaaagagcaaccgagaacgaagacgacaaaccagagcgaggcagagcagaccggaatcgaaaaaaccgaagaacccaacagagaaaaggaaacgaaacgaacagccagagctacaacaaagaagaagagagcaagcgaacggcgcgacgaagagcgc

SEQ ID NO: 682757 - DNA, 410 bp, Homo sapiens
  misc_feature (240)..(240): n is a, c, g, or t
  misc_feature (341)..(341): n is a, c, g, or t
  misc_feature (359)..(359): n is a, c, g, or t
caaccctttgctaagtcaaggaaccccagtctgggctgggcatggtggctcatgcctgtaatcccagcactttgggaggccaaggttagcggatcactggaggccaggagttcgagaccagcctggccaacatattgaaaccctgtctctactaaaaaaaaaatgctaggcgtgttggctctcgcctgtaatcccagctactcgggaggctgaggcaggagactcacttgacccccgggnggcggaggcttgcagtgagcgaagatcgtgccactgcacttccagcctggggcggacagagagtgtctcaaaaaaataacaaatttgaaaaattgtttttnaacaaaggagccccagtntggaagaatcagaacattagatctgtgatcactgcctttcaaagagcccat

SEQ ID NO: 682758 - DNA, 408 bp, Homo sapiens
gagttcgacacaccatgctgactgtgagcgttaagcgtgatctgctcttccaagccctgtgccgcacctacactgactaagaatttgatgaactatgatttgaatttggtctggagcttgatgaaattacagtcgacaaggaaataataagtaaagaacaagggaatgtaaaggcagcaggagcctctgatgttgccatttacaaaattgacgtcagtgccaatagatatgatctactgtgtctggaaggatggtgtacgggacttcaggtctttaaagaaaggataaaggctccagtgtataaacgggtaatgcctgatggatccaatatcgattatacaggagagaccggtcagatacgtacttttgcagtagcagttaatcttcgtatctgcttacttgatcgtc

SEQ ID NO: 682759 - DNA, 243 bp, Homo sapiens
cattggtccgagagaaattagttgtggcgatcaaaatgattaaggatactagttatacgagatcaggttcgtcctttactgttgtgtatggttatcatttgttttgaggttcgttctgattagtcttgttgggtggtgattagtctgttgttgatgagatatttggaggtggggatcaatctagggggaaatagaattgatcagtactgcgtgcgggtaggcctaatttctctcggaccaatg

SEQ ID NO: 682760 - DNA, 790 bp, Homo sapiens
tgcatttgcataaattctatactgtttacgagcttaaagctacagaagcattgttaggaactgcttggacactgaacttttaaagcttctcttgacattgttaacaagcatgttcatctttctcttgtcactagtccaagaacaaatatgcttaatgtatattacaaaggcttgctatatgttaccctgcttcttaatgccaaaagttggcttcgtccacacatttccttcaagacctcttcagacacagggcactttgtttgccttaatgaatactgcttgggaaaaaaacacagctataatgagtgaaacagggcagcaagcaacgaacatttctcacatcttcagcgactccaagacagaatgagtcatccacattcacgatggccacatccatgcaggcactttcacatctttcctttaacacacaactaatgtccccttctctctctctctctcatacacatgattctctaagtactactttcttcatgccaggaccagcttttacaagccttgatgtaccagtgactgtggtccaaatcgtcccttacagtggccaccctctatacatctttacccatatggtgagcatcttgtctgtctggacgggggatatgacaataaatctacagattggcaccatcctggtaccaaacgtaggacaagcctttaggtacttcactcagtgtggatgggtaaatcctttattgcctattctccctggactatactggcattggtaagcctggggacactacctccttgtttaccatgcaccaactcgcca

SEQ ID NO: 682761 - DNA, 165 bp, Homo sapiens
  misc_feature (86)..(86): n is a, c, g, or t
  misc_feature (126)..(126): n is a, c, g, or t
  misc_feature (147)..(147): n is a, c, g, or t
attggatatcggatgagggtgacagtgacgcatctaactggcagtgctgatccttagaaactcatctcgaatgaagtacttggccngggtcagcgtgggtcctctccgggctcgggagtagcatcntaggagtagtgtagcgaaaanttctggaaacgtacgctc

SEQ ID NO: 682762 - DNA, 233 bp, Homo sapiens
tctctaggagaaaattgattagtgatacgagttccagcgcaagggttctggttggccatgaagaaagtgagctcatggatcagaacaacagcctgcaccttacgctcaggcttggctcccctcaggctgccatgactctcggaatccctatctttagtccaatgatgccttatggtactggactgaccccacagcctattcagaacaccaatagtctgtctatttcggaagag

SEQ ID NO: 682763 - DNA, 359 bp, Homo sapiens
gtgaagattaaataggctcctctgaaaccacagaatacaacgtgcaccagcatctcatagcctacagctactacataacctgggcctcctgcaggcaggcctactggagacatcgtgccaggcttcagtggttatgatggccaccctggtggtaccgatccaggtccccatccacacctcgccaaagcagccctggcccagcttgacctaccagccgcagcgactcccgagggatctcccaggacatcctatggccaggccctgaatactgcggatatggcggaatcagcggggaacgaagaccctgttgagcttgactctagtctggcacggtgaagagacgtgagagatggaaggat

SEQ ID NO: 682764 - DNA, 355 bp, Homo sapiens
tcagaacctctctctagttacagcaaccctgtatgcttgagtctctgctgccgcagcttctgcaggtaactctgcacctgtaggccagccttcacgccacctccagctctgctgattccatccagaactctctcttcacagtggcctctgccagcgagtgtgtgtccaacaccaccaccgtgtccaaggcacagtgagctgtccagagcgtgagtcctgccagaagctttgttcactgtgcaatgtgattggactgccagccagagtttaataaactgtaaccattgtgagttggcttccttctcgccttgttgtgagggcaatggagagaaggaagaaaacatatgctaacttg

SEQ ID NO: 682765 - DNA, 263 bp, Homo sapiens
cccccccccccctcccttgggggggccccccccggtcctggcccccttgttttacgccccctttttttgggccccccgggggtgtccccggggtcccccctttgggggggggccccccccgggcccccgggggggtttttttttttggggttccccccccggggttccccgggttccccctttttcccccccccccggggggggggcttttttccctttaagggggggttttgggggcctttcttggggggctttttttttta

SEQ ID NO: 682766 - DNA, 279 bp, Homo sapiens
tatcctcatgtacaaaacactcaatgaactatacaagaaaagatccataagatgacagagaggcacaattgaacgtagaaaaatctataggccaggtgcggtggctcacacttgtaatcccagcaccttgggaggctgaggcaggcagatcatgaggtcaggagatcgagaccatcctggctaacatggtgaaaccccgtctctactaaaaatacaaaaaattagccgagcgtggtggtaggcacctttttttctcagttactcgggaggctgaggcag

SEQ ID NO: 682767 - DNA, 191 bp, Homo sapiens
tctgttcactgaaggggcctttcctgtcgtggcagccaagtgcagagagagaggagacagtagagacatgcttacgccgttactttcatcagtatcagagacttttagtactttcactaatttgctactgctatctaaaaggcagagccagtgtgtacagagatgtctcaccgcatattgcaatggcgtac

SEQ ID NO: 682768 - DNA, 687 bp, Homo sapiens
agtgtgtgaaaagacgaagactgagcggttgtggtcgactgtagtcgatctccagactggcaagatgcagtgcttctctacgcagaacccgggagtaggacactgtcacgagatcgatctcgtcttgtccgcttccccttctggtgtagattttcccgatcttcagacgtacatgttgcggcctttggtgagacatgctataccaatcaaacaggagtgggcgatggggacgttaccgaatgagacagatcttcgctccatgaactcccgtgtctcattgggaatcgtcagcactcttgtggtcaagaaatctgatgtggaggcaaatcttgtcgaagtatggcaaaagttgtgggcgtgcttcgtgtacataagggcttgtcttcgttccagtatgttaatgagagaaatgcccggggttgtctgtaggcagggagagggatggcagcacgtgattgctggccaggtttggagatattaaaccgtggctgcagagcaagaagtgagccgaggaaacagcaggtgtgaaaccgattcttgccagggagattgtacggctcctcttttgactggactatgactttccaccgggactactgatgatcggatgtacagttcacccagaacgtgtactacatcctcctcctatgatcgggcttgtagtgacctcgaaagtcaggtgtatca

SEQ ID NO: 682769 - DNA, 298 bp, Homo sapiens
ggcgtccgtggggactggaatgctatgtctggagtcgaccgatggtgttgacgccaaccctggtgatcctgagacattactcgcgcacgtacgtgtgtgaaggggtcccccgctagagaacaaattagtcgtgtgggaagtggagcacgattcatttctgtatgtcacgtagagtctgaaaatgactggtgggtgagcaagcacattaaaaagccgattcggtccagatgtcctcagcttggattggcatcccaagcaagagtattgctggcaggaggatcatgtgatcttcaaatgg

SEQ ID NO: 682770 - DNA, 830 bp, Homo sapiens
gcttggaccgtgggggccgtgtcccccttcccattgagggccgaaaagaaggggtatacattaaggtggataagtcagtgccggagcctgcagatgaggtgcccaccccaggtgatgggatcctggagcatgacccgttcttctgcccacccactgaggccccagaccgtgacttcttggtggatgctctggtcaccctcctggtgcccctgctggtggccctgcttctcaccttgctgctggcctatgtcatgtgctgccggcgggagggaaggctgaagagagacctggtacctccgacatccagatggtccaccactgcaccatccacgggaacacagaggagctgcggcagatggcggccagccgcgaggtgccccggcactctccaccctgcccatgttcaatgtgcacacaggtgagcggttgcctccccgcgtgaacagcgccaggtgcccctcattctggaccagcactgacagccagcagtggttccaggtccagcctgaattcatcctcccttctctgtccacaccacgagtggacatcccactggtgattccagctcctggccctctggaaaccaggtctaaacaagcaggagaggggtggggtgggtgagaagtgtgtggagtaggacttcgattaattattgctggtccggtcaccattgtgtggagtttccaaaaaaaaaaaaaaaaaaaaaatttcggccgcgcgaaattttaacactttgggcggccattagaacggcaggcagaaacgccaaggggtcccaaaaccggccgtctaaacacggtgtttgtctcagcactcccgccccggagaag

SEQ ID NO: 682771 - DNA, 344 bp, Homo sapiens
cgctccacagtctcggacggatctgctcagaaagggagggtcacaaaacacgaagggggttccccctggcgcctgcctcttcctttctgagcagatccgtccgagactgtggagcggaatcgccagcccctgtgcaggatgggggcgtccaccagggcgtgtcgtgggtgggctgcttcagctgtgttgccgcgcctgtctgccacggcttcttctctggactgcgcctctgccctgtgcccgcggatccacctcggtcccggccaccagacacacctcgagcagcgccagaccactgtccgtcggcctttctgctgcttctgctgcgtgatagggcactccga

SEQ ID NO: 682772 - DNA, 439 bp, Homo sapiens
taaggtttggagggggaatgctgggaaatggtaatgggtttggaaacttgtcatataagtaaggctagggtgagtggtaggaatgtttttccataggaggtgtatgatgtgggtcgtaccggaatcgggggtatgctggtccgaattcataaagaacggggaggttacaatgtagggtctgggtgacaaaatatgtcggttgtaaagtctcaggggagagtgcgtcatatgtttgtccctaggaacgattggtagtgggtcgaggtgtgttcatacataataatgcgtcggttgttctccgcgctatgaacgaatagggccgaagggcgccttgcgagcgtaatacgattgtttgaaccgcctgcaaacatacttcgagactcccccttccggccaaggtcccaagggcggtccatggtattgcgtctcatgcaagtga

SEQ ID NO: 682773 - DNA, 338 bp, Homo sapiens
gaatgctgggcccctgctcaagtttaccctgatcccctcagggcataaagcatgtttcattttttgaaaaatggtttgtttcctgtttcagaccagcccccccatgcaacttcctttgactttttgtggacccctgggataaaggaatcaaaagggccatttagctttccatactttgaacaacccaatgtgccttgaatacttttaaacccaaggggctggatttgcaggtgggatgagggagacagaccccttttttatattgcagtgtgaatgctgggcccctgctcaagtttaccctgatccccccagggcataaagcatgtttccttttttta

SEQ ID NO: 682774 - DNA, 112 bp, Homo sapiens
ctcagtgcaaagaacaaagaactcatcttccaacaggcgtggaatcagataagaataatccacaaaatatctatctctttacagactcacagattgcttgcatgtttacggg

SEQ ID NO: 682775 - DNA, 140 bp, Homo sapiens
  misc_feature (41)..(41): n is a, c, g, or t
ggtgatagatctagagtataccctagagcgctatcgagcgnagcgaagattcaggacgagcagtgataaagagaaggaagaagtggacagaggaaagaaagtagccaggatcaccagaagaagctaaaaagccagatagt

SEQ ID NO: 682776 - DNA, 560 bp, Homo sapiens
cctctgggcgcccacggggcaaaagggggttttttccccaaaagcaagcggggtatatggtgcttataaactttgggacggggacctctcgcggtcccccccgcacgaggttgtctcttttttcgcgagcaagaccccccccgcgaattgttggtcggcgtggccgcgccctgctgacccccaacttcgagtattccgccccacgttgtggaattcccccaacgttttgttgctgagatgcagtatccatcaaagaagagagaaacttgcgggaagcccccaccacccagcgagaaggagtggagttttttgagccacccacgaaaaagaggggaaataattaggagtttacggggccgcgccaagagttgaatcacaggaaaactgtggggctccccacaattgttccccaaataccaaaggtatattcctcacggtccacggggaatacctcgcgagatactgtgtttggttctggacggaaggggaagatttattcccccccaaatggggttttaaaattttttaaaacccatataaaaacgggctttaaaaaaaaa

SEQ ID NO: 682777 - DNA, 365 bp, Homo sapiens
  misc_feature (347)..(347): n is a, c, g, or t
  misc_feature (359)..(359): n is a, c, g, or t
gggctgtggcaagtttaacatctccaattgctgtcttaacataggcaataatggagaagaggttctggaaatcgcttcaaacatcagaaaagtagcccgtgtaccagtccaaacctgggagggatgggacccagcaaaccttctaggagggtggttctctaatttaggaggatttaaaatgctggtggggacagtcattttcatcactggggtcctcctgtttctcccctgtgggtatcccattaaaactcttgtttgaaactacagtttaacctcctggacaatccaggatgatgctcctgctacagcgggcacgatgggatacccaacccgttttcttcaaggantacccccaaaanttaagt

SEQ ID NO: 682778 - DNA, 177 bp, Homo sapiens
atcagtttcctctctattaaactggagaatattttctgtaggtttaaatcatgcgcacagtatatgatctcttctattctgcagactttctttacccgtgcagaccatatggaaaactcggccattatataatatattaatctccccgggctcctgagcccactgagcgtcaagtag

SEQ ID NO: 682779 - DNA, 121 bp, Homo sapiens
ccgttggtcgcaagtcgaggctgcagctagccgaaactgttactgcattccagtctggacagctcacgcctgtaatcccagaatttggggaggctgaggcaggagaattgcttgagcccag

SEQ ID NO: 682780 - DNA, 128 bp, Homo sapiens
aacatacccagactgtgctaattacaaataatgaggtttaatttggacttacatgtttcacatgtgctggggaaggtctcactgatcactggcagagtggtgaaagagaattcttacatgtgcagagt

SEQ ID NO: 682781 - DNA, 311 bp, Homo sapiens
ggggggggttttacccccaatttttcccccacaaaaccaaggaaaacccgttttttcccccccaaattcccaggaaggcccccccttaaacggggggaggggcacccttgggtttcctttcttcttttttaaggccaaaaagggggccagggcttaaaggccaaaagttttccccttttttaaaagggggaaaaaaaaccctttttttaagggggcaagggccctttttctgtttccttttcccccccaaattttttccccgtttttggggccccgggggggaaaaaactggggttttttttcctttttga

SEQ ID NO: 682782 - DNA, 260 bp, Homo sapiens
  misc_feature (19)..(19): n is a, c, g, or t
  misc_feature (29)..(29): n is a, c, g, or t
  misc_feature (65)..(65): n is a, c, g, or t
  misc_feature (100)..(100): n is a, c, g, or t
  misc_feature (131)..(131): n is a, c, g, or t
  misc_feature (210)..(210): n is a, c, g, or t
  misc_feature (212)..(212): n is a, c, g, or t
ccgaggggaccctgctcanagccttctanatggtgctactgctcttggagtggacatgaccaganaccgcaccccctggatctggctgagggctcagganacaggcccagccaccccccagggccctccanaggccgctgcataacagcgatacagtacttaagtgtctgtgtagacaaccaaagaataaatgattcatggttttttatntnttggtttgttcagacaatggaaatttgcccattctgtcaaaaaaaaaa

SEQ ID NO: 682783 - DNA, 297 bp, Homo sapiens
actggggacgttgtacaaagagaaaccttatccactgggagcagtgctaccccccggatcctatatactccaagaagcagtgttgactctgggtcgctatttacgggtcgctcaccattcccatagccaaagaaataaatgtgggcctttagttcactgcaaactgtggaatatcttccggtttacatgttacatcgataaggtacagctgaatcagccttcaggacataaatcagaattattgaaaggctaagagttagaaactgagcacagcaaaggtctacgattctttgcaaa

SEQ ID NO: 682784 - DNA, 571 bp, Homo sapiens
  misc_feature (123)..(123): n is a, c, g, or t
  misc_feature (128)..(128): n is a, c, g, or t
  misc_feature (141)..(141): n is a, c, g, or t
ccagacaccattgcaaccatcgagtaagagatgcgtgagctattcaacatccctgcgggagcgtataacacggctctggatccaatacatgagcaactcctacgagcagttgagcaagctagncaacnctgtccaggatgntgggctatacagggtcaggtgctagtaattgagcctcaaaatgaagatggcacatggcccaggcagaccttgcagtcaaaaatctgtcattatgtcaggtgacatggcaaaagggactttgcagatgggattaagcacaatggccaggagcagtggctcatgcctgtagtcccagcactttgggaggccgaggtgggcggctcacctggggttgagagtttgagaccagcctgaccaacgtggagaaaccctgtctctgctaagggtgcagaattggccgggcgtggtggtgcatatctgtggtttcagctgcttgggaggctgaggcaggagaatcgcttgagcccgggaggcggaggttgcggggagctgggattgcgccattgcactctagcctggggaacaagagcgaaactccatctcaaaaaaa

SEQ ID NO: 682785 - DNA, 507 bp, Homo sapiens
  misc_feature (7)..(7): n is a, c, g, or t
  misc_feature (127)..(127): n is a, c, g, or t
  misc_feature (144)..(144): n is a, c, g, or t
  misc_feature (271)..(271): n is a, c, g, or t
  misc_feature (410)..(410): n is a, c, g, or t
  misc_feature (441)..(441): n is a, c, g, or t
gccactnacttttaaaaaaggacatggctaccgtctaggtagaacaattaaggcctctagaaaaccctgtctaaagaggcctctggttattataaaagaatgggcatcctgtgtgaaatacagtagnagtcgactggggccccnagatgtttcttcagtctgctcctttccccatgcagagaactgtgacatgtggttcaccaaaatagaacttttcatttttactaatcatttgttattaaaacaggatttagaaatgctttggtgaggncagctcatgcctgtaatcccagcactttgggaggccgaggtgggtggatcacttgaggtcaggagttcgagaccagcctggccaacatggtgaaaccttgtttctactaaaaacacaaaaaattagccaggtatggtgnggggcacctgttatcccagctactcaggtgntgaggcagaagaatcacttgaacctgggaggagagcttgcggtgagccaagatcccgccactgcac

SEQ ID NO: 682786 - DNA, 177 bp, Homo sapiens
  misc_feature (69)..(69): n is a, c, g, or t
  misc_feature (177)..(177): n is a, c, g, or t
gtacgtgataatctgacactatggacttcagacatgcagggtgacggtgaagagcagaataaagaagcnttgcaggacgtggaagacgaaaatcagttagacataagccaacaagagaaaccatctttgaccagcccctgcttcccattccaacctttggaaactccccaatgtttn

SEQ ID NO: 682787 - DNA, 188 bp, Homo sapiens
ttatagaggatcccggtacgagcggtctgcgtataattctgaggggaacacatacaaaccgttgtgatacaagatgggttgagtgcaagggaagtccagagctggaccagaagagcgcctggcagttatgtagtccactcattcctcttacaggtaaaaaacagaggcagagagaaatcaagtgattt

SEQ ID NO: 682788 - DNA, 892 bp, Homo sapiens
atctcccgagcgacataagtatgatagacaagatgcacaattgtctcatatcttaccgaagagtagtatatccggtcagatctcagattctcgactcgatatggcctagaaggggttaatacttatcgggtgtgtccactttatacgctaactctttcagtaagcgctggattcaggctcaactacctcaactatacgtcccagaacggcggagcacaattgacaatcccgtagtgctttgatcgctgtgccgaacgaatagagggctgaggtccctcgagtccgtacctacctatcacctaccgcaatcagtattatggtcctgagactagggtccatagagtctatccctaagtcatacagctcagatttggagagggtaacggagtagattgaatatttaactgaagttacgtgcagaattgacttggcgctattaaagaaatatcattacttcgtgggagattacattacaaagcaatgtatgacaggaggaaaactaagtgagaggctcgatgcacgttctatgtattgggggacaaagtcaaaagtaaggaacatcacaggcatatgaaggcttgttatccgaatcattgaatgtacaaggacaacaaagaaagtattagcagcttcattaagtagtgttccctagattggattgcttaaccacattcagaatgcaaatggccgggacagtcgtcaaaccctaatccaagtgatccacccgatacacgaaccgcgaagttttaccacggggcaaatgcactggcactcgtgtgtgcagaacacatagatattgcccatccgccgtagaatcagttccaaaaacttcttgaacccaggccggtattacttagtgaaaaccccgtacgctaaaagcgaaagattaccg

SEQ ID NO: 682789 - DNA, 816 bp, Homo sapiens
tctgaggcttcattcctgaagccggcaagatcacaaacccagggggaggaacaaacaactctggacttgccacctttaagagctgtaacactcactgcaaaggtctgcggcttcactcctgaagtcagcgagaccacgaacccaccagaaggaagaaattccggacacatctgaacatctgaaggaacaaactccagccacaccatttttaagaactgtaacgctcaccgtgagggtccatggcttcattcctgaagtccgcgagaccaagaacccactggaaggaataaattccagacacagtggcagctggcactgtgctgcttacagatcaaagacctacaggattacaagacacgtggctgagaaagagaagggaaggtggagccgccatgttgaacatgtctagtccctagttcctgctggtattcaccaatgcaagctcccagcttgcttgcctatgtctgcagcttgactttcaggctgctcttaggaaaaaaagatttggggctgcttttccttaaaaaaaaagccttacagggcttccatacccttactatctggcttaagggatttcttcttaactcctgtgatcggaagaagcaaaaatttttaccatccctccttaaaaagttggagttaattttaatagttaatatacacagtaacttgttaaatatcacattggtttagagaatttacctgaccttttgaaataccggttatttagcgtcatttcgtggcgtcgggacgggtggatcggatgcccctatgatggtaataccgcggtgacacttggatttattgttttgtttg

SEQ ID NO: 682790 - DNA, 931 bp, Homo sapiens
gctggaccttcccggggtggactgggtgggcggcggctcttcccaggtggaccaggtggtgcggctggctccgtgggagcggtcgcctggaccttcccggggtggaccgggtgggtggccggctcttcccccggtggacagggtgggcgccggctccgcgggacggtcacctgaagccaggcccggactgcacacctgcttcttcgcatcaaagccacgaagaggcgtccaagaaaaggcgttgcagcccagaggcaagaacagtcagagtcgccaagagcaggaacgaggacggggcggagcagcgcctatgccaggaagggggtcatggggatcagcgaaggccaagagaggaagagagaacatctggggaaaagaagagctggggtgggcctgactggtgctgactcacacccctgagccctgcttagaagtcaggggcatctgcctgctttgactttggaggctcctcccacacccaaactgccggcacatgacgtgcagctgggtggactgggcatggatgtctcacacctgagctgcacagaccagaggaagccacggctcaagggcccaaggtcatttctgcgcagcccgcacggccgggggcttttcctctggggatcagttggcccaaggtctcttctggagcatgctcagggacttgctgtgcctggaaggccagggcagctgatttctcctggtgccatggcacttttctttgcttccagaggcattcactgggacccctgtaatttctctgggaccctttttgaatctgagggtcttcttcttggattgcggaggttgatggaggcagcgctgtgggccttagggaccttctgtgttccagggactggatccttccaggatggtggcgttctcctgttcaggggcttcagggctcctccatttcagaaggggcatatcc

SEQ ID NO: 682791 - DNA, 751 bp, Homo sapiens
gctactgctaagatgaagactatctcaggagtcagactgacgagagttcgatcaatatgtctaagattagatcgggcatgaaggcacagcactcgtgatgtgccccataggaaccctggggacagaccctcgttcacatgactgtagaactcagccttgttgtgtgatagtctcaagagggctgcgtgtttagaacagatgaggtcggggtagactggagcaggaacgaagtgataccggctctggactaatatattgtcagtcctgttcacgtagcaatagtgtcacagggttgtacacttggcgttaccagattaccacagagtgaagtggtcttgcttatcgctcacatatcccctagtcgtaccgatttgttctccaagggctgactgcgcgttctcgttgttagacactccgaagattgtcgaaggagtgaccgatagctttccgtgacgtgtctgccgcgagtgcctagccatgggtgttgaccttgattcaggtagtcatcaaagtcacgcagtacaggaatgaccttacattcctgttgtcaagggacccatgaccgggttgcacgcctttgattccagaggaatgtcaggacgtgacttgtgagaattcagtgcaacgcgcagaaagatgtagaaaaaaaactggggattgatcagaggacgaggtgtccaagggaataggtagatctacctggtctcgtgagtaggaaggaaaggaatgttacgaaacaaggggttgagtg

SEQ ID NO: 682792 - DNA, 80 bp, Homo sapiens
cctaggtgcgctgctgagcgcgctgctggacctgcgcacaggcggtggagccggtatgggcccgcctggccctgggcgcc

SEQ ID NO: 682793 - DNA, 481 bp, Homo sapiens
  misc_feature (453)..(453): n is a, c, g, or t
cactgtgtacgcacaggaggtcatgtgttctatcaagcccactgacaactagaggcccagggctctggccagagctggagttgtggtcattgcagagaatgagcgtgagaatgacggggagtggggggcccgtagccctggcgtggcgcccacgtcatggggcaaagctggctgtgtcctaggcaccctccacaaccgccccagtgctgggcctgccttccgaggccactgccgatgtacggggaagccccatggattgtcgaggcagacctggcatccgccactctctggcgtggtcttccttccaaggcctggggcagcagtgttgggggtcccggagcaggtggggagatagtgccttctctaccttttctggtgcctttctggtactgctggcagtaagcagctggaaggaccagcaggtggcactgggctcatgcgggtggtgactgngacccggcgtaaggaaacagaaaggctc

SEQ ID NO: 682794 - DNA, 187 bp, Homo sapiens
attcgcggccgcgtcgactggaatggaatggaatgaacatgcattggattcaactcgattgcaatggaatggagtagaatggaatggaatggaatggaatggaatttattttaatagaatggaatggaggggaatggttcggaacggaacggtgcggaacgtattggaagggcttgtaatggaatgg

SEQ ID NO: 682795 - DNA, 102 bp, Homo sapiens
ctacatttggaactgatatgaggacttcacctcatccactattggccaccatgtaacgtagtgtgtagagcagggaagggaactgtatcctgcctatattta

SEQ ID NO: 682796 - DNA, 673 bp, Homo sapiens
  misc_feature (86)..(86): n is a, c, g, or t
tgatggcgctgatgacaccattacgagatcgcgtttccccgtccgaatgatcgcctcggctggcaccagtaggctgtcatcctgtngcccggacggatggagggaaacctgcgcggtcatgcctgggcgcaaccggccgccggggttgggcagttctatacgaggccgcaaggtgcggctttgcagatccgcatcagccagcaatgcggtcagcttgccgggaacaggttcgcctgggaacgctgccagattcgcctgcactgcctgtccctcctgtaagtgatggcgctgatgacacctagtgtcgacatgagttacgccgagtgatagggcttgctcggcggatagtagttttggcccgtaatgctcattgtgccaagctttgacttccgtttgcagcgaggcgaacacaggcagtttcttctgataatccaagataatacctgtacggtatctctccatcattattgcgattgccgaagatactacgtgctgcccataactcaattgggctgtgaaggtgttcatgtgctttggcatggaggtagaggccccctcccatgatggcgacgcctacgaggacaagggccgctgcggcccaaccggcgaaggggacaaacgatgtggcgcctgcaacggcaagtctgcctcaagggtgtcatcagcgccatca

SEQ ID NO: 682797 - DNA, 581 bp, Homo sapiens
tcggcggggggcatgggatagtcgtcgaactgggacggcttcacccaggccagcgcctgatgctcacgccgctccacgaacccctcccagcgccgcaacagatagagcggcatgaggaggtgaaagtcctcgtaggtatggctggcgaagacgaagggggcgaggcaggcctgggccgcccgaattcccagctcctcctccagctcgcgcaccagacaggcctccggcgtctcgccggcttcgagcttgccgccgggaaattcccacaggccggcgagctgcttgccctctggtcgctggcagatcagcacccggccgtccacgtccaccagggcggcggcggccacgatcagcatcttcatgcgtctgttcccttgttgagaccgcctttagacctcccgcgccagggtggccactgatgtcgccgctcctcgcccagctctatcgcgccttcgccgaggccccggccctcaccgggcggcgcttgcaggtctatctgtggctcttgtttggtctcaacccgcggtggcgctgatctggctcgggctcgccgtgatgcacgggggtctggcgcagaccgg

SEQ ID NO: 682798 - DNA, 154 bp, Homo sapiens
ctcgagctcggtaccgggttcattcatttctctaacagcagtaatattaagtaatttcatgattgagaagcttcgttcgaaagcgagatgtcctaatagtagaagaaccctccataaacctggagtgactatatggatgccccccgcccgctag

SEQ ID NO: 682799 - DNA, 356 bp, Homo sapiens
gaagatatatatatacatatatatatatatatatatatatatacacacacacaatttcttattaggtctctatggtgctttggcattcaagtcaaaaaaactggtccagacatctcaggatttcactggtctgtctggctgcacagcttgctgtggcctagaaaataaatttcttccttgcaattgttgtggacttttcctaccattttgaatgaagtcactcacagcagagccacagccactgtcggtagtttatcagactgctgatatttcagggagacgaacaaaaagttaatgcattattgagacttaaaatagcaaataaatgcagattatttttaaaaacccaaaaagcc

SEQ ID NO: 682800 - DNA, 136 bp, Homo sapiens
  misc_feature (9)..(9): n is a, c, g, or t
  misc_feature (11)..(11): n is a, c, g, or t
  misc_feature (35)..(35): n is a, c, g, or t
gttacggtngncgaaatacccagtggtgtatttgngttgctggggtaggtgcgaggagcccgaatgcctgctttgtggaaacatcatgtcaatcgcggcggggggcgcgggctgcgccccggctaagcgccccggc

SEQ ID NO: 682801 - DNA, 181 bp, Homo sapiens
ttgtcataccccttcgtgcgcgtgacatcttcccagtgagcacttcagagaccagcggcaattctctcacccaggctctctagtccagccaggcctagccattcagggaccatgaaccggttcctttctggtgggccctggaagaagggatcccatcatacccagctttcagcaaggtatt

SEQ ID NO: 682802 - DNA, 148 bp, Homo sapiens
tacttaacgacaggatatgggtagggggcgttctgtccatccagccctggccccagcccatgtggttttggcagcaataaggggtatggggtaagggggcaccaacacataacaatggtttgtagtgtgtatggtcggtgctttgggt

SEQ ID NO: 682803 - DNA, 295 bp, Homo sapiens
cgaaggataggaagctcggttctacaaggcggtcgacgatctccgggccgctcgacgatcgacagcgacaattacaaggcgatcatcgagctcggcatgaatttcggcatcgccgcgcgcgacagcaggcggcgcggtgttcgagatcgccgccgaaagcgcgccgaccgtcgcgctgccgcaatatctctacggccactttctgatcaatcaccgcgcgttcgagcgcgggctcagctatgtcgattcgcgcgctggcgattgatccgctgcaggcggagaatcatgtcggccg

SEQ ID NO: 682804 - DNA, 115 bp, Homo sapiens
caactagactggacagatacggaaattgagtgatgtaaaatggttgtcggcctggtagctgagcagtttatcagtggaaaactgaaaacactaaaatgtccaccggggatcctct

SEQ ID NO: 682805 - DNA, 430 bp, Homo sapiens
ccacgccctgttccatgcctgggaccagaagtgcagagagccgctgttctctgctccctcccgtcaaacacttgtccccacaatggtggtcgccggaggtgtctggaccaccgcagggtccatgcggtgccttgtgcccttggtcctgaagccgtagttttgcttggatccagctcctcagtgtcgtgatccatgcaggctggacgagggcgtccttcagagggcccttggcctccatgctggaagctgcgctggacgagttgcagaggaggatctaccgacttggtagtatggaggcgctgtcagcgcggagctcctatgctgctgctggtctgaggccgagtctgtgcctgtggtgctctcagtagcctgagcgcgctgattcaaggccgctctggttgtgccgcgtgagcccgacgagaggaccctg

SEQ ID NO: 682806 - DNA, 548 bp, Homo sapiens
tttggtgagccagcccggaggaagagtgagtcatcatctgtttcatttatctggcattcctaagctacctttgtcgggctgcaggaattaatggaacacaccagtttctaagcaaactttttggattttaggcttcctgatgcttcaagcagggtcaccaggaccgctcagggagagagaacccagaaacctagcatgccagcaaaaggatggatcagagggcccctgaatcatccagaaaagagtgtattttcacaggtaaagaaagctttttatggtttaaatcttctggaaacattagagaaagactgtcattgctatccacactacaacaaaacttcatccacactacagcaagactttgggctttggattcatggcctcaaaactgagaagggtccctccacatttttggaactgtgcacccattggaacccttgagggaaagctaaccagggaaatttgaagaggatgccatccttgatgggaacagcttttcccaaggtcacagattaagacttatattgtcatgaaaatcttacctttga

SEQ ID NO: 682807 - DNA, 1230 bp, Homo sapiens
gccggggcgggggggcacccggagtggggcggggactcaccctttagctgctcgggtccttgaccgcttcgcacaggaggtgagctcccgggatgggaaaggcgacctgggggagccgcccccgacacggcccacggtgggcaccaatcttactgacatcgtggcacagagaaagatcaccatccgggagcttggggggtgcatgggccccatctggtccagttactatggaaactgccgttctctcctgtttgtgatggacgcctctgaccccacccagctctctgcatcctgtgtgcagctcttaggtctcctttctgcagaacaacttgcagaagcatcggtgctgatactcttcaataaaatcgacctaccctgttacatgtccacggaggagatgaagtcattaatcaggcttccagacatcattgcttgtgccaagcagaacatcaccacggcagaaatcagcgcccgtgaaggcactggcttagcaggggtgctggcctggctccaggccacccacagagccaacgattgactgcacggcagaggcgcagctggcctgagctggggagaggtggcagagggcagtatggctttgctgccaatagtttcttctcacaggggcagaataacccaaagtaaccctacatgatggggctctgtgctgagatgcaatgatgtgtaaactgaggcatgtggagatggaagttgacatctggcctctgaaaaaagtgtccccaggggctaggcatggtggctcacacctgtaatcccagcactttgagaggccgaggcgggtgtatcacctgaggtcgggagttcgagactagcctgaccaacatggagaaaccctgtctctactaaaaatacaaaattagctgggtgtgctggtgcatgcctgtaatctcagctacttgggaggctgagacaggagaatcccttgaacctgggaggtggaggttgcagtgagtcgagatcatgccattgcactgcacctgggcaacaagagtgaaactccgtcttaaaaaatataagaaataaaaaaataaaaacctgaaaaaaaaaaagacacacccaaaagaaaaaaatccggggctcccaagcgccgggcgcggaaaaggcggtaacgcatgcgcaatgggcaataacgggtcccggaccaagtttctggtccaagggggaatcggcgggcccctaaaggagcggataaattcaaaccaggtacga

SEQ ID NO: 682808 - DNA, 353 bp, Homo sapiens
ttagggctgttgaagaggggctatgctatctgtctccacctgagactggctccctgccagtgttgctcttctgcatcctccttcatctctgatgtcagtgggatggtctcctgaggaagcctctgccttggccttgtactcctcctcagaccagcctctcaaacataattggcatagagcttccttctcccgggcaagctgacttcggatccgctgctggcacacagccagctgggtcttggcgggctttgttgtaggggtagagctgcaggaccttctgaaaatcagcccgtgccagttcacaagtccattcacggccaaggtgggcctctccccggcggcagcggcccttt

SEQ ID NO: 682809 - DNA, 1266 bp, Homo sapiens
ggccttgagccgcggcgccgagctacgggtgccgggtggagcgaagcacggaatgtgtctcctgctgggggccacgggcgtcgggaagacgctgctggtgaaacggctgcaggaggtgagctcccgggatgggaaaggcgacctgggggagccgcccccgacacggcccacggtgggcaccaatcttactgacatcgtggcacagagaaagatcaccatccgggagcttggggggtgcatgggccccatctggtccagttactatggaaactgccgttctctcctgtttgtgatggacgcctctgaccccacccagctctctgcatcctgtgtgcagctcttaggtctcctttctgcagaacaacttgcagaagcatcggtgctgatactcttcaataaaatcgacctaccctgttacatgtccacggaggagatgaagtcattaatcaggcttccagacatcattgcttgtgccaagcagaacatcaccacggcagaaatcagcgcccgtgaaggcactggcttagcaggggtgctggcctggctccaggccacccacagagccaacgattgactgcacggcagaggcgcagctggcctgagctggggagaggtggcagagggcagtatggctttgctgccaatagtttcttctcacaggggcagaataacccaaagtaaccctacatgatggggctctgtgctgagatgcaatgatgtgtaaactgaggcatgtggagatggaagttgacatctggcctctgaaaaaagtgtccccaggggctaggcatggtggctcacacctgtaatcccagcactttgagaggccgaggcgggtgtatcacctgaggtcgggagttcgagactagcctgaccaacatggagaaaccctgtctctactaaaaatacaaaattagctgggtgtgctggtgcatgcctgtaatctcagctacttgggaggctgagacaggagaatcccttgaacctgggaggtggaggttgcagtgagtcgagatcatgccattgcactgcacctgggcaacaagagtgaaactccgtcttaaaaaatataagaaataaaaaaataaaaacctgaaaaaaaaaaagacacacccaaaagaaaaaaatccggggctcccaagcgccgggcgcggaaaaggcggtaacgcatgcgcaatgggcaataacgggtcccggaccaagtttctggtccaagggggaatcggcgggcccctaaaggagcggataaattcaaaccaggtacga

SEQ ID NO: 682810 - DNA, 2129 bp, Homo sapiens
ggccttgagccgcggcgccgagctacgggtgccgggtggagcgaagcacggaatgtgtctcctgctgggggccacgggcgtcgggaagacgctgctggtgaaacggctgcaggaggtgagctcccgggatgggaaaggcgacctgggggagccgcccccgacacggcccacggtgggcaccaatcttactgacatcgtggcacagagaaagatcaccatccgggagcttggggggtgcatgggccccatctggtccagttactatggaaactgccgttctctcctggtgggttgtaatcctatatgggcttcctttagggaagtgtgtctacatttctgtgacgtccagtccccaaccttgctgtgtgtagaaaggggtttgggttatttagtgactatactactcatggaaataggtcttagctagtgttgcttcctgctgggcaccctgtctggtttctggtgcttgcgctcccaggcccccggtaggagctcacagagggcttgctgagggcagggctgctgctccgcagagaacagacttggccctctgtgtcactccccggtacgtctgtgtttatgttggacttatacgtacctctggttggtctcatcttgataaggcctgtgccgcggataccagtatggagaactgatggccacatgaggacagagacgagtgacaccaggtcgtcttcataaaactcgattccctctgcttctgcttgttcccaaagctttgtttaaagctactttgggccgggcgcggtggcttactcctgtaatcccagcactttgggaagctgaggtgggcgaatcacgaggtcaggagatggagaccatcctgactaacatggtgaaaccccgtctctactaaaagtacaaaaaattagccaggcgtggtggcgggtgtctgtagtcccagttacttgggaggctgaggcaggagaatcacttgaaccctgaaccctggaggcggagtttcagtgagccgagatcgtgccactgcactcggagcgagacttcgtctcaaaaaataaattaattaattaaaaaatgcagttttgctctcccagtgccaggtctgtgaggcccaggggaggaagtttggcagcggggcattgctgctgtctttttctttttccccagtttgtgatggacgcctctgaccccacccagctctctgcatcctgtgtgcagctcttaggtctcctttctgcagaacaacttgcagaagcatcggtgctgatactcttcaataaaatcgacctaccctgttacatgtccacggaggagatgaagtcattaatcaggcttccagacatcattgcttgtgccaagcagaacatcaccacggcagaaatcagcgcccgtgaaggcactggcttagcaggggtgctggcctggctccaggccacccacagagccaacgattgactgcacggcagaggcgcagctggcctgagctggggagaggtggcagagggcagtatggctttgctgccaatagtttcttctcacaggggcagaataacccaaagtaaccctacatgatggggctctgtgctgagatgcaatgatgtgtaaactgaggcatgtggagatggaagttgacatctggcctctgaaaaaagtgtccccaggggctaggcatggtggctcacacctgtaatcccagcactttgagaggccgaggcgggtgtatcacctgaggtcgggagttcgagactagcctgaccaacatggagaaaccctgtctctactaaaaatacaaaattagctgggtgtgctggtgcatgcctgtaatctcagctacttgggaggctgagacaggagaatcccttgaacctgggaggtggaggttgcagtgagtcgagatcatgccattgcactgcacctgggcaacaagagtgaaactccgtcttaaaaaatataagaaataaaaaaataaaaacctgaaaaaaaaaaagacacacccaaaagaaaaaaatccggggctcccaagcgccgggcgcggaaaaggcggtaacgcatgcgcaatgggcaataacgggtcccggaccaagtttctggtccaagggggaatcggcgggcccctaaaggagcggataaattcaaaccaggtacga

SEQ ID NO: 682811 - DNA, 502 bp, Homo sapiens
  misc_feature (175)..(175): n is a, c, g, or t
  misc_feature (177)..(177): n is a, c, g, or t
ggtcgacgatgtcatggagccgacactgttcgcgactaaacgaagggggtggcggctgtaccaggttagtcgaccggccaataggaaaccggcgcacccgagggtgcctacgcacagccaccataaacctgggggcataaaaaacgccggccataaggtatgggggcgctgctgntngagctcgggcgactaaacccgttcactgcaattgggcagtgacaaacggagactagtcacgtggctggacaggcgcaaggcgttgggattttctaggaaatgtcgctcaagaaaaagcgatttgtctggtgctgaggttgttctgcccaggttttttcaatcccggtgagtgaatgggttggcctcaacactgccgtcttgaggccgaacacggaccttgtaggagtagggctatgcgccggagggggccttgaggacggcaaaagcttctcgagcagccctctcctacaggttcccggtgtctttaggtcgacacggcgcaatt

SEQ ID NO: 682812 - DNA, 1697 bp, Homo sapiens
gccggggcgggggggcacccggagtggggcggggactcaccctttagctgctcgggtccttgaccgcttcgcacaggtgggcaccaatcttactgacatcgtggcacagagaaagatcaccatccgggagcttggggggtgcatgggccccatctggtccagttactatggaaactgccgttctctcctgggcctgtgccgcggataccagtatggagaactgatggccacatgaggacagagacgagtgacaccaggtcgtcttcataaaactcgattccctctgcttctgcttgttcccaaagctttgtttaaagctactttgggccgggcgcggtggcttactcctgtaatcccagcactttgggaagctgaggtgggcgaatcacgaggtcaggagatggagaccatcctgactaacatggtgaaaccccgtctctactaaaagtacaaaaaattagccaggcgtggtggcgggtgtctgtagtcccagttacttgggaggctgaggcaggagaatcacttgaaccctgaaccctggaggcggagtttcagtgagccgagatcgtgccactgcactcggagcgagacttcgtctcaaaaaataaattaattaattaaaaaatgcagttttgctctcccagtgccaggtctgtgaggcccaggggaggaagtttggcagcggggcattgctgctgtctttttctttttccccagtttgtgatggacgcctctgaccccacccagctctctgcatcctgtgtgcagctcttaggtctcctttctgcagaacaacttgcagaagcatcggtgctgatactcttcaataaaatcgacctaccctgttacatgtccacggaggagatgaagtcattaatcaggcttccagacatcattgcttgtgccaagcagaacatcaccacggcagaaatcagcgcccgtgaaggcactggcttagcaggggtgctggcctggctccaggccacccacagagccaacgattgactgcacggcagaggcgcagctggcctgagctggggagaggtggcagagggcagtatggctttgctgccaatagtttcttctcacaggggcagaataacccaaagtaaccctacatgatggggctctgtgctgagatgcaatgatgtgtaaactgaggcatgtggagatggaagttgacatctggcctctgaaaaaagtgtccccaggggctaggcatggtggctcacacctgtaatcccagcactttgagaggccgaggcgggtgtatcacctgaggtcgggagttcgagactagcctgaccaacatggagaaaccctgtctctactaaaaatacaaaattagctgggtgtgctggtgcatgcctgtaatctcagctacttgggaggctgagacaggagaatcccttgaacctgggaggtggaggttgcagtgagtcgagatcatgccattgcactgcacctgggcaacaagagtgaaactccgtcttaaaaaatataagaaataaaaaaataaaaacctgaaaaaaaaaaagacacacccaaaagaaaaaaatccggggctcccaagcgccgggcgcggaaaaggcggtaacgcatgcgcaatgggcaataacgggtcccggaccaagtttctggtccaagggggaatcggcgggcccctaaaggagcggataaattcaaaccaggtacga

SEQ ID NO: 682813 - DNA, 1356 bp, Homo sapiens
gccggggcgggggggcacccggagtggggcggggactcaccctttagctgctcgggtccttgaccgcttcgcacaggtgggcaccaatcttactgacatcgtggcacagagaaagatcaccatccgggagcttggggggtgcatgggccccatctggtccagttactatggaaactgccgttctctcctgggcctgtgccgcggataccagtatggagaactgatggccacatgaggacagagacgagtgacaccaggtcgtcttcataaaactcgattccctctgcttctgcttgttcccaaagctttgtttaaagctactttgggccgggcgcggtggcttactcctgtaatcccagcactttgggaagctgagtttgtgatggacgcctctgaccccacccagctctctgcatcctgtgtgcagctcttaggtctcctttctgcagaacaacttgcagaagcatcggtgctgatactcttcaataaaatcgacctaccctgttacatgtccacggaggagatgaagtcattaatcaggcttccagacatcattgcttgtgccaagcagaacatcaccacggcagaaatcagcgcccgtgaaggcactggcttagcaggggtgctggcctggctccaggccacccacagagccaacgattgactgcacggcagaggcgcagctggcctgagctggggagaggtggcagagggcagtatggctttgctgccaatagtttcttctcacaggggcagaataacccaaagtaaccctacatgatggggctctgtgctgagatgcaatgatgtgtaaactgaggcatgtggagatggaagttgacatctggcctctgaaaaaagtgtccccaggggctaggcatggtggctcacacctgtaatcccagcactttgagaggccgaggcgggtgtatcacctgaggtcgggagttcgagactagcctgaccaacatggagaaaccctgtctctactaaaaatacaaaattagctgggtgtgctggtgcatgcctgtaatctcagctacttgggaggctgagacaggagaatcccttgaacctgggaggtggaggttgcagtgagtcgagatcatgccattgcactgcacctgggcaacaagagtgaaactccgtcttaaaaaatataagaaataaaaaaataaaaacctgaaaaaaaaaaagacacacccaaaagaaaaaaatccggggctcccaagcgccgggcgcggaaaaggcggtaacgcatgcgcaatgggcaataacgggtcccggaccaagtttctggtccaagggggaatcggcgggcccctaaaggagcggataaattcaaaccaggtacga

SEQ ID NO: 682814 - DNA, 1452 bp, Homo sapiens
ggccttgagccgcggcgccgagctacgggtgccgggtggagcgaagcacggaatgtgtctcctgctgggggccacgggcgtcgggaagacgctgctggtgaaacggctgcaggaggtgagctcccgggatgggaaaggcgacctgggggagccgcccccgacacggcccacggtgggcaccaatcttactgacatcgtggcacagagaaagatcaccatccgggagcttggggggtgcatgggccccatctggtccagttactatggaaactgccgttctctcctgggcctgtgccgcggataccagtatggagaactgatggccacatgaggacagagacgagtgacaccaggtcgtcttcataaaactcgattccctctgcttctgcttgttcccaaagctttgtttaaagctactttgggccgggcgcggtggcttactcctgtaatcccagcactttgggaagctgagtttgtgatggacgcctctgaccccacccagctctctgcatcctgtgtgcagctcttaggtctcctttctgcagaacaacttgcagaagcatcggtgctgatactcttcaataaaatcgacctaccctgttacatgtccacggaggagatgaagtcattaatcaggcttccagacatcattgcttgtgccaagcagaacatcaccacggcagaaatcagcgcccgtgaaggcactggcttagcaggggtgctggcctggctccaggccacccacagagccaacgattgactgcacggcagaggcgcagctggcctgagctggggagaggtggcagagggcagtatggctttgctgccaatagtttcttctcacaggggcagaataacccaaagtaaccctacatgatggggctctgtgctgagatgcaatgatgtgtaaactgaggcatgtggagatggaagttgacatctggcctctgaaaaaagtgtccccaggggctaggcatggtggctcacacctgtaatcccagcactttgagaggccgaggcgggtgtatcacctgaggtcgggagttcgagactagcctgaccaacatggagaaaccctgtctctactaaaaatacaaaattagctgggtgtgctggtgcatgcctgtaatctcagctacttgggaggctgagacaggagaatcccttgaacctgggaggtggaggttgcagtgagtcgagatcatgccattgcactgcacctgggcaacaagagtgaaactccgtcttaaaaaatataagaaataaaaaaataaaaacctgaaaaaaaaaaagacacacccaaaagaaaaaaatccggggctcccaagcgccgggcgcggaaaaggcggtaacgcatgcgcaatgggcaataacgggtcccggaccaagtttctggtccaagggggaatcggcgggcccctaaaggagcggataaattcaaaccaggtacga

SEQ ID NO: 682815 - DNA, 312 bp, Homo sapiens
actcagatgagcctggtcgcagaagggggaagcctttttagtatctactgcaatgctgtcggatagagggtgatatctgatgcaagctgcacaggactacatggggtcttcgttgcagagtccttaacagtttatttgtgatagtatccaatgtctgaaggagtcgtagctgattatcccattcaagggtatcatttctttcatcgggtaatggcgacactagctgtgatgttaaaaattaacttacttttatagtcagatcatggggcacttcttttaatccgtgaggacttggcattgccgatgcttgtg

SEQ ID NO: 682816 - DNA, 109 bp, Homo sapiens
ggaccctttccacaggcaagaataattagaacattcatcttggtatataatttctcctgtctcatatttatcaacatgaaacaggttctgcattccttagaattattag

SEQ ID NO: 682817 - DNA, 152 bp, Homo sapiens
agctactctagaggatcttgcgagtgcaatggtattcacaggcgcgatccactactgatcagcacgggagttttgacctgctccgtttccgaactgtgctggttcaacccctcctttatggcaactggttgtccccccggttccggggaggt

SEQ ID NO: 682818 - DNA, 176 bp, Homo sapiens
atcttatgcctcctagaaggagtccaaggctgagcgcgtggtcagtagcgcactacttctgggagctcagaacccgctctcccaggctgatcgcgctcctcagctgtttgcagatccccgtcctccaccctctgctcccgttcctgtggtatcatcattggggtctagggcttcct

SEQ ID NO: 682819 - DNA, 457 bp, Homo sapiens
  misc_feature (24)..(24): n is a, c, g, or t
gggataagtccctctaactccttntgcaatacctacaagaatttcactcaaagatgaggcattttcctttggctgcttgaaggtttttctgtgcaatacaagaaggcaaaggcaggacgactcagcacaccccatgcagaaagaaacgactgggttaagatttgtgttcttactcatctctcctgttcacctttgtttactgtaatttgcagaaaagagggggtacaagagaagctgaatgatgggggatactcctcttttctgtctacaagaaagctgagttacacctaggaaccagagctacctcttcttggtttttaggaaaataaccactgaagacagaactaaggaagaatctggaaaggtgtggtcacttccttggctacattctaacactcatttttataaccatcactagcaatcagtcttaagagataaaagtttatttggaaaaaaa

SEQ ID NO: 682820 - DNA, 140 bp, Homo sapiens
gggcccccattttttttttggtcccaaaaccttttttataaaacacaaaagcctttttttaaaattaatcccgaaaatttttaatgtttaaaaaaaaaagtttgtttatacccaaaatttaaaaaccccccctttggcca

SEQ ID NO: 682821 - DNA, 179 bp, Homo sapiens
  misc_feature (154)..(154): n is a, c, g, or t
ggcccaggttcttatgttactgctgctatgggtatctggtacctgtggggacattgtagatccgcagaacattcagctcgtaaacgctaatggcagctggcacatcaacaggactgccttgaattgcaatgagtcctcaacactgggtctgcgntgttctatgtaacagtcactgtcga

SEQ ID NO: 682822 - DNA, 648 bp, Homo sapiens
ccagcctgggcaacatggtgaaaccccgtctctaccaaaaataaaaataaaaattatccaggcgtggtggcatgtgcctatagccccagctactcaggaagctaaagcacgagaattatgtgcatcctggaggtgaaggttgcagtgagccaagatcacaccactccactccagtctggacaacagagtgagaccctgtgtcaaaaaaaaaaaaaagaaagaaagaaagaaaaatattgctttatggcccagtgcagtgggctcacgcctataatctctagcacttgggaaggctacggccaggaggattggcttgaggccaggagtccaacacaaaagcctgggcaactttggacaatgaccccaaacttctcacaacaaaacgaaaaattgggccgggagcggtgatgtcgtgcctgtagtcccagttactcgggagactgaggtggcgagaatcacttgagcctggcgaggttcgagcgctgcagtgacgctgtgtttataccatctgcaatccagcctgctgggctaaacagcagcaagactccatctcaaaaacgaaaagacaacatgcttcgcttaccataatgaggccaggcgatacacaccaagcgtcctgtggacaaccctctttccacaaaccatccg

SEQ ID NO: 682823 - DNA, 761 bp, Homo sapiens
agcgcggtggcgggccgggccgagagaccccagaaaggccccgatttccgcagacgaagaatcctgatggcaggcactctaatctcaggtggacatggagtgcaggtcccatgcgagccatcgtgcctgacgtgggtgctagcaacatgaccttgtgaatgtgatcctgcatagaagcctgtggagtggagccgtccacctccatagccttaggtaccgatggaatccatcttatggggcttggtccagcttgactctgggcaactggcaagctgctacctggtcgagcgaaccccttgatgcggtcccacgtcaggagatggaacagcaactagggatgaacagtcgagggcgcctgtgatcacttcactaccgaagatatacgtccgtgctcgagcaaggtgctctgaggcccctggacattgcagcacgtcccttcccctggaaaccaccctcccaaactgtggcccgttctgccagtccgactttctcgggacatggcggggcctaaataggcggcctttacagccgcatgggcaagtcatcgcacgggtaatcgcctcgatgagacgcttccttgggccatgtagcccttgggtatcctgggcgaatatggccgaaaccaattgactcctttcaccccttagggcggggccccctgagacatttgtggcattaacccaacctaccttcacaggaaacagcacacacggggggctagttagaaagcccactagacttggctccttaaccccttaata

SEQ ID NO: 682824 - DNA, 113 bp, Homo sapiens
tgctggtgacttagaggatcccctcgcggaacgtgttatcccccgggctagtcggggctgtcgggctagtcggggactgtcgggctagtcggggactgtcgggctagtcgggg

SEQ ID NO: 682825 - DNA, 224 bp, Homo sapiens
  misc_feature (136)..(136): n is a, c, g, or t
atggattgatcgtcgggtgcaaatttgagcattattacaagagctttctgtagaggtattctgttcaaataaaacagatctcaaatacaacataagctgaactacttgattttttttctccctctagttaccaagngaatatcggtatctcagatgcatggcctactatcacactggtctttaaaggaaaagaagcccagggaggggggggccccgggcccagg

SEQ ID NO: 682826 - DNA, 339 bp, Homo sapiens
tgctgggattacgggcgtaagccaccacgccgggccctggagtgcagcagttttatcatagcttactgcagccttgaattcctgggctcaagccgtcttccagtctcagtctcctgagtagcagggactacaggatgtgttgccaccatgcctggctagtttttaaatttttagtagagatgggggggatttcactatattgtccaggctggtctctaactccttacctctagtgattttcccaccttggcctcccaaagtgctgggattataggcatgatccactgtgcctggcccagaggccatatttttaacttctctgttatatttcttagtttc

SEQ ID NO: 682827 - DNA, 437 bp, Homo sapiens
  misc_feature (4)..(4): n is a, c, g, or t
  misc_feature (10)..(10): n is a, c, g, or t
  misc_feature (30)..(30): n is a, c, g, or t
  misc_feature (80)..(80): n is a, c, g, or t
  misc_feature (86)..(86): n is a, c, g, or t
  misc_feature (90)..(90): n is a, c, g, or t
  misc_feature (102)..(102): n is a, c, g, or t
  misc_feature (107)..(107): n is a, c, g, or t
  misc_feature (110)..(111): n is a, c, g, or t
  misc_feature (122)..(122): n is a, c, g, or t
accncggggngcttcaaaatgccaaatgancgtatacttgagccttattcatagattttgtatttgagaatttgcctacnccactnaaanaatgtttttaanccccnaannaatactgtggnactttctcagttattcgcagacacacagagacaaaaaatttgaaattcctggcttggcctggtgcttacccctgtaaacccaacactttgggaggccgaggcaggcgggtcacaaggtcaagaggtcgagaccatcctggccaacatggtgaaaccccgtctctactaaaaatacaaaaattagctgggcatggtggggcatgcctgtagtcccagctactcagaagggtgaggcaggagaattgcctgaacccgcgaggcggagactgcagtgagccgagatcgcaccactgagctccagcctggtgacagagc

SEQ ID NO: 682828 - DNA, 209 bp, Homo sapiens
aggtactctagaggattccctcgaatcgacggtatctccatagtgaggctgtgtctctgaactccgtgatctcaggtgatccacccaccttggctcccaaagtgctcggattacaagtgtgagccaccacgcccagatatttttattttttttaaactggaaccggggtctcaattctgtaaccacaaattgaatgtgcagttgtgcca

SEQ ID NO: 682829 - DNA, 111 bp, Homo sapiens
caaaacgtagatcccaggccccactcagtgtgactctgatgcaggtagtcagaggctcaaacttcagcaattcttaacataagcagttcttaaattcatcggcaagtcgca

SEQ ID NO: 682830 - DNA, 128 bp, Homo sapiens
ataattagtgtaaacaatatggttggtgctgaacacctgatttctttgagaaagtctggaattttggtatgtggcaggcaaaatgtgactgcccctaataaaaatcctgacactgagtctctaatgag

SEQ ID NO: 682831 - DNA, 483 bp, Homo sapiens
tagttcctataaaacatgctcgtgagattcagtgtgcgtctttgtgtgcgtgtgtgtgaatgtgtgtgtgactgtatgcgtgtggctgtgtgtgaatgtgtgtgtgtatgtggatgtgtgtggactgtgtgtgtacatgtgagtgtgacctgagtctgtggactgtgtgtgcctgtgtgcctgtgtatgtgtgggtgtgacctgtgtgtgtacaggtgattgtgagtgtgtgactgcgtgtgtgacctgcgtgagtgtgtgacctgaatgtgtgacgtgataatgtgtgtgtgaatggatgtgtgtgtgaatgcgtatgtgtgcatgtgcatgcgtccgtcggaccatacaggctactttgggacagttggtactgcaagcattaccacttaaagaggacccagagcttctgaccaactgtcaaccttgaacaaattgtggactttggtcagtgaacagacccgggtaatgcgtccgtcggcg

SEQ ID NO: 682832 - DNA, 731 bp, Homo sapiens
agcgggttgccatggcgactatgtacacagccaggcagccccgcgtggggagtgcaggtggtttcggttgcggcagtcgcgtcccgtggagcgtcgcatgtgctggtgaacgctagaatgggtactaggaagaacaagttcatgcatttggtcccgtgtgaaacccaccgagtgactttgctcatgaaatgactcgacgatacgggagagtgatcaacaagagagcacttgactattcacctgtaagaaacagactattcggaggaggaggttgtgcaaataaccacacggacaggactggtcgtattaaggttggatggagttcttcacgatgcctcccaggactaggtttagtgagacaggttgcaagggatgtgcgtttctcaggccctcgatggctataattggcatccatcagtgtgttagtcgggcatgatctgggagctggcaagacgatatcaccgatgatgggggcaacatgagaattacaacgcgaccgggggactcctccctcgtgccctgcaggaggtttaaaggatgatcgaagaacgccccagagcatgccagtcacctgtgcgtgtttaccgtacttggaatatctactaatgagagcctggtatgatctcctgttcacttctggcctaatgattggaccctcagtcacaccaatgagcatcggtggaagaacctcaaggagtcttacattaagggcttgtcgagttcagctcaaa

SEQ ID NO: 682833 - DNA, 309 bp, Homo sapiens
gacccccattattgtgggtgttttgtttttcttaagcattattttaattttcggcagagatggggtttcaccatgttcaccaggctgatctcaaactcctgacctgtagtgatccaccctcctcagcctcccaaagtgctgggattacaggcatgagccactgcgcccggcctctatcctttgacaattaaaggaaacagggaaccttggagaaatggttgattctaggactgaagcaggaaatatacaagatgtacctgaagcatgttgtagtgccagaaagtaagataatgcttaagaaagtcgacg

SEQ ID NO: 682834 - DNA, 165 bp, Homo sapiens
tttttgggggcccccccccccccggggttttttttaaagggggccccccccccccccccccccccggttgggggggggggtggggtttttggggggggggcccccccccccccccccgggggggtttttccaaaaaaataataaagcggggccccctttttttta

SEQ ID NO: 682835 - DNA, 166 bp, Homo sapiens
gagcggccgttttcaaaggctaggatgtagcgattccctctttgtgggctttgtagaagtggtcgatgccctagccaaggccgaggatgagacatattaccgggctgtggctcatagtctttcaaatttacttcatactcgtcttcatttatgtactggtgtcgga

SEQ ID NO: 682836 - DNA, 171 bp, Homo sapiens
taaggtcatccttccccacaggggtggctttgggattggatgaaacagcttttgcttgtgtgtagtaaacctgtacatacttgtttcaggcagcctttgtttaatgttttcagttggtttgtattctgtagctcagtaactgctaataaagttaaagatcctgtaaaaaaa

SEQ ID NO: 682837 - DNA, 397 bp, Homo sapiens
tttgtgaccagatatatgccatagaaacttcactctgtttatatcaaatgtgcctgttgtgaactgggtttctattcattatttatacacttatattcactagtttatacatcgtttagcttaaagtcctagttgccaataacatattgatgattattagtgagaacttactgtcgttgattgtgatgactctctttcggtctactgcaacgtgttttacgtgctactatatttctctctaagcgtgggttgatctgcatccaataaattgtgatgttgtgttttcctcttcttttcaattaaaaatattttctaattccccacagcactttctctttgatacatggttagtaagaagtgtattgtttaatttccatatgtttgtgaattttccaga

SEQ ID NO: 682838 - DNA, 186 bp, Homo sapiens
tcattgagaaatcagcgcattaagtaacagccatcccggtgacagtccatttaggtaacagccatttaggtaacagccatataggtaagcagccatctaggtaagcagccatttaggtaacagccatttaggtaacagccatctaggtaacagccttttaggtaacagccatctaggtaacagcca

SEQ ID NO: 682839 - DNA, 759 bp, Homo sapiens
cccatcaggaattatggccatttggtgacttccagctcacatagtgccatctcagaatgagtgaacccggtgtgcactcagggagggagacatttgagttctccagacctacttaaggcaaatatgttccttatgaatgaggttcctctccttgttttacacttcctttactttgatctcttgcctctggtttttaatgagcaggagctttgtaggaaggtgaggagaatttttgtcatctatagcctgagcagaggggagttgaaggtgaatatgtgtgggcatatacacacacatgtatgtaagtatatgtgcatatatatgtgtgcatctgtgagcatgtggttgtatgtgcacactgaacagtttgctggtctaggcattaagggtattgtctagatgataataataataatatctaatctttatgaagtaacatgttcaggcagtgctctaagcatttaatgcctacaatatctatggcagcaggtactgaagatagtatcacattgggcagatgagggaaactgaggcacagaggtatcgaagacaatccacctgagcgtcacacaggctagaaaactgagaacagctcaggctaacagaccccaggatgggcgtgatccaaggctccgaactgaggccaatccaactgacaacgggaagccctatgggaggcaagaagaccacccacatgacccagatagagcgactctcgtctaaaccgcgcacaggccccaagaagggcagaagccacaa

SEQ ID NO: 682840 - DNA, 245 bp, Homo sapiens
aacttcctgcttatcatcaaacgcacgcatccacttatcatcaaacacctcgggtgacagaagaatgcaggtcagctccctgctgccttggcattatcaatcagcccaggaaccatcctataaaatctccagcaagcctttgtttccttgcagtcagctcctcttccactgattctgcctgttgctccctgataacatactttgatactgtctataataaatctgcctttcttcaccctcaaaaa

SEQ ID NO: 682841 - DNA, 223 bp, Homo sapiens
atctgctggcgatcctacaggatccccccctactcgatttctgttccactgggaataacagactatcaacgtttttctataacggtaatccactagatgctgtctttacggacccaagcaaatgtcatgggaccagagaaaatcatcctagatagcttccttaaccatttccttattgtattttcttattgtaatatatatagtacggaagatcagggtaccg

SEQ ID NO: 682842 - DNA, 136 bp, Homo sapiens
  misc_feature (23)..(24): n is a, c, g, or t
gtccattttggggcttaaaaaanntggggaccaaaccaagtaaaggccttggtgctggttggggtggggcctgcaaagttttagttactgatttcattttcaaaaaatgtaggtttgttacatgagtttcccaata

SEQ ID NO: 682843 - DNA, 355 bp, Homo sapiens
atagtaaaaatcattaaggccattagttactgaccactccctcaacctcccataaaaacaagaaaacggccgggcgcggtggctcacgcctgtggtcccagcactttgggaggccgaggcgggtggatcatgaggtcaggagatcgagaccatcctggctaacaaggtgaaaccccgtctctactaaaaatacaaaaaattggccgggcgcggtggcgggcgcctgtagtcccagctactcgggaggctgaggcaggagaatggcgtgaacccgggaagcggagcttgcagtgagccgagattgcgccactgcagtccgcagcccggcctgggcgacagagcgagactccgtctc

SEQ ID NO: 682844 - DNA, 802 bp, Homo sapiens
  misc_feature (731)..(731): n is a, c, g, or t
aaggccgaggtaacttccaggatgcgcttcgtggtcttctccaagctgtagtctacgtcccgacctccctatcataccacactcttcagcgaccacgcagggcaactttcccgtgtccccagtataccatacttgaagaaaaatgatggacagagagtggaatagagacaacacaccgtgggactcctcaaaccaaatcctgcagggattggctgcttactgcttatgtcttctaccccctgttccattcagcggccaaccagttctttttcttctccaaatggtatcctccaatggagtccttcccaccactcagcatactctattcctcagacgccccttcctccttgtgaggccttcaggaacacattacctttttgttgcctcctcctgcagagttccttctggtccccacacgctttgtaacttctatgccacactcctgtaatctccatcaaaagtggttgcttgcatatcgggataattaccatccgtgtatcgctcaaatgtcacacaaccttacaaaggttctggaacaccaaaaaacgatccttttttaaccctgggcaccccccctttcggggtcccttccctaatattacagggaatgcttcatggtaagggctttcaagagtttattgacactttacacatggggggacacttgcttggggaacggagcatcctcccaagaacagccccctgtgatgcccaataactgtttcctgcancattcaagagaacagagagtattatgggcaacttcatatttaactcacacaagcccagcgtttggacatcg

SEQ ID NO: 682845 - DNA, 576 bp, Homo sapiens
ggacggtttctcttcatcagccttcgagcgtatttctctctcttccaaaaacaaatcagaagtgtcttcacctgcaaatacctttatttgagctaggaaatctcttacatgttccttgcacagcaggacatatcttgatttaacgctgaaaagccctgtcacacagagctttacttgagcatcttgtaggtgagggaaggccgacttaaggagattagccacatattcctgacgaaagatttggttgttaactggacttccaggactttaatgatgtacttatttttccttcttcaaccaaattaaacatatatgcaagaattgatgcatgcgtttgttaaaccagcagtatgtgaagtgtctgtcacaacagaacagatatgctggcgaatatcacaaaaataagttttgataaaaactctgagctggaggttcttcttgtgcaacattttgtaagacgtgtaaaagtatctgtaagcccgtatctgcgacatacctcatagtatgtttgaaagcccaactgatgggatccacaacaagttttaactgttgtaggtgagacaccgtcgaattcga

SEQ ID NO: 682846 - DNA, 122 bp, Homo sapiens
ctgtagaagatcaaggcctggttaagtctataatacacaggaggtacttactacagtgcgaggcacgtatctcaatccatgttaacatactctcttttagtcttcacagaaatctttacgag

SEQ ID NO: 682847 - DNA, 158 bp, Homo sapiens
caccacatataagtgagttctatgctcttaaggacactttgacaagcagaccagctcagggagctgtcaccactctaggcgaatgtcagcccaccaagaaagggctcgtagtgacagcatgctacgtgagcaccagccatcacgcgagttagctggag

SEQ ID NO: 682848 - DNA, 678 bp, Homo sapiens
ccacatcagtcatcatcaagttactttcagagcctcaccgagagctcaacctgcctccgaccagtccctctgaggcccacaggtctgtcatcccatagggcaccccacacccgagaaattctggctgagggtcacttgcttgctctgtgccccctgaggcacgcaccctgcccccgatggacggggctttgaggggtgtctcccggcacccaaggcccgaacacccggagagcctgtgaccctggcagccttgttttatgggcgcatatgtgcgtgtgtggctgagtctctgacagctgtgagtgtgtgtgagcacgggtaagggtacctgaggggtctgagaggagtgggtgcttgtccccccaacctgcatgagagccagaaccactcctggccacggccctgtcctccccacgtacccctgcatccccagcctcgacccacgggacattcacgggctcaacaacggagacacgggctcaggctgccggagctcccacccaactctgtcccacttcacgcacggactgtcctgggcaacaaggtgttcacctttccgagcctcggtttccttatctgttaagccaagcgacacccgcaacagcctgtgagccttgtgtatatagcagacatggaggtcctgcagccggaggtgctccataaacaccaagcgactga

SEQ ID NO: 682849 - DNA, 329 bp, Homo sapiens
ggccgcctttttttaaacttgggtcttttctgtgccaactttatgttggttttggttctggttttggttggagatggagtctcgctctgtggcccaggctggagtgcggtggcgcgatctcagctcaccccaacctccgcctcctgggttcaagcgattctcctgccccagcctcccgagtagctgggactacaggcgtgcaccaccacgccgggacaatttttttggtaattttagtagagatggggcctcaccatatgggtctgaaactcctgacctcgtgatccgcccgccctggcctcccaaagtgccggcattacaggcatgag

SEQ ID NO: 682850 - DNA, 1260 bp, Homo sapiens
  misc_feature (1260)..(1260): n is a, c, g, or t
ggctggagtcggtgcttatagtacagcacgctgtgacacctttactctcgtccggccagtgcgaaccctgattgtgagctctggtatcctagtgcacactgccttgcaagctgactggcgccatgagctctgacttccagcttccagcgtacgagttgaattggatctgcagcaagattaccattgctagctgggacagctgcaatttggttatctagcttacaacaagatttgattgtataaagcatcatcgcaacataacagcatatgcatcaacaccttccaccatccagcacaagcacaaccccaagcaaagtcacatgcattatatgacatggcaggcatccgggcagcataaagcttgtgtcacttgccagtatgtatgggcagtgtcccaaaacacagttccccattctttgtcgcattgtgggcatcacaacaaagacataaacggcaagcagacttggaggcacacatgtggtgcccatctgaatctatcgaaggcaaacacaagcaaaccttcacactggcaccacttatcgcatgctagccaagatccagcttgtcgtagaagttcacctgcattgggttctcaattcagcaatgcactaaccacctctggtctgattcaccctttcgctgcgatcctacactggtgcgcatatttgcacaacttgcaagcctatcacattgactggcactctggcctatgcttgcacaccattccttggtgtgcacaattaggtgtacacaaacacccacacaaccgaacgggcacaaccaagcactcaagtcacaccgtgccaatcaaacccggccacttgccagagggcacacagacaaatgcagaacaacacgatggcaccaacagacggcggggcagccacaacatcagacacacggcggcgccaacacgccacgcccccgcacactaacacggtacaccaagactgtgccactgctcggcaactgggcgtggctcaacgctacaaagagagagcacccacagagacatgagagcgagacagcaccagccacagcgcacgcgccacgcagggctgcccaagcggtgcaggcgcacgccccacaggacagccgccaagtgcgcaacagcacaacaagcacggccggacagccgagacgcgacacaagagacgcgcagcgacaggcacagcagcgcgcgcgcgacgacaagcacggcagcgacacgcgcagctcagaggagcgcaacaacgcagacactgacgcgcaccaacaggn

SEQ ID NO: 682851 - DNA, 367 bp, Homo sapiens
cgggtgatctagaggatcccacctcctaccccacgaggtgtccctcagattgaacgtcacttttgacattgctagtccaactggctatactcaatgtctctgctgtggacaacatttacgggaaaagagtacaagtattactatcactaatgacgagggccgttcgagcaaggaatacattgatcgtatgttccaggaagctgataggtacagagttcaagattagaagcagcatgagtgatcgaggtgtcgtccagaaatacacttagagatcctctgccttcaacatgaagggccacctgttgcacaatatagaaagtatcaaggcatagattaagcgatcaggacaaacagatggatcccggac

SEQ ID NO: 682852 - DNA, 916 bp, Homo sapiens
cactacggggccggggggcggcggcggcagtggttgcagcggcgtgcggggtgtggcgccgcagctggcccgggtggatgagttggaggggcggggtgctggcggtgtgtgctgggggtgtgccggcggctaggggcccggtgcggagccccgcgtggagtcgtgctgcttgctggcacgggtggctgcagctgtgtggcgtgtggccggtggtgggccggcggtggggatggcctggggtcctgcaggcccccggtacgacaagatccggactccggcccggactacgaggcgctgccggctggagccactgtcaccacgcacatggtggcaggcgccgtggcaggggatcctggaggcactgcgtgatgtaaccccattcgactgcgtcaagacccggatgcagagtctacagcctgacccagcttgcccgctatcgcaatgtgttggaggccctctggaggattataaggaaccggagggcctattggaggcccatgaggggcgctgaacgtcacagcaaacaggcgcaagggccttgcccacgccctttattttgcctgctacgaaaaagttaaaaaagacattgagtgatgtaatccacccttgggggcaataggccatatttgccaatggtgcggccggttttttggcaacattacttcattgattgcagccattgaacccttgcggacagttgctcaagcagaggaatgcagattttacaagtcaccaataccaccgggttgaccagacttgttgtaacgggccaaatgttggcaaaaattgaaggggggccggggcctttttaccgcgagttacaccaacccagtttgaccatagaagcgttcctgttccaaggccattcactttcattgacctattgaattcgtgcaaggagccactttaaacccca

SEQ ID NO: 682853 - DNA, 181 bp, Homo sapiens
cgtctgttacggaggcgctcgttacggaagcgctcgttacggacggggctgttaggaggcgctcgttaagaggcgctcgttacggaagcgctcgttacggaggcgctcgttacgggcgtgttaggaggcgctcgttatggaggcgctcgttacggatggctcgttaggcgctcgttacgga

SEQ ID NO: 682854 - DNA, 730 bp, Homo sapiens
cctcccagtaacttcaggtgtttaataaagatgtgttgactcaaaataaaaatataaaaaataagggacattctggtgaaaattatagcgagatcacatgagttaaaacatattgtgtgacattgtcttatttagggggaaaggggagtatctgcatgacagttattgccaaaatgtaaaacatgatgctctagcagcatatggttaaacactatctgttccaagggttgacatggttttcccagcttgtactcatcatgtctgtggtgtagcacaccttggcacataaaacatgattgtatacaccatgcatcccctgcgtccatgagttacatgtgtactcttaatgtccactttgtttctatgctcttcatggattactttctgtgctaaatacagtcacttatttccttcgaataatataatcttcttgtctctagtctaaccctctcaaacttctttaataatatgtctctcctttttctccgtctgctttattattccttagtctattcattcgttcccaattctacgttactttggctctttttccctatcttaagcttttttccctttacagcgcccctgttttacaactttctttacttttaccctgggtttatccaccttatatcgctttctataacattctcctttacctcggtttcttcaatatctatatatccctattatgtttctctttacctttttctcactctctcgtgttcct

SEQ ID NO: 682855 - DNA, 906 bp, Homo sapiens
agcggggctggcggagcagaggtgcagaagcaactgaggtccaagctcgtcgtgccggcttctagagtggacccagaagacgtccccagactcaggaacgattcagccgtatcactcatctcgctgctacagcatagtgatactgcctcgcggacacgtgcctctggttctggattatgatttcggcctcccgagggggttcactcggtggtgcctggcatgccctcgttccattctcggccttcgaaggcgacgtgcgtctccgtcccctggccgctttgacttcccggatgagctgcgggccgctgtggctgcatggtgtctggtagttctactagccccgtagccccagagaagctaccccccggtggctcttcaacgtcgcgcacgcctagtagtccacgagagctgtcctgggccgcagtcgcctccgtgggggatctgggcctgcgaaactgcagccctcctgagtcagcaaacgtgctgcacccgacgctgggcggcgaagtactagttccgtgggtacctggggcggtaccaagcagtacaccttctcagagcacagcgtcctggactactcgtacaacatccccaacatcgtggtgcccccagtatgtggtggcaagcacggaggtggaggtcagcatgcatggtgccggagcagtgtccagagactgcggcctgagctgagctgtctgggccactgaaggggctgtggggagccccctgtgccggggccggcttgcgggatgacgatggcaccttgggttgcatgttgtcacttgctgcacttgtcgtgcccatgacggaaaggcctacgggcctgaatcttgggactgccaggcctccttccgaaaacaagccttcagtccgaagggctagaccatgatggaagtcagtaccccg

SEQ ID NO: 682856 - DNA, 81 bp, Homo sapiens
  misc_feature (25)..(25): n is a, c, g, or t
  misc_feature (39)..(39): n is a, c, g, or t
ggtttctacaggaagagatgggatnttttacaatttggngatttaataaccagggctacccagaaaaagtgacttgataac

SEQ ID NO: 682857 - DNA, 385 bp, Homo sapiens
acgcaccgggtttagccaacgcaccgtgttgggccaacgcaccgtgttgggccaacgcaccgtgtggtggacggtgctgccgagacatggtggctgtggtggacggtgctgctgagacatggtggccgtggtggatggtgccgagacatggtggctgtggtgaacaatgctgctgcagacatggtggctgtggtgaacggtgccgagacatggtggctgtggtgaacggtgctgccgagacatggtggctgtggtggacggtgctgctaagacatggtggccgtggtggatggtgctgagacatggtggctgtggtgaacggtgctgccgagacatggtggctgtggtggacggtgctgctaagacatggtggctgtggtgaacg

SEQ ID NO: 682858 - DNA, 797 bp, Homo sapiens
tggaaatagggtttggctcggtcacccaggctggagtgcaggggtacaatctcagctcactgcaacctccgcctcccaggttcaagtgattctcctgactcagcctcccgagtagctgggattacaggcgtgtaccaccacacgtggctaatgtttggtattttaagtatagacagggtttcaccatgtgggtcaggctggttgtgaactcctgactgcaggtgatccacccgcctgggcctaccaaagtgctgggattacaggcgtgagccaccacagtctgcctctattttcttttatttagaggcaggtttcactctgtcatccaggctggagtacagtgtggcatgatcatagctcactgcaacttctaggctcaagcaatcctccagcctcaggcccaagtagctgggaccacaggcactcacggctacacacggctaaattttttttttttgggtaaaaacggggtctggtaatgtggccagggtgggtctccaactcctgagctcaaggtgatccttcagttacagcctcccaaagtgctaggatcacgggcaggagccacggtgcccagccaagatggatttcttactctccaaggcgtcagcttttggaagttccttttatgaaaagtgcgggcaaaatcgggtgaaactggtgtaacaaggcccatctgggtcagccctagtgggtgccggaaagtgcccaatgttcggcctggccaggacccagagaaggtcaaattaggcctggtcggggatcacggcagatcgagaaaaactttgaaagaattt

SEQ ID NO: 682859 - DNA, 126 bp, Homo sapiens
actcggaccccatgttggcgaggctgattttgaaatcctgacctcaaatgatccacctatcttggcctcccaaagtgctaggaatataggcatgagccactgcaccttttttcttttttttagata

SEQ ID NO: 682860 - DNA, 187 bp, Homo sapiens
ttagaccgcagagtgggatgtgacctggctctgtgcggtattgcaaattgatgaccatgctccctatgctccctacagaaccatccagtgtttggggcctctccagctggacaggcagctggtacctctaccagatcttaatatagtttgcaactcagatctccgttcatctctgacagatggccat

SEQ ID NO: 682861 - DNA, 389 bp, Homo sapiens
gaatggacgaacaaagtgtgaaaatcaccatgctaattcagtctcttttgtggttggaatatcttcctgaagagtatagcagagtctgctggggcccgagaccgaggcccactcccgagaattctccaggcggtccgggacctctggtgtccgaaaccacctccgggccagggagtccgcatcgcagcggtccgggggccaagaatgggcctttttttttaaagaggcttaatatttgggaattatttccaacttaccgaaaaattggcaaaataaaaatccataccaacacatatatattgcctatacaccttttatccagattcatctgttgttgatattttttttctttttttttttttttgggaaatgtccgtcccattgggggt

SEQ ID NO: 682862 - DNA, 1063 bp, Homo sapiens
gtcaggagaggagagtggaggaggagaatgcgagggagtgtgagcaggggcaggagccaggagaatgagcctccgccatgatgtcggatgccggatgcatggagcaaagcgtggcatgcaggatgcctggagcatggatgcctgcagcaagatgcaaggacaagatggaagagcaggaagagaaagcagaagaggagagccgcagtcgcagatcgcagcctgcagcaatgatgtgacgatggaagcagaaacgcgacggcagcaatgctgagacaagcttgtggcgggcaagcagcaacgaagaacgaagaaggaagacacatgacctgctcccagtccagatctcacatccctgctcctgtgtcaaagtgagcgggaacatgccaaagtctgaatccagccatgatgtggaaggtcagagagagagagtgagaatgctggcaccaatcaggagacccggatccaggtcgagatccaattccaaatcgaaaccaaaccttccatcagaatcacgctccagatcaaagtcagcttcaaaaacccgatctcggtccaagtctagatccaggtctgcttccagatcgccctcccgatctagatctaggtcccactcaaggtcctaactggctatggacacatgtggaactaccgagaagtctttatgaacatgtaaggaagacgtaggaaaagtgattggagtagaagatgtactgctgtacatgttaaaatcacataatggtgtgtatataaattgataaatctaagtgttcttgtcaagtacaagccttcatgtgcacaagggctatcatggatcgagtgacaaccaaatctatctttgtaaaattcccttataaataatgaccaaaagatgaaattataaaaaagactttggtattaggggatggcatacataactggagagatagtagtggagggaataaagggatgtatagagaataggatagaatagtgggagaaaaaataataggttatgcatgaacaatagagagtaaaacaaggaagaggaataagagattgacaagtggtgaaatgaggagaagtt

SEQ ID NO: 682863 - DNA, 582 bp, Homo sapiens
  misc_feature (111)..(111): n is a, c, g, or t
  misc_feature (346)..(346): n is a, c, g, or t
  misc_feature (384)..(384): n is a, c, g, or t
  misc_feature (429)..(430): n is a, c, g, or t
  misc_feature (441)..(441): n is a, c, g, or t
  misc_feature (546)..(546): n is a, c, g, or t
  misc_feature (572)..(572): n is a, c, g, or t
cgaggacagtaccacagtaggcaagggacagagcacaacttcagtatcaagaaattagatcacaactctgatttaccacacatgaggactgtcgcgagtcagtgtaagttngccgacttccttctggcttagcaggtgctgcagctgtactctcgactcctgtctgtgagcgtgagctcaggaaatgagagtggagtctattccaaaaaaaaaatgtgatgaagtttttcataaaagtgcattcatatgccaaatcctttttggaggaatctggatgctaatggtcaattctctactagtaaaatgatcaagccttcaattaatttaagctttggtttttggaccnatttggtttccctgctggaaatgagaataatggttggnaaaggtcatatctggaattaatgaatctcttggaaaagcttttgnntaagtcttaanggttgccattgcagtagttgccatccccggtaaaggatacctagtgccaatacttgaagaagcttccttgtacctcaagactttaaggttaccaatcttatccanggagtctttgttcttgtctgcatgangagcctcttt

SEQ ID NO: 682864 - DNA, 1157 bp, Homo sapiens
gggtaacccacgatggggacgcggccgaggagggtcgctgaccaccctgggggcgtgggagtgaggtaccagattcagcccattttggccctgatgcctcatgtactcggaatccgggtgctgcggattgaggtcccggttcctaactggattgcaaggatggaggaagtgcgggaacctaaggagggcctgactcacagatggtaccatctcacttgagtcaaggtcaaggctgcctggggaccttgccacgctgtagtgagtgaaccattcgtcctccaggctattcgtgactgtaccctgaacgccctgtcccccgaacgatacctccgggacatagattgcagacgcgacagactcctgtcccctatcgtactatccacgatctccagtggggacttgctgccatgcatcaaaccatcatgacattctatggcttgcaccagggattgcttgtggcatcacgcctcaaccagtccattgaggcaggggccaatgccacatgcgtatcaccttgcattgtacccatgagaccctaagtatgctggcacaaatggtcagagctgccctcgattgggcttggaaagccccgggcaggcaaagagctttggccaattgttggggcccattgagcagccggtgggagaaagggagcgaccgggccagtggagagggcggaagggccaccaaggcgcaggcgcagcgaggggcacccggaggcccaaacgggccagagcggagcaagacggacaccaagggcacaagatgcacctcgggcgcggacatgacatccgcaaaccccgtgctgcccgacccatgggcagcctgtgggtgcgacacgagcaccgggcgccggccatgcgatgcgcgtccccggcaacccgggagcccccacactggcccggccatgcgcaacaaggtccgccggagcaccagcagagacgaaagcgatcgcgcgctcgcagagccacagatccaacacaagagtgggccgcacagcaagcgcaacgcgacgagagaaaagggcgcgagcgaggtggcccccacaagagcgcagggaccgagaccgacgccgtaggcaggagcaggacgcaaccccgcaggcaaagacgcggcgcagcggggactgacgaaccaacagaaagacaccagccagg

SEQ ID NO: 682865 - DNA, 302 bp, Homo sapiens
  misc_feature (222)..(223): n is a, c, g, or t
  misc_feature (232)..(232): n is a, c, g, or t
  misc_feature (262)..(262): n is a, c, g, or t
  misc_feature (281)..(281): n is a, c, g, or t
  misc_feature (302)..(302): n is a, c, g, or t
gggagaccggaaacaatataataaatggacattaaaaaccttgagccagaaaggggtccgatctttgactcaagggccattaaactaacatgggcaatcatgtttcaaacaaaaccaccggcaaacaagtccaacgagggaaaattagatgaacgcacctttggcaacccccaccaccccagatatcaaaactttcttttttggaatgtaatcaatgtttcnnctagggtcnaaaaaatgtgatcagaccagaaggttacangattatcaacaatagtgantgatagagtgttatcagtcan

SEQ ID NO: 682866 - DNA, 956 bp, Homo sapiens
tgctctcgtgtttcggtgccgcgatctttcacgatggtctcgcccaaccttatctaccttctgtcggcctgtctctctgctgccttcctactcgtgaggatactgccggcgctctgctacggtctgcccacccaacgcgaagacggtatcccgtgtgactttgactggagagaagtggagatcctgatgtttcgtctagtgccattgatgatgatgtaacaaccgttcagatcccatgttccttgatgaactgtgtcaaaatcccctcctctatatatgggtccctcgagatatatctaatgatacgttcaatggataaaaaccattagagtttgaggaacgtacaaacgcggcaccaagagggtcgacttgaattcgtggcaagttctttgccaattgatctaatgattgtcaaatcatttgccactatctatgtctgtaccatctccacttaaaactacaactgtactaggggctaaattttcgggaatggtaggactgtttggatcgctatactgatgttagtacgcggtacaaacgtgagcacatcaccctcatcaaggaaatccctaccctgatcctgttaccaaggtggaaagaggcaatgcggaggcacagattgacaagaaaggacgggctgtctcatggaccttctctgaggagaaatgtgatccgagaatttgggttctaatgtgctagacccgcggggccggaacttttcatagggtcggggaaccatatccctggaggagcaagcttgtggttctaacccccaccacggtccgttggggcgaacgcagggtgttcaagtcctccgttggggaggtgccccccgggagatccgggcttctataaccagcggggcgcgctctattatttcccgtgggtagggggagcgccctctttaaaggcaccgtggtggccccggcggtctgcggccggcaacaaggcggggt

SEQ ID NO: 682867 - DNA, 132 bp, Homo sapiens
catactgcactgttgttcaaacccccccccgagtgttacagccccccgatacagcgagcaggtatgaacaacagtgcaggtttgaacaacagtgcaggtatgaacaacagtgcaggtatgaacaacagtgca

SEQ ID NO: 682868 - DNA, 212 bp, Homo sapiens
  misc_feature (6)..(6): n is a, c, g, or t
ggttangactctgtctcaaaaaaaatttttttttaaataaataaagccacctttgaatcaccaaccttatcatccacacacacacacacacgcacacacacacaattatatctaccacttggtgaaagaagacagcatacacccatgacatcaaaattaactaacgtaaatacataagtcaggaatgagtagttagtacagtgatcgaccaa

SEQ ID NO: 682869 - DNA, 197 bp, Homo sapiens
gactgacgagtctggctgtctgtggagacggattacaccttcccacttgctgaaaaggtcaaggccttcttggctgatccatctgccttggtggctgctgcccctggtggctgctgccaccacagctgctcttgctgctgctgcagccccagctaaggttgaagccaaggaagagtcggaggagtcgtcagtccgtg

SEQ ID NO: 682870 - DNA, 378 bp, Homo sapiens
ggctcggtaccagcatcattcacgaatgaatgcattctggctgggcgcggggctcacgcctgtatcccagcattaactcaaaagtccacagtccaaatctcatctgagacaaggcaagtcccttctgcctatgaccctgtaaaatcaaaagcaggttagttacttcctagatacaatgggggtacaggcattgggtaaatacatctattccaagtgggagaaactggccaaaatgatggggttacaggccccatacaagtccaaaatcaagtggggcaatcaaatcttaaagctctagaattatctcttttgactccctaacatccaggtcacactgatgcaagagatgggttcccatggccttgggtagctataccc

SEQ ID NO: 682871 - DNA, 268 bp, Homo sapiens
  misc_feature (25)..(25): n is a, c, g, or t
  misc_feature (176)..(176): n is a, c, g, or t
  misc_feature (219)..(219): n is a, c, g, or t
ccttctacgtctcatcactgaaggntcacagcttaggttaagaaatgagaagggactaggtccatcttcagcagatgaagaaaccaggaggcactcttttccacacagaagccaaagacagcagccttaaaatgtcttgggccagtttgaagaagtatagggaaaagagcaatggntgtaaggaaagcagggcccttaattttgtttggaagttgcttnttataattgcagattccattgtcacctggcagtgatgagacgtagaagg

SEQ ID NO: 682872 - DNA, 451 bp, Homo sapiens
aaaatcgggaaacatttccgggccgaggtccacctttttccccccccgttggaggaattggcccttaacaaactggttacgcttacgtgcctggcacgcggttttagccccaaggaagtgttggttttttggctgcaggggttacaggaatttccccccgaaaagttcttttttttggcattccggcaggagcccaaccagggcccccccacttttttttttccaagcattttgggggtggcaaccaaggattggaaaaagggggacccctttttttgcatggtgggccccaaggcccttccgttggcttttacacaaaaaaccattgaccgctttgggggttaacccccccattttaatttttttttttttatgggggaggtggggggccccttttttttaaccgcccgccttttccccccctttaattaatttcatttttccccaaaca

SEQ ID NO: 682873 - DNA, 323 bp, Homo sapiens
  misc_feature (107)..(107): n is a, c, g, or t
gagatcctaggtctgggctccctgaggggtcacagctcttctctccttctctcttcccacaatatagagagcaaggggcatgtttcagccttctttgtattacagtnctttcagccttgccattctccaggtcccaagttcttgtcctgcaaccccgaagaatgaggtagtcagacaagtgaatggtgagccagactaagaggagctttactgagtgatagaacagctcagtctcccatagggcagctcctttctggagccagggtgtcctgtcgagtgttcagctcctagcagagagggtaactcctctctgcagctggtca

SEQ ID NO: 682874 - DNA, 1128 bp, Homo sapiens
ggaatgcaaagggcacaaaatgatggaactgttcatgggcaaggaagtacttcacttgtgcatgaagggcatggccatctttgtgcgccagtcctcagatccaggttatttcgaaggcatggaggtcacgatatctacttccgccaggagtgcacactgattacttgctgcgttcaaaagtcctcaaaagagagggaactgatacaagtgcaaacgactatcaagaacttggagggatggaccggcgccctaaagggctcagtgtgcgggacctggacgatgaaactagagatccctgacgacttgaatatcgggcacgaactatcgaaagcaaatgctacatagagcgtagggcatgaaacacagaaatcctagctggcagcaggtgccggacatggcaagagccaaatgcaggcagcagacaagagtccgaacctgactagacgtgatgcctccaggaggctgaggacagtgaagccaaggaggcgctggacgcgaaaggaacgctataatggaggagcatggctgatactggctgatgccattgaggatggccacgtgtggaccatgagatggctgaagaacgtgctgacttacccttgtaactacgcatggtggatggcacctgacagcgagacaggtgtaggactgagcaccctagttcgacttaagagatcctccaaggctgccacttgcacacgaagggcccaaatgtgagatgagatccagtatatccatccacatccgctcgcattggagcggaagccaacactgcgcagccctgcaaggatgccgcccgggctgatgggatgagcgaatacctgtcttcctaagaaaattggagcagcatgtcaacgtatcatcaagcctccgaaacaacacgaacccacatctggcatttggacgccactagtggttagacgcatgagaagcaacacgtaaaaactgaatcggaaaacccatccagtgttgtcccttcaggcgtaactccgtaacaatgagtgggcgatacgcgacgatggatatcttgaccaacaatgaccgtatcggtagtgacgaggccacttaggcgacgttcatgtgaataactcatatcgagtgacacaccactatgaacgatatttatgt

SEQ ID NO: 682875 - DNA, 716 bp, Homo sapiens
attagttaaccactcactcatcgacctccccaccccatccaacatctccgcatgatagaaacttcgggctcactccttgcgcgcctgccatgatcctccaaatcaccacaggactattgcctagccaggcactactcaccagacgccgtcaaccgccttatcatcaatcggcccacgatcactcggagacgtgaaagttatgggcgtgaactcatcccgctagccttcacgaccaagtgggcgccgtcgaatatgtctttagtctgcgctcttcctacgacatcgggacgaggcctatattacggatcatgtctctactcgagaaacctggaagacatcggcaattcatgcctacctgtccttgcacacgtatagcaacagtccttcatgaggctatgtcctcccgtgaggccaaattgatcattgctgaggggcgcacagtaattacaaatcgttactatccgccatcccatacagtggggacagaccgtagttcaactggaatctgaggaggctacgtcaggtagagcagtcccaccctcacaggatgcttgacctttcacttgcatcttgccctgcatggatggcagccctagcgagcactgccgactcctattcttgcgacgaaacgggatcaaaataacccgctaggaatcacctccccattccgatgaggatcatcttccacccttagtacgcaatcgaaagacgcctcg

SEQ ID NO: 682876 - DNA, 409 bp, Homo sapiens
gtggatgagaacagtcgagttgtatctgacagttatagttcagagagctttgctgagatgaacaggagctcgaaggagtggtagacggttgtgggcggtgccatgttcttcatcggtttcaccgggctcgttatcatgtgggagaagcactatgtgtacggacccctcccgtaaagcgtttgacaaagagtgggtggacaagcagagcatgaggatgctggccatgaagtgtgagaccccatccagggcttagatctccaagtgggactacgaataagaacgagtggaagacgtgagagatgctggcctgtgcttgcatctgcgcctggttctgtcagcgtcatgcaagtccatgcctatttactggaaacctgttatgcgaaatagttgtaccattgctaatgattgt

SEQ ID NO: 682877 - DNA, 180 bp, Homo sapiens
tgacgcacaaagcggcgcgtgttctggggctggatgaaggcaaagaagtgttggatattgctaaaagcgccgtgggtaggtattactcaggccgaggcggtcggcaaaaacgctgacaaccaattaccgggtattattagtcaatattgagcgcggccagaagcagtgcgaagtattaat

SEQ ID NO: 682878 - DNA, 420 bp, Homo sapiens
aggacatacatttgcatcgccggatatttgtagagatagcttaagggatggcagtttttatggcgcttcgtaataattactgtgaattacttagatatattacgcgacttagttagtaagaaattgtatctagtatgtagcatctggacttaagtcattccatcttagacttacgatgaatgctaaatgtgactgctcacagaccttagagatgatgagcactgttgctcatgagtaacaagttgcttatatgcagaacggatggttgatccttcttgctccgtatgatgcatgtaattgcatgtgaatgacttgttgactagctattaaggaactagagtagctaaatgagtacagtgcccttttgcaatctggatatgacttgaaagtaacgcatcataatggccttaaggtttttcc

SEQ ID NO: 682879 - DNA, 535 bp, Homo sapiens
  misc_feature (26)..(26): n is a, c, g, or t
  misc_feature (49)..(49): n is a, c, g, or t
  misc_feature (62)..(62): n is a, c, g, or t
  misc_feature (78)..(78): n is a, c, g, or t
  misc_feature (264)..(264): n is a, c, g, or t
  misc_feature (283)..(283): n is a, c, g, or t
aaaaaaaatcttcctaagttcccaanctggtctcgaaatccctgggctnaaataaacctccnaccttggcctcctgantaactgggatgaacaggcaaaagctaccaagcccggcttcccctgcttttgaaacaaaaatgtcctttactggttatcctgtgccctgccctcctaccactgccacactgggagtgtggagatgacctgtctctttagctcacaggtctgcagataggaaatgcacttaagggctggatgcgggtntcacgcctgtaatcccaanactttgggaggccaaggcaagtggatcacctgaggtcaggagttaaagacgagcctggccaacatggtgaaatcccgtctctgctaaagaaaattagctgggatggtggtgcatgcctgtggtcccagctacttgggatgctgaggcaggagaatcgcttgaacctgggaggcagagttttcagtgaggtgagatggtggtggctctgcacttcagcttgggagacagagcaagactccatttcaaaaaaaa

SEQ ID NO: 682880 - DNA, 562 bp, Homo sapiens
ccctcgccaagtacagtctcctcagcccagagatatggaagcccctcccaacagaggctctccccacaaggccagcagcccctgagcccccagtccggatttccacaacagcaaaggtcaccaggctttccgcagctattccgggcatccagtggcagctccccaaaccaggcctccaagccaggtgccaccctcgcctcacagccccggccccctgtgcagggccgtagtacctcccagcagggtgaagagtccaaaaagccagcaccaccccatccgcatttcaaaaaatttcagttcctgacttacaaccctcagcacaatcggacacctcccagggtgggaccccaagttaaaacgaggccaaggctgaaaccatccgcaacctgaggaagttttttgccagcctgttttttgactaaccccatccaggctgggaggggaaaagtggtttgctacacttgtccccctcctgcctcattttccttttcaaccttggttcctgatgggaacaaaaaggagggcctgagaacaaactttttaaatgcctttggccccggga

SEQ ID NO: 682881 - DNA, 84 bp, Homo sapiens
aacttgatatatatacatgctatagtttgaacattttgtgtacttccaaaattcacattaaaatctaatccacaaaacgagaaa

SEQ ID NO: 682882 - DNA, 372 bp, Homo sapiens
  misc_feature (197)..(197): n is a, c, g, or t
  misc_feature (200)..(200): n is a, c, g, or t
  misc_feature (203)..(203): n is a, c, g, or t
cctccccagcccaggaaaaattggaagccttcccccagcaaggcaaaagcttggaggagggttgtaaaagcatattgtccccctccttggtttatcagatttttttattgccccgcaaactgagaatttaggcccccccaacctttgttccccccccagtttttcttttggagggatccccccatttcaggggtaanaanagnaactcccccctcccattcccccccctcatacctacacccaaggttgtcagctttggattgctggggccaggccccatggagggtatactgaggggtttataggtttgtgattaaaataataaaagctaggggtgtttgatgcgcttttaactttggcaaaaaaaaaaaa

SEQ ID NO: 682883 - DNA, 1869 bp, Homo sapiens
  misc_feature (198)..(198): n is a, c, g, or t
  misc_feature (468)..(468): n is a, c, g, or t
  misc_feature (1083)..(1083): n is a, c, g, or t
  misc_feature (1182)..(1182): n is a, c, g, or t
  misc_feature (1215)..(1215): n is a, c, g, or t
  misc_feature (1371)..(1371): n is a, c, g, or t
  misc_feature (1406)..(1406): n is a, c, g, or t
  misc_feature (1665)..(1665): n is a, c, g, or t
tgtactgcctaaagctgggaggctggctccagcgaccactgtcagacacgaaacaagaggtaggacactgagctcgtgtagaatggtctcagcctctgcacacgaggcatctaggggagacgaggtggctgctaggtcctatgcttgggtttgatcacgtaggtcgaggcggcgtgaaacatcgcatcaaacacagtnaacgcgactcttggccacaagtcggaaaaggctgcgtgcgctggtatctgcacacgcggcggaccacacggcagatgcttggctcacgcaatgcgcggtgctcgcgactgcggatcgatgcgtagcgcgcgaatctagggtggaccggggaatagccaaccgaccatcgatagcgagtgcttcgtagcgctcgagccagggggtcatttcgaggaccctgttagtcgaagcgtgcagtgagtcggttgctagacgcagtaacgagcgaanggtccactgtgtcgtgctcgcgtgggaccgccactcatgtccctagtatcatcgttgtgtggggattctcgggacggtgagggcgcgggatagccaaagggttcgcccgccgggactgattcccccattgttcgatcggccgccaaccaatcttggtcgattgcacggggcactgggagatcgcggacgtgaaccggggcgttcgccgcaccatctttccattttcgcgttccctcatccgttgcgcccacaggttgtaaaatggtccccccctttcccggcgaccaacatagccccatatattcgaaagacctcgaggcgcaaactttaaaccaaaagcggtttacgaatatgccatgtctcgcacattaagcaatatcgtcgtatgaataggaggcgcctatgtccgcttcgaagcatatacacaaagttctggtgttgaacccccgggtgggaatacgcagggtatgcgtcctaaggtatagccccaccctgggttatcctccaggggtggacacacggcggcggtttctcttacgttagagactgggaacacactgtctggacaggtgcaaataatatagtgcctcctttcctagaaactgcgttgtccanacggataacataaccgggttaggacactacccggtatagacaggacgcaactacgcaaagatgacgatcacattagtctcctaccacaaaagaagaggncgtccggttattaccacagggtcggctcaaaangggcgatcagatacatcccaggatattaatatttgtatgtccacccgctgtgttggtccgccaacacacgcgtgccctcccgagcccggttattactgatatgtcgaaaggtctcccaataaccgtgggggacctataccattacaattcaaatgnccgctaaaagggggacatactgccccccggccaantggataaaccaatgtggagattaggtttttcgcgccgcggccagaacccaaattatggctcatagtcggaccccatacccatttgtcgtggcgacgttttttgtcacactttcggcctcgacacagcacacctggggaggcaacacaccgacgccgggggagaccacgagcaccacaagaagcatagtgcaccttcgaacgagggtgcccccgcggacggcttttgtgaacaggtttattgacacagcatacctttgantgctatgagagcagctggtgcgcgcccactaattaacagcggcacgtccgcgtgatacattgtgagatctattcgccgagagctgacgagcccgcttctgacaaagtgattatttatcagtgtgttgtgccacccttatgtattgcgtgcagacatcgatgtgcgtcaagcaacacacctataccctggtcggatggctgctca

SEQ ID NO: 682884 - DNA, 905 bp, Homo sapiens
gtgacctctaccacctcctcgtcgggctcctcctgtgacagtctgcacctgccatggacggagcccagcagctcctgaggctcccgccaagaatgtgggcatggctcccatgagcaatgccggcactctgcccacacagcataccaacaactccatgcacgctggctttgaacccgtagaaactgggtgccccctcatcctcctgcttcaatcatagcctgaggcactgcgtgcatcgggtcccttgcatcaaccaccacacgcctacagcctaaccctgcgtgcccctagcctggctggcgcgcgcagcactctgctgcgcacgaaccatgcaagcctgacaactggtcacggtttaccagtgcatgccccccttggaccgaagcctctgttctcgcttgtccactacgccctcttccattgtattgcccattgatgcaacccaacggggcctccaaatgcctgtctccaccattatagcccgcgcacgccctggaacctattctggctatctcattggccagatttgccattatacttttcctcttctggttgccttgctgcaacggcctacaatgcctaggatttggtcggccgaacctcaatgtcgcaatcgggtgaacctgattgtgccaatactgcgttcccctgcttgcctttggtgcccgtttacttcaagcgtcgcgtgacacttggtctcctccctagaggcccttggtcggacccctaatgggctgggttcccgaatgagtacccccttggtgaggaatatctgatccaatgatgggcacaaatctgggccatggtttttgtgctctgttttccgatcatgtgccgcaaccacgtattgggtgagaaaactcgagatgatgatggcccaaatcttggtctcttgtagactctgg

SEQ ID NO: 682885 - DNA, 320 bp, Homo sapiens
gcgaccacacggccggggcgctacgtttcgccttcagccaccatgggggaatgggatgaacaagatcctgccccgccctgtacatcggccaacttcaaagatgccagagacgcgggaccaattgagcaagaccaaggtgccacatattctgtctgtccacgttagtgccaggcctatgttggagggagttaaatacctgtgcatccagcagcggattcaccatctcaaaacctgacaagacatctcagagagagtattaaatacatacacgagttccgtctctgcggtgagagctgccttgtacactgtctggcccgggg

SEQ ID NO: 682886 - DNA, 887 bp, Homo sapiens
  misc_feature (238)..(238): n is a, c, g, or t
  misc_feature (243)..(243): n is a, c, g, or t
  misc_feature (249)..(249): n is a, c, g, or t
  misc_feature (260)..(260): n is a, c, g, or t
  misc_feature (271)..(271): n is a, c, g, or t
  misc_feature (273)..(273): n is a, c, g, or t
  misc_feature (279)..(279): n is a, c, g, or t
  misc_feature (289)..(289): n is a, c, g, or t
  misc_feature (291)..(291): n is a, c, g, or t
  misc_feature (300)..(300): n is a, c, g, or t
  misc_feature (306)..(307): n is a, c, g, or t
  misc_feature (314)..(314): n is a, c, g, or t
  misc_feature (321)..(321): n is a, c, g, or t
  misc_feature (329)..(329): n is a, c, g, or t
  misc_feature (342)..(342): n is a, c, g, or t
  misc_feature (346)..(346): n is a, c, g, or t
  misc_feature (353)..(353): n is a, c, g, or t
  misc_feature (360)..(360): n is a, c, g, or t
  misc_feature (365)..(366): n is a, c, g, or t
  misc_feature (387)..(388): n is a, c, g, or t
  misc_feature (395)..(397): n is a, c, g, or t
  misc_feature (399)..(399): n is a, c, g, or t
  misc_feature (404)..(404): n is a, c, g, or t
  misc_feature (408)..(408): n is a, c, g, or t
  misc_feature (410)..(410): n is a, c, g, or t
  misc_feature (426)..(426): n is a, c, g, or t
  misc_feature (432)..(432): n is a, c, g, or t
  misc_feature (438)..(438): n is a, c, g, or t
  misc_feature (447)..(447): n is a, c, g, or t
  misc_feature (453)..(453): n is a, c, g, or t
  misc_feature (457)..(457): n is a, c, g, or t
  misc_feature (460)..(460): n is a, c, g, or t
  misc_feature (466)..(466): n is a, c, g, or t
  misc_feature (476)..(476): n is a, c, g, or t
  misc_feature (493)..(493): n is a, c, g, or t
  misc_feature (499)..(499): n is a, c, g, or t
  misc_feature (502)..(504): n is a, c, g, or t
  misc_feature (507)..(507): n is a, c, g, or t
  misc_feature (512)..(512): n is a, c, g, or t
  misc_feature (514)..(514): n is a, c, g, or t
  misc_feature (516)..(516): n is a, c, g, or t
  misc_feature (519)..(519): n is a, c, g, or t
  misc_feature (530)..(530): n is a, c, g, or t
  misc_feature (533)..(534): n is a, c, g, or t
  misc_feature (538)..(538): n is a, c, g, or t
  misc_feature (778)..(778): n is a, c, g, or t
  misc_feature (885)..(885): n is a, c, g, or t
gcttgctttcgccgcgcactccgccgccatggagcagcgccgcgtcaccgacttcttcgcgcgccgccgccccgggcccccccgcatcgcgccgcccaagctggcctgccgcacccccagccccgccaggcccgcactccgcgccccgggcctccgcataccagtggcagccgcaagcgcgcccgcccgcccgccgcccccggacgcgaccaggccaggccaccggccgcaggagacngcgcngtcggnggacgaggttntcagccccagnanccccgnggccccaganancccagcctncccttnnccgggcnagaaganaaagaaanccaccccggcagnaggncagccgncccaccngacanncgcgcaggaccaggacaccanntctgagnnngngtcangccngnaacgggcccgggagcngggggnaagagnccgggcgcngaaggncagngcncaggangctggggagncctgcaccccagaggcngagggngcnnngangagcnangnggngagaaggcgcncgnntatnagcgttttcatgttctggtgcagctcggcctgccgggactcgtgctgccctacaagtaccaggtgctggcggagatgttccgcagcatggacaccatcgtgggcatgctccacaaccgctccgagacgcccacctttgccaaggtccagcggggcgtccaggacatgatgcgtaggcgttttgaggagcgcaatgttggccagatcaaaaccgtgtacccggcctcctaccgcttccgcnagagcgcagtgtccccaccttcaaggatggcacaggaggtcagattaccagctcaccatcgagccactgctggagcaggaggctgacggagcagccccacagctcangg

SEQ ID NO: 682887 - DNA, 362 bp, Homo sapiens
  misc_feature (204)..(204): n is a, c, g, or t
  misc_feature (304)..(304): n is a, c, g, or t
  misc_feature (310)..(310): n is a, c, g, or t
  misc_feature (319)..(319): n is a, c, g, or t
cacgagggagagtgtgcccttcgcccagcacagcagcctggattcccgcatcgagatgctgctgaaggagcagcgctccaagttttccttcttggcctctgacacagaggaggaagagaacagcagcatggtccttggggccagagatacagggagtgaggtgccttctgggtcagggcatgggccctgcacaccccctccggncccagctaattttgaggatgtggcacctacagggagcggggagccaggggctacccgggagtctcccaaggcaaatggacagaaccaggcttctccatgntcttcnggagacganatggagatctccgacgacgaccggggtggctcaccccctccgg

SEQ ID NO: 682888 - DNA, 366 bp, Homo sapiens
gaacgggtgatgcggttggaagggtgatgcggttgagaatgtatacatgtacgttatactgaccattagttcttctatagggtgatagattggtccaattgggtgtgaggagttgagttatatgttaggaatatttcaggtattgggtgttgaactggaacgcttgcttaataggtggctgcttttaggcctactatgggtgttaaattgtgtgactctctcgtaccagaggtttttacctagtgtccaaagagcggtccctcttgggcgtcacagttcaaatttcacaaggggcatagagagggtccggtgggcaaatttacagtcgcacctaagattctatctgggacaaccgaatcacccgta

SEQ ID NO: 682889 - DNA, 226 bp, Homo sapiens
aacatgtataagaaacgcgcgctgagacccccagcaggtcacccgtctgcccagcggctatgggctaggcataccgcctgacccctggggtgcacgagctgccggtgcagcacgccaggagaaacgcatacctgaaggtgtccatagaaagagctcaacaagaaaacccctctcctcaccgagggccaggacatctgattcaccatcctgggcgtgctcaccagcc

SEQ ID NO: 682890 - DNA, 262 bp, Homo sapiens
  misc_feature (120)..(120): n is a, c, g, or t
  misc_feature (125)..(125): n is a, c, g, or t
  misc_feature (187)..(187): n is a, c, g, or t
gtgccttctaggttttgaacttctatgcattagcgcagatgtggaatgcgtaaaggtgttcatagtttgactgtttctatgatgttttttcaaagaatcgtccttttttgaactataatnccccncggttattttaccatcacagtttaaatgtatatcttttacgtctctactcagaccatatttnaaaggggcgcctcattatggggcagagaaccttttaataagtctcattaagatctgaattttggttctaagcatt

SEQ ID NO: 682891 - DNA, 1064 bp, Homo sapiens
  misc_feature (230)..(230): n is a, c, g, or t
  misc_feature (334)..(334): n is a, c, g, or t
gcatcttcaggtctttagcaatctggacaaggtggcagggtattttaaaagctataactactgtagttttccagttttcatgctgctttagaaaccacgctgtcttacagtggtactttcttctggccactgcactgtagataattcatggaaacaagatttacccactacataaaaggttaaactccttcagtatgtggagtggtttctttttttttttccttctcttncttttttcctccaggtaatatcttctctaataccgtgcatgtggcgtttaaaattcaagaccacggtcaaacccctcttctaatcacattaatggttcccattncttttataccctgagtgagcacttttcactttccagctaggtctgttttccagctggcagacaagatggagaaatccttgaaaattgggtttgggttaaaattttgggtttaattatttgaaatccacactccctgtggaaactcttaagtgcattggtgcacttctgttggttggtctcaaagaaggggactgtaacaatctgagtaattcccagtgtcctcttccttatcctctagtgttgaagctgtgtagcattttacctttatatattttcacaatattttcatataaacagtatacattgtgaatcagtcatttgttacagaaacgtatattcatgaagatgaatttacttaacaaaaggccagagtctaatcctcccagggatgacacatttcccaattatctggtctttccctgtggtgcaaaaatgacttcatgggtccgagtgttaaaaaccatttgcgacacacatggcttcctccattaaacgtatgttgccagaagaaaaaacttcctgggggggaggttcccacagcaaattactagccaatgtagacctttggggtgttcgacggcatcttggcgccataaaggccgtggacattttgacgctgggtttttaacctctggccaaaaactctgtgttgggagagttttcaacaaaggtaccctcggggtgggtcacaacgtggggaggagccgcacagatattgtggcacaaccag

SEQ ID NO: 682892 - DNA, 383 bp, Homo sapiens
ccccagacggggtctccgggtctcttgttctgtcctgcgccccggctggagtgcagtggcgcgatctcggctcctagcaacatctgcctcccgggctcaagcgagtctcccgcctaagccctcccgagtagccggggcttaaaggcgcacacgccactccaggctttttttttttttttttttggcagaaacggggtgtcagcctggccaacatggcaaaaccatgtctctactaaaaggaaaaaatttagccatacgtggtagtgcacacctgtaaccccagctatttgtgagactgaagcaggagaactgcttgatcctgggaggtggaggttgcagtgagctgagatcgtgcctaggtgacagagcaagactccatctca

SEQ ID NO: 682893 - DNA, 778 bp, Homo sapiens
  misc_feature (45)..(45): n is a, c, g, or t
  misc_feature (70)..(70): n is a, c, g, or t
  misc_feature (76)..(83): n is a, c, g, or t
  misc_feature (92)..(92): n is a, c, g, or t
  misc_feature (112)..(112): n is a, c, g, or t
  misc_feature (148)..(148): n is a, c, g, or t
  misc_feature (189)..(190): n is a, c, g, or t
  misc_feature (270)..(271): n is a, c, g, or t
  misc_feature (285)..(286): n is a, c, g, or t
  misc_feature (295)..(295): n is a, c, g, or t
  misc_feature (337)..(337): n is a, c, g, or t
  misc_feature (339)..(339): n is a, c, g, or t
  misc_feature (344)..(344): n is a, c, g, or t
  misc_feature (347)..(348): n is a, c, g, or t
  misc_feature (376)..(376): n is a, c, g, or t
  misc_feature (576)..(576): n is a, c, g, or t
  misc_feature (591)..(591): n is a, c, g, or t
  misc_feature (615)..(615): n is a, c, g, or t
  misc_feature (669)..(669): n is a, c, g, or t
  misc_feature (675)..(675): n is a, c, g, or t
  misc_feature (690)..(690): n is a, c, g, or t
  misc_feature (758)..(758): n is a, c, g, or t
cacccctccctctgaggggcccaccaggtctgggcaagggaaggngggccctgggctgggtctctaaagngaagannnnnnnnggggagctngtgagttgaagaggctgggnagtcatccagggccccaccctcctcttccctctgtnccctactgcctctgctggcagacaggggcaggggtcccttnntcccctcaacaccagacacacaggcaggggctgcagccattaacggtcaggcctttggacacaaaatactttcgctttgnngtctcctgacgtcnnccccccccnggccgcgccctcccttgctgcggcgccccgtcctgggtgttngntgtgnggnnccggtagtcagtaagcaggcggccggtncgggcgtcccagaggcgcacgatgccatccaggctgcaggtatataccacggcagtgcctgcctcccacagcagctgcacgatgcccgactggtgctgacactgatgcctaagagtctgcgtaccagagtcatagatggccaaggtcccatccaggtagccaacagctgccaggggcatcacactgcagaagcccaaggnctccaccgagttggnctcactctcctccccttctcccangctgggctgggaggccacagtctcaggtctaaaaacacccaccaccttgccggngggggnactgaccagcttggnctggcagtccacagagccagttaggatcaagctgccatcctggttggcagcaacacaggtgagtgggncctggtgaccctcagtccct

SEQ ID NO: 682894 - DNA, 598 bp, Homo sapiens
  misc_feature (29)..(29): n is a, c, g, or t
  misc_feature (217)..(217): n is a, c, g, or t
  misc_feature (241)..(241): n is a, c, g, or t
  misc_feature (413)..(413): n is a, c, g, or t
  misc_feature (507)..(507): n is a, c, g, or t
  misc_feature (546)..(546): n is a, c, g, or t
gtgcaatgcctcgtcacagttcctgtgcngcagtgggcgctgtgtggctgaggcactgctctgcaacggccaggatgactgtggcgacagctcggacgagcgtggctgccacatcaatgagtgtctcagccgcaagctcagtggctgcagccaggactgtgaggacctcaagatcggcttcaagtgccgctgtcgccctggcttccggctgaaggangacggccggacgtgtgctgatgtngacgagtgcagcaccaccttcccctgcagccagcgctgcatcaacacccatggcagctataagtgtctgtgtgtggagggctatgcaccccgcggcggcacccccacagctgcaaggctgtgactgacgaggaaccgttctgatcttcgccaaccagtactacctgcgcaantcaacctggacgggtccaactacacgttacttaagcagggcctgaacaacgccgttgccttggattttgactaccgagagcagatgatctactngacagatgtgaccacccagggcagcatgatccgaagtgncaccttaacgggagcaatgtgcaggtcctacaccgtacaggcctcagcaacc

SEQ ID NO: 682895 - DNA, 434 bp, Homo sapiens
gttgaattttgtaactgtcctgaacatgtgatattcgaggaagtcacttcatctctgtgagcttcagattatctttcgctctagaataagataggcgcatatcttgatataccttactccatgagtacagggttgccagccaaccagagcatattgaactccaacctttactgagaatgtagcggtgactttgctgggtagggggctgggttgcattctagagacatgggaaaaacaatgacaaagcatctgatctacaagtacaatactttatcataagttggtctcggttatatttcatttttggtataaaaaaaaacatcatgcaaaaacttgctcatttccagtaagacatttacattcctgtccagagaaaaaacttggccatcactcagctaacataatgctttttcaaagtatgtacacttagagca

SEQ ID NO: 682896 - DNA, 620 bp, Homo sapiens
  misc_feature (239)..(239): n is a, c, g, or t
  misc_feature (263)..(263): n is a, c, g, or t
  misc_feature (435)..(435): n is a, c, g, or t
  misc_feature (529)..(529): n is a, c, g, or t
  misc_feature (568)..(568): n is a, c, g, or t
ccccgactagcccgacagcatcctttacataacggacatcgtgatcctcgaggatcacgatgtccgttgctgaggcactgctctgcaacggccaggatgactgtggcgacagctcggacgagcgtggctgccacatcaatgagtgtctcagccgcaagctcagtggctgcagccaggactgtgaggacctcaagatcggcttcaagtgccgctgtcgccctggcttccggctgaaggangacggccggacgtgtgctgatgtngacgagtgcagcaccaccttcccctgcagccagcgctgcatcaacacccatggcagctataagtgtctgtgtgtggagggctatgcaccccgcggcggcacccccacagctgcaaggctgtgactgacgaggaaccgttctgatcttcgccaaccagtactacctgcgcaantcaacctggacgggtccaactacacgttacttaagcagggcctgaacaacgccgttgccttggattttgactaccgagagcagatgatctactngacagatgtgaccacccagggcagcatgatccgaagtgncaccttaacgggagcaatgtgcaggtcctacaccgtacaggcctcagcaacc

SEQ ID NO: 682897 - DNA, 106 bp, Homo sapiens
tacggctgcgaaagacgacagaagggcaggcatcgtgtgtgtgtgtgtggatgtgtgtgtgtgggttttgtaaagaattcttgaccaataaaagcaaaaactgcca

SEQ ID NO: 682898 - DNA, 1395 bp, Homo sapiens
  misc_feature (310)..(310): n is a, c, g, or t
ggccaacatgtactaccagccttcggatcaagttcagaggtgtcttaaagcgtacgccatgtgaccttgcgtcatagtagatcatctcttgatgtgcctccatacatcgtgactttctgatagattgctggaccaggatcctctcagcatgagtcattgttggtgagtatcacctcccgtgcgagcatttgagagtcgttggcagaaatcactggaagctgtgaggggattgatccggagagtagtatctggagttggcagcggcgcaagcgacgacgtgcgaagaatctcctgtgatctgccttggcancaggccattgtgccacgatgaagtagtgcaatggtcggtgtaggcggtgccatgtgctctgcggccagggcagtgccgctagcagggaacccgagacgatcacaccgcagtgctgttgcctgcaagggtcggtacttggactagtcaatcaacgccgccacgaacacgtcgtagagggcgtaacaggctccgtgccacctggtcaggtccgtcaggcaaggtgctaccatatcctgagcgtagcgtagccaccgtgaccgacgccggcggattctatggttcgcgccccttttgcatgaatggcatagggaactgcagcgaagtagctggacgcccaattgagcgtgcccagtacaaagtatccgcagaaccattgggctcggtaccggtgagctagcggtcgagttcgaaagcaatccacccaggttattcttcgccagttggaaagcctgtgcgtgccactgagggtccctggaatcatttgtcgagcactcggaaattgatcgtaagggagaaggatagtagagaaccaatgggccagagatacaataagggcccacgggaggttcccaggccatgggtggtccgccctttgtaagaggtctccaaagcgttgaaaccttaacgcaatggggcccccatggagctttggggcgccacagccgcccctgggggccccacgacaaaagaatagcggcccacagcgagaagcctcggagcatcagtgccccgaacaccaagggcgacgccagtggcctatgtccgaaagccaataagcggatgtgagcccgaaacccaaggcgggcccaagacctataccaccttggggtacccgtactgggagacacagtgcacacaccattatcggacagcaaggcggaggacacaaggggatcccttaacaccgggcgggttagcatcccaggaaagtcggccgcaaaaaagacaggccacagggacaggaaaaggagcgtacaatggcacagtgaggggatacccgcacatagtggcagaaaaaacaacacagaaccgcgaacccccggtgaacccccacacggttagatgtagtgagcagacacccgccc

SEQ ID NO: 682899 - DNA, 603 bp, Homo sapiens
  misc_feature (28)..(28): n is a, c, g, or t
ccagaggattagtggaaggagatatcgnggctttccggcggtgacgacctacgcacacgagaacatgcctctcgcaaaggatctccttcatccctctccagaagaggagaagaggaaacacaagaagaaacgcctggtgcagagccccaattcctacttcatggatgtgaaatgcccaggatgctataaaatcaccacggtctttagccatgcacaaacggtagttttgtgtgttggctgctccactgtcctctgccagcctacaggaggaaaagcaaggcttacagaaggatgttccttcaggaggaagcagcactaaaagcactctgagtcaagatgagtgggaaaccatctcaataaacacattttggataaaaaaaaaaaaacaacgaaaagactgaaaaaaccctagaagaaaaaaaaggggggggggctcgtgccatatcccttcgaggcctggacagtcacggctacgcctacacaacctgatgacaactgtcccgattctaccatcggaagggaagatgaacgctaacatgctctgccttataacaatcctctaaactagtaattgttatacaaaaccgattacaggacccttga

SEQ ID NO: 682900 - DNA, 179 bp, Homo sapiens
ggaacaggaaaaaaacgaaaccccctggcatcatggcatcctgtgccattaaaaccccagccctcccagtgggcccattagcctgacattagggaaagtgactaatatgtgtccagtagctcccttagttgggccactcctggctccttaggaactccaactgcctttgctccctttta

SEQ ID NO: 682901 - DNA, 832 bp, Homo sapiens
cggtgcagcgggggggccgggggccctggtggccctgggatggggaacctgcggtggcttccgcggaggtattcggcagtggcatcctggggccggggtcgcgtgaacgatggacgggggccgagggcccgaggccgcggaagctcgacgcgaggcaactgccgaggataacggagtggatagcacagtcaccaagctcggagcacagcttggtcaacggcacatgaacgcatcaagtcaccataggaggcacattcttagtgtgcttcctccgcttgccctccatctccagggcagctcagcgcgcgctcccttgacaccttccctctccatgcgcgcgcgcctcgtcctccccgggcctgcaccggctcaccgggcgcgcgctctcctgccccaggtgtgcccactacacgctccggtcccccgtcttgcccttctccctctctcctccctctctcccggtggtcgcaccgtggtgtctgcgcctcggccgcggccctcccctccgcgcgcgcgctcctctcccacgcttgtcgccgcccccccctctcgcctacgttgtcccgctgcgcttctccgcgcttcgcgtcccagcctcgtcccttctttctcgggccccagcctccgccccccctccttcgccgcccggccggtgcccctcctcactcgtccgtccacgcggggtcccgcgccgcctgcactgccccctgctcttccccccgcccatcctccctctcgcgtctcggtctgcgccgctcggactgtgcgcgccttcgtcctcgtggctttcgtcgtgttgaccgcctcatcggctccgtctctgggttgcctc

SEQ ID NO: 682902 - DNA, 689 bp, Homo sapiens
  misc_feature (445)..(445): n is a, c, g, or t
cggacgcgtgggcgacccacgcgtccgacctacgcacacgagaacatgcctctcgcaaaggatctccttcatccctctccagaagaggagaagaggaaacacaagaagaaacgcctggtgcagagccccaattcctacttcatggatgtgaaatgcccaggatgctataaaatcaccacggtctttagccatgcacaaacggtagttttgtgtgttggctgctccactgtcctctgccagcctacaggaggaaaagcaaggcttacagaaggatgttccttcaggaggaagcagcactaaaagcactctgagtcaagatgagtgggaaaccatctcaataaacacattttggataaaaaaaaaaaacaaaaaaaaaaaaaacacaaaaaaaaaaaaaaagggggggcccccccaaaaatcccccccggggggcccgccgagcttntgtcgccgatcctccccgcgcttttttgttgtgtgctaccaaagtgggggccccctctattatggaggcggcgccatttttaaatctccgacggggccgcggcgcccgcgctcgtttctaccacaccgctgcgtcacacgtgggaacaaaccgcgtcatcccgcggggcacctctgttggtgacaggaaccccctccactcctcggggggggtggaaccctatggtggcacccactccccttcg

SEQ ID NO: 682903 - DNA, 951 bp, Homo sapiens
gagcagcatccaccgggcgggaggtcggaggcagcaaggccttaaaggctactgagtgcgccggccgttccgtgtccagaacctcccctactcctccgccttctcttccttggccgcccaccgccaagttccgactccggttttcgcctttgcaaagcctaaggaggaggttaggaacagccgcgcccccctccctgcggcgccgccccctgcctctcggctctgctccctgccgcgtgcgcctgggccgtgcgccccggcaggccccagccatgtcagatgcatgccgctcgattatggcatttacgcagcgagcaagatggcgtgcagtgtgcgacggttactgcaagcataggcggaacacctgcgagctgcctgggccagcgttccctgtggtacactgcaccgacatgcgacccacctgcacacagaacgagagcgtactccaggccaaggccggtggtcgcctttccaccgacggcacacttccgtgagctctacaagatcctggagagccaccagttctcgcctcataacaccccaactgcagcaactgtggctgacaggcgcattaccgtggcaggcgagaagactgcgcggacgaacccctggtcaccgtgggcaacatatcgggctgcgccgaaaatttccactgcagagccaacatctgcgacgggaagcgacgaccaggacacctggccatcccgcgagcacgtcagagacggaggtcctgccgcggcccctgcgtcaacgacgccacacctccccctacaccccagtaggccgccgtgcagacacccgcggtaaagcctggcccccgaggccccccccggccacattacaccaccccccccaacagtacaacccacctgaatcacaaacgaacaccgcccggctccaacacacaaccgagaccacacacaggccacagggcacacgtcgcagccaaca

SEQ ID NO: 682904 - DNA, 250 bp, Homo sapiens
ctagaggatccgggtattgagtggcatgtgagagcagtacatgcgtctggcacggcttcctgctgctgtcgccattaatgaccggcagacttcaacaagctgggcaagctcttcacgcagattctgcgggtcaaggaccgcgacgacttccccgttgtgtcggccggcaacaaggcagatctggagtcacagcgccaggtcccccgagtcagaagcctctgccttcggcgcctcccatcacatggccact

SEQ ID NO: 682905 - DNA, 542 bp, Homo sapiens
gtcaatctagaggatctcctgtgaaacgagacgacctacgcacacgagaacatgcctctcgcaaaggatctccttcatccctctccagaagaggagaagaggaaacacaagaagaaacgcctggtgcagagccccaattcctacttcatggatgtgaaatgcccaggatgctataaaatcaccacggtctttagccatgcacaaacggtagttttgtgtgttggctgctccactgtcctctgccagcctacaggaggaaaagcaaggcttacagaaggatgttccttcaggaggaagcagcactaaaagcactctgagtcaagatgagtgggaaaccatctcaataaacacattttggataaaaaaaaaaaacaaaaaataaaaaaaacaccaaccctaacacactactcacacttcaccacaccctagggaaattcactactcctcacacaatgccggcgcgaatttgggttcattggcccaattgcccctaaaggggggcgattaacaatcaactccccggggtttacaacgccgcctgt

SEQ ID NO: 682906 - DNA, 754 bp, Homo sapiens
  misc_feature (28)..(28): n is a, c, g, or t
  misc_feature (386)..(386): n is a, c, g, or t
  misc_feature (391)..(392): n is a, c, g, or t
  misc_feature (395)..(395): n is a, c, g, or t
  misc_feature (404)..(404): n is a, c, g, or t
ccagaggattagtggaaggagatatcgnggctttccggcggtgacgacctacgcacacgagaacatgcctctcgcaaaggatctccttcatccctctccagaagaggagaagaggaaacacaagaagaaacgcctggtgcagagccccaattcctacttcatggatgtgaaatgcccaggatgctataaaatcaccacggtctttagccatgcacaaacggtagttttgtgtgttggctgctccactgtcctctgccagcctacaggaggaaaagcaaggcttacagaaggatgttccttcaggaggaagcagcactaaaagcactctgagtcaagatgagtgggaaaccatctcaataaacacattttggataaaaaaaaaaaancatcnnaanaaacacatntgggtgagaagagaaatcacacacacaaatgaaaaaaaaacacattgtgggccgcaccgggacccatgaaaaagtatttcagaaacccattgcgttggggcggcgccgcgggcccacataatggtcaaggtggccacagtggggtcacagagacgtgtgtccccgaggaaaatcgcgggcgcaaggaacaacggtgcgtggggattctcccacccaatttaaaacccgcccgggggggcaacaaccgcgacggtttcttggaacaaaattcccagagagggagcttgggagcgccccatgcagggtttctaaccaagggggcttccaaaagacgactcgaatatcaatag

SEQ ID NO: 682907 - DNA, 301 bp, Homo sapiens
gagtcccattgtgtctgctgtaggcttctcctctaactctctgtggaccatggagttatgaaacattcttatgccattgcagcattagaccgcgaggaagtgatctaactattgctgcagatgagatagtccagatacgttttctcttgttaagatcgctaactttgataactcaaaaactttctacctaggttgcctttacccagcaagtctgtcgactggacccactttggaggtaaagttgaactcttagctccaaatccagcccacagtggttcctgcttgcttgttgccctttcgt

SEQ ID NO: 682908 - DNA, 733 bp, Homo sapiens
tgagccccccccccccccccccccggcggattgcgggtataacgttcttaaagttataggggtccctcccaactagaaagattaccaaaataaatgcctcctccccaacatagttaccgaaaagacgatataccaagaaatacgcaaatatcgtagtcgtccaaccataagccgtatcgtccgacccagcattcacgtatctttaggcccggggattccaagagagggggataggagttcttttctatccctatagccggacagagaaggtaagaacgcgggcagagcaagaaagagaaaatagaagattcggtccgcgtatagtgttcgagagaactaaagtaaacctcgctcctcagcctctttagaagaaaggcccaagacgccaggaaggccggaaaacgaatgcgcgccgctagccgggaggtaaaggaaccgataaacgtcctcagccagaacactagtcaggaaaaggagggacatagagttcgattctacgtctcgaaaaggtaaggaatttagaatccgttctttccacttatccaagttttaattccgactactaagggtagtgtacgggcgacttcgcctttacgaggaccgcgcgctgtattcgaatataggatataatgcgggggaaataattccgttccttccgggctcgtcggttctagctgtttcttcaggccttttgaaacgttcccccttcctaaccctagcctcggattacgaa

SEQ ID NO: 682909 - DNA, 336 bp, Homo sapiens
ccaacacacctgacgcagtattcttgtttctattacatgtcttttaaaaatatttatctcgtcgagtatgttgctcatgcgtgtaatcccagcactttgaggggcaggcagatcacttgaggttatgtgttcgagaccagcctggccaacatggtgaaaccccatctctactaaaaatacaaaaattagccggatgtagtgaatgcatgtctgtggtcccagctactcgggaggctgagttgtgagagtcccttgaacctgggaagcagaggttgcagtgagccaagattgcatcactggactccagcctgggtgacagagtgagagcctgtctcc

SEQ ID NO: 682910 - DNA, 663 bp, Homo sapiens
  misc_feature (24)..(24): n is a, c, g, or t
  misc_feature (364)..(364): n is a, c, g, or t
  misc_feature (370)..(370): n is a, c, g, or t
gccgcaggatttaggcaaaagacnacctacgcacacgagaacatgcctctcgcaaaggatctccttcatccctctccagaagaggagaagaggaaacacaagaagaaacgcctggtgcagagccccaattcctacttcatggatgtgaaatgcccaggatgctataaaatcaccacggtctttagccatgcacaaacggtagttttgtgtgttggctgctccactgtcctctgccagcctacaggaggaaaagcaaggcttacagaaggatgttccttcaggaggaagcagcactaaaagcactctgagtcaagatgagtgggaaaccatctcaataaacacattttggataaaaaaaaaaaangatttngtgccgtctgcgggggattttgtcctaataaagaaaaaaaattcttgttgcgcgccttgtcccattcggttttagccttgggcaagtttatcctcgcggccgaaatttgcgctcacttgtccatattcccctattgggaggggtattcacaatcacttgccctttgttttccaccgggcggtcttggaaaatcctctggggttcccaaattaaattccttttgatgaaattcccctttgggcaggtggggtttttgtaaaaaggcccccaaccatttgcactttcaaaaatta

SEQ ID NO: 682911 - DNA, 653 bp, Homo sapiens
  misc_feature (28)..(28): n is a, c, g, or t
ccagaggattagtggaaggagatatcgnggctttccggcggtgacgacctacgcacacgagaacatgcctctcgcaaaggatctccttcatccctctccagaagaggagaagaggaaacacaagaagaaacgcctggtgcagagccccaattcctacttcatggatgtgaaatgcccaggatgctataaaatcaccacggtctttagccatgcacaaacggtagttttgtgtgttggctgctccactgtcctctgccagcctacaggaggaaaagcaaggcttacagaaggatgttccttcaggaggaagcagcactaaaagcactctgagtcaaaaaacaaaaaaaaaaaaaaaaaaaaacagtggggggcgcgcccgggcccgcaaaaacctccaagaccagtcggggggggcccggggcccaaagaggcaacggaacggggccaaaggggacccacaagagaaaccggggcaaggcacaaggcaagaggattccaaccaaaagaaaaaagcgccgggggggcaaccacgaggggctccggaaaaaaatccagaagagggacgctccagaggcgccaaaagggagacctttctcgcgcggaggcccaaagaggccgaaaatcaaacaccgccggaggagcgcggggggcga

SEQ ID NO: 682912 - DNA, 547 bp, Homo sapiens
  misc_feature (42)..(42): n is a, c, g, or t
  misc_feature (49)..(49): n is a, c, g, or t
  misc_feature (55)..(55): n is a, c, g, or t
  misc_feature (58)..(58): n is a, c, g, or t
ctaccctgctttcgttgccatatccctccagtgcataaaggnggaagcncccctncanataatatagtggcatctgtatgagcccagagtcctatttggggtttcctcagcacagcccctttaccaggggctttccaaataggagcctcccatctccaggtgttttttgtgggtttgcccgtcccaaaccttacgatcctcctggaaaaaaaatggtagcagccaaagtaaagggtgagaaactggataagaagctgaaaaaaatggagcaaaacaagccagcagcccctaggttcccccaaaaaaaaagggcggagcaggaggctttttctggtgagtgcaaaaagctggaaaaaaaaaacgaggctttaaaaaaaaggggggattccctggccaaggagatccagtacctgaaaaattttataaaaaaggtccccaaggcaagggggaaaaaaagggtcccctagtttaggatagtcaggagggtcaatgtgcttgtacataaagtgctgtagctgtgtgttccaataaattattttgtagggga

SEQ ID NO: 682913 - DNA, 172 bp, Homo sapiens
tgggaagggaagccaccctcggtcggactcgtgacagagcatatacacaggacacaggataaggcagaagtactccagatataacagactgaccccagccccccgacacataaactactgcagcataaatactggaggctgagaggctgtgtcctcttacaccactcaagtg

SEQ ID NO: 682914 - DNA, 290 bp, Homo sapiens
cattcagctcggtacccactttccagagtggagaagaggaaacacaagaagaaacgcctggtgcagagccccaattcctacttcatggatgtgaaatgcccaggatgctataaaatcaccacggtctttagccatgcacaaacggtagttttgtgtgttggctgctccactgtcctctgccagcctacaggaggaaaagcaaggcttacagaaggatgttccttcaggaggaagcagcactaaaagcactctgagtcgaaagtgctactctggaagtggggtccgagcag

SEQ ID NO: 682915 - DNA, 471 bp, Homo sapiens
  misc_feature (10)..(11): n is a, c, g, or t
  misc_feature (52)..(52): n is a, c, g, or t
  misc_feature (54)..(54): n is a, c, g, or t
  misc_feature (57)..(58): n is a, c, g, or t
  misc_feature (108)..(108): n is a, c, g, or t
caggccggcnnaaacaaccaacgcacacttgattattccccgcgcaaaggancnccnncaaccccccgcactttttttaaaaaggaaacacacgcccacccccctggngcagagccccaattcctacttcatggatgtgaaatgcccaggatgctataaaatcaccacggtctttagccatgcacaaacggtagttttgtgtgttggctgctccactgtcctctgccagcctacaggaggaaaagcaaggcttacagaaggatgttccttcaggaggaagcagcactaaaagcactctgagtcaagatgagtgggaaaccatctcaataaacacattttggataaaaaaaaaaaacaaaaaaaaaaaaaacacaaaaaaaaaaaaacctaacattaactccaagaaaacacagtatttcttcctttacccccgcctcgcccaaacacatttaacattcagaatcaaataaa

SEQ ID NO: 682916 - DNA, 387 bp, Homo sapiens
aattcgcggccgcgtcgacacggtgcgagaagacgacagaagggaatgcccaggatgctataaaatcaccacggtctttagcatgcacaaacggtagttttgtgtgttggctgctccactgtcctctgccagcctacaggaggaaaagcaaggcttacagaaggatgttccttcaggaggaagcagcactaaaagcactctgagtcaagatgagtgggaaaccatctcaataaacacattttggataaaaaaaaaaaaaaaaaaaaaaaaaaaaaaagcggccgcgtgaattcgcggcccgttcgactacggctgcgagaagacgacagaaggggccacctggatccctgcccctccccactgggacggaataaatgctctgcagat

SEQ ID NO: 682917 - DNA, 463 bp, Homo sapiens
caacgcatgtgccgctcccaacgcatgtgccgctcccaacgcatgtgccgctcccaacgcatgtgccgctcccaacgcatgtgccgctcccaacgcatgtgccggggcctttccggcggtgacgacctacgcacacgagaacatgcctctcgcaaaggatctccttcatccctctccagaagaggagaagaggaaacacaagaagaaacgcctggtgcagagccccaattcctacttcatggatgtgaaatgcccaggatgctataaaatcaccacggtctttagccatgcacaaacggtagttttgtgtgttggctgctccactgtcctctgccagcctacaggaggaaaagcaaggcttacagaaggatgttccttcaggaggaagcagcactaaaagcactctgagtcaagatgagtgggaaaccatctcaataaacacattttggataaaaaaaaaaaa

SEQ ID NO: 682918 - DNA, 291 bp, Homo sapiens
cagagatgatgccactgcactccagcctgggcgacagagcaagactccatctcaaaaaaaaaaaaaaaaagctgctgaattcaggcagggcttttcaattcccgggcccgggtgatttcgtaactcgtgggcacccgggctaggtgcccttcctaggccgggccataaccctcttcctcaattaagcactgggccgatgtctctaacattctctttaccaagttttttacggggcggggtgtagagcctttcacccagggaagagtacaaccgggggggggggggatcgtc

SEQ ID NO: 682919 - DNA, 556 bp, Homo sapiens
  misc_feature (313)..(313): n is a, c, g, or t
ttccaggaggtgatctcgctctgttggcccgcctggcatgcagaggcaccatctcagctcactgcaagctccgcctcctgggttcacgccattctcctgcctcagcctcctgagtagctgggactacaggcgcccgccaccatgcccggctaatttttgtatttttagtagagatggggtttcagaatgtttgccaggatggtcttggtctcttgaccttgtgatccgcgtgcctcccaaagtgctgggattacaggcatgagccactgcacctggcctatctcccctttctagtaccttaaatgcttttttnacttttctcaaccaagggagtcactttgggtctacctgcctttggaaggcgtaaaaaatgagaatttcatacctttgggattaaagtgggggggcttaaatttaaagagggatctttttttaaaatacctttttccctagttagaataaaaattattaactgtgggcatttttaaagaaaaataaaaataatttccctataacttttttggcacaaaaaagaaaaatggcctccttggcctca

SEQ ID NO: 682920 - DNA, 323 bp, Homo sapiens
gacttcgctgttgcacacacgtgaagttatatcgcagctcctgcggcagtacgccatcacaggagcgtcgccttgtcgtcacattcgatcttagctcatggtcccacgagaagccactgccacgtcgtccgatacctccacacaaagtctgctgattccaacgacgccgcctccagccagggcccagcgtaccttctgattgccacactcggtgcccaccttcacttcgaagggactgcgcccgatgttctgaccaccccacgtgatggtgacgatattaggttccaagggaccatgggggtaatactcgaaagccatacacg

SEQ ID NO: 682921 - DNA, 635 bp, Homo sapiens
  misc_feature (65)..(65): n is a, c, g, or t
  misc_feature (635)..(635): n is a, c, g, or t
tattactaggcaccatggagctgggtggatcaaatttttttattttttctactaaatttactgantccaagaccttggattgaaaggaaattgggaaaggttcctttttgattttttccccagggcccggaaaaaaaaggttaaggggcccgggctcccattttttttgcccggggtgggtaaaagaccctttttcgggaggggggaaaatgggggaaagggcttttttttggtttttgaaaaccccctgggggaaaaaacccttttggggggtttaaaaaacccccctccccgtttttttggggaaaatttttctaggaaaaaaaaaatttggggagggaggggggtttttttttgtggggggaacacccggggggggggggggagtcttattttttttttttattaaaaaaaaaaaagcccccccccggggggcccccttttttttttttttaaaaacacaccccccccggggggggggggagggttaaaaaaaaaaaaagggggggggggcttctccccaccaatttttttttttaagaagaggggggaagggttttttttttttgtgaaaaaacaaaatattttttgggggggggggggggagaaaaaaaaaaatatatttttttttgtgn

SEQ ID NO: 682922 - DNA, 155 bp, Homo sapiens
  misc_feature (52)..(52): n is a, c, g, or t
tccttggatgaggaacgtactgggataggaatgtactgggatgaggaacgtnacttctgccacctagcctcaccctagctcagcttggaggtggagcaacagtctcagtcttcggaactaaattcccttcttagcaagccccaacttccctacag

SEQ ID NO: 682923 - DNA, 440 bp, Homo sapiens
ctgagatagtagactccccattccccttcctcccaggcccatggtaattccgttctagaatcttatgaatttgtctctatgtaagtacctcatgttatgggaatcaagcaatatttatctctctgtgtctggcttatatcactatagcataatgtaaacaatgttcatccatattgtagcatgtatcaaaattacattgtataaaaggcagtattctatatagtattccattgtatggatataccacaatttatcatttcacctgatgatggacattagggttgtttccaccttttgactgttgcgaatagtgctgctgtgaaccatgggtatgcaaatatctgttcaagtctctgctttcagttctttttaatatatccctggtggtggaattgttgggtcagtatcgataggtagtatagataggtcagtatagatag

SEQ ID NO: 682924 - DNA, 606 bp, Homo sapiens
  misc_feature (3)..(3): n is a, c, g, or t
  misc_feature (397)..(397): n is a, c, g, or t
gcnatttacagtctcttgggcatatctgaatggccagcataactatgctcgtgcttgggggccattataaagtcaaataagggtggctggaacacaagcacggcaataccagggcaatagatcgcatcaccaagagggctgctaagtgaaccacaggcaggagtgtagacagcagggacacattagacgaagggaagattcacgtggccaggggaacacagcaggacagcaagagagttcatgatgctactcagaagggcatgaaatttaaagcttataaatggtttcgggaattttccgcttaatattttcagaccacggtggagttcaggtaactgaaaccataggaagcaaaacacggatgacgagggaccacttcgtatggcctaatttagtnggtttggatcttctgggacctttttttctggttgtaaaaatttatggggcggttaatagtggtggctcatggatttttcattgctacataatacttccattgtgtaaatataacagaatattcatctacctgtcagtggccagtggggtctttttgccattataaatgctgctggtgtgaccatgtggggggcaagttcctggggcaca

SEQ ID NO: 682925 - DNA, 768 bp, Homo sapiens
  misc_feature (550)..(550): n is a, c, g, or t
  misc_feature (737)..(737): n is a, c, g, or t
gcgggaccgggagtgtatgggaaaggctctgtaccttatgcgcgactttctcctgtggagtcataatagtctactaagtaatgtgtagggatcttgttaaagacacgtagagtttggatgaatcatggatcgggggaatacatgatttgctaatctttgacgagagggaatacagcaaagagtgagatgatagtgtgtctatatgatgttcgtctgtcgaatatgtctgaatgttacttcatgattagtgtgttggagagtttagtcgagcacaactattagtgagttgttgctattggcattataaacaacgttatgagtggagtcataccccttgagcgtatcagtctgatagtggttgtcttggcattttgctatgcttcctggatgaatcactatacaactagtatgatctaatgctaagtatgatgtacactgtatttagttcgacgctgtgagtattcgtgtgtatagacgttcgtctgtagttagtagagggaatgactgagatgtttccatgaaggaatgttcggatcgtattcagagcctnggtgcgtatacatggtgttcagctcttgtggattgccttagtgatagactgtgcttgcactttggccgtttattgccgtcttgactgaacgtcatacttactatgaggcttgccgtcacgaattatctagtcgtcagaagctaggaagtttgacgtgattagtgcagatgggattgtgcggcctatntcccgtaccccgtattgtcctgggacgtatc

SEQ ID NO: 682926 - DNA, 262 bp, Homo sapiens
atagtggaactgctcggaatattccgatctgttccatgaagacctgggtgtgtatggtgagggagaattctccatgcaggcacgactgagaggttctcagaaagctcattgcttcatcctgaaggtcatgaagaaccaccaaggcacctcatcttgaagagccaggttctgccccggctagccacgtggacaggggcagcagaaggagcaaggtggtggcctccgacaaggcatagtgaagcggagcagctatccaattagg

SEQ ID NO: 682927 - DNA, 103 bp, Homo sapiens
  misc_feature (3)..(3): n is a, c, g, or t
  misc_feature (24)..(25): n is a, c, g, or t
aangcaatggagggaaagaggatnnttttaataaagagaaagtgttctcgcacctttgaaacggtgctcctcctaagaagaatgaagccatttcctgggttct

SEQ ID NO: 682928 - DNA, 983 bp, Homo sapiens
  misc_feature (1)..(1): n is a, c, g, or t
ncctcaggggttgttccaaattctggcgcatactcttttgtggataagacccaagtgtttctccgtgagctcaatgtctgtttcgcatttatcctttggagcacgagttgttttctaaaccaagaagtcgctcctcgcggctgactccacgtgtccactatcgtagtggttggtcaccaacgacttctttggcggggtccttcgtctgcctcttccgcgcggggcagcgcaccaaaagaactactacggggtcgcaccaccaagcggcgggtttgtacaacaatagtactaataggagggggcaatcctcttttgtctcggccccgtcccaaggtattgtcttttctcgcgaccctgtcgactgtgggtgtgttgactttcttttcggcgaaatgattttccctgtgaaggagatagagatatgtatagatagatagattagctttacacatcggtttctttgtaacggggggggtcaccaaagcaagaggatatttgctgaggttttatataagggggtattatcttagagtgtgagtgactcgattttcggacgccacttcatctctatcactcgatcctggtgtggtcacgcgccacggctatttctctaccagagcgtcatgtatggtaagcagctcaggaatggggtgggctgatcagggatgcactctgcggcatcctctctcgcaacagcattgcacaagagagtttatctatccatgagacaaacatgcttgtgtgtagacacttccccgccgttcgaggtagcagccagaattggaggctggtacatagggtagggtctgagaagggtgggggctgggacccctggcccgggaggagttccatcctgggttttccatttaggactcgtttacaatgaagattagatactccctgttcatgaatacccgttgatggttcaagtattatagacctacgccatattttttacgttttataataaacatggtttggta

SEQ ID NO: 682929 - DNA, 860 bp, Homo sapiens
  misc_feature (17)..(17): n is a, c, g, or t
  misc_feature (116)..(116): n is a, c, g, or t
  misc_feature (118)..(119): n is a, c, g, or t
  misc_feature (126)..(126): n is a, c, g, or t
  misc_feature (135)..(135): n is a, c, g, or t
  misc_feature (150)..(150): n is a, c, g, or t
  misc_feature (183)..(183): n is a, c, g, or t
  misc_feature (185)..(185): n is a, c, g, or t
  misc_feature (194)..(195): n is a, c, g, or t
  misc_feature (197)..(197): n is a, c, g, or t
  misc_feature (200)..(200): n is a, c, g, or t
  misc_feature (210)..(210): n is a, c, g, or t
  misc_feature (238)..(238): n is a, c, g, or t
  misc_feature (243)..(243): n is a, c, g, or t
  misc_feature (303)..(303): n is a, c, g, or t
  misc_feature (329)..(329): n is a, c, g, or t
  misc_feature (333)..(333): n is a, c, g, or t
  misc_feature (335)..(335): n is a, c, g, or t
  misc_feature (348)..(348): n is a, c, g, or t
  misc_feature (350)..(350): n is a, c, g, or t
  misc_feature (356)..(356): n is a, c, g, or t
  misc_feature (501)..(501): n is a, c, g, or t
  misc_feature (586)..(586): n is a, c, g, or t
  misc_feature (843)..(843): n is a, c, g, or t
aaacccacaggctttancactgcctaatttacttcacacaatgaataaaaaccataaaccaaagcttgctgcctaaccactccccaggtccagacgggacaaggaaatgacatgananncgagganacccatggngcacactcatgagangcaggagcaccagaattcacggaaaataaaaangnaaaaaaaanngnggntcggaaagtnagtcccagatgtagtgggacagataggngtganttcatcacaccctatagccctggtctttcccctcctctgctccaggtatcgaaccaaganttccttttccaagatgccctgctggntcangngtgcatgatctcntnggtctngcctctggcacagtctacatgcttccacaacaacgacagcagtttgataacagatgttaccccacgatgtgggggcgggctcacactgtgcgcctcccccacactcttcccactgggtgtggtgctcaggacacctgcatttgtnggacgtacgcatgaggcaggagtagaagctgcctgctgcaggcaggcgactgctcacttcctcctgatcgtcccccaccccaagnagtccagtcaacaccagaagagatcatacctacagttaaaatttgcagtgtttctaaggggaagagaaatgtcacatagaaagtatttacaaagaagggattaaatttatcagctgtccaaacactataagaccacatgctttatacagcggcaatgcagtcaagcccgcttttccatggagcgggcagaattgggacaggctcctccagtcagtcgggcacagggcgcaggaggcagctgaggaaggcaaggagcnctaggaagtctgctgct

SEQ ID NO: 682930 - DNA, 433 bp, Homo sapiens
actggaaatacatggggatgagcagcggcggcccaatcaggaagaagtattcgtgctggtgattgtagggcaggtatttcagcttcttcttgccgtctacgcacacgagaacatgcctctcgcaaaggatctccttcatccctctccagaagaggagaagaggaaacacaagaagaaacgcctggtgcagagccccaattcctacttcatggatgtgaaatgcccaggatgctataaaatcaccacggtctttagccatgcacaaacggtagttttgtgtgttggctgctccactgtcctctgccagcctacaggaggaaaagcaaggcttacagaaggatgttccttcaggaggaagcagcactaaaagcactctgagtcaagatgagtgggaaaccatctcaataaacacattttggataaaaaaaaaaaa

SEQ ID NO: 682931 - DNA, 731 bp, Homo sapiens
caacgcatgtgccgctcccaacgcatgtgccgctcccaacgcatgtgccgctcccaacgcatgtgccgctcccaacgcatgtgccgctcccaacgcatgtgccggggcctttccggcggtgacgacctacgcacacgagaacatgcctctcgcaaaggatctccttcatccctctccagaagaggagaagaggaaacacaagaagaaacgcctggtgcagagccccaattcctacttcatggatgtgaaatgcccaggatgctataaaatcaccacggtctttagccatgcacaaacggtagttttgtgtgttggctgctccactgtcctctgccagcctacaggaggaaaagcaaggcttacagaaggatgttccttcaggaggaagcagcactaaaagcactctgagtcaagatgagtgggaaaccatctcaataaacacattttggataaaaaaaaaaaaaaaaaaaaaaaaaaaaaaaaattttggggccccctgggcccccgaaaaagttttttaaaccctctcgttggggccgcgcggggccccaagaaggggtacggcagaccatgtggccaaagcggggttcccaaggagaaaaccggggccaacagaacaaagcgggtgggagttcctccaccaacataaaaaaacgcgccggggggaaaacacgcgaagggttgcggcacaaaactccagagaggggaattcggagagggcacacaaggga

SEQ ID NO: 682932 - DNA, 195 bp, Homo sapiens
ctatcacattatcctgaacaaataatgagttcttttatttgaggtatgccattttgaagactgagacgttggagtttaatcctagaggataaaggaaatctttgggaaagtcagtatgttatatagccacaatatgaacctcaaactgaatcctctaaagggcccctacaatgaagtagacattggtggaaacat

SEQ ID NO: 682933 - DNA, 851 bp, Homo sapiens
  misc_feature (552)..(552): n is a, c, g, or t
  misc_feature (559)..(559): n is a, c, g, or t
  misc_feature (577)..(577): n is a, c, g, or t
  misc_feature (626)..(627): n is a, c, g, or t
  misc_feature (668)..(668): n is a, c, g, or t
  misc_feature (711)..(711): n is a, c, g, or t
  misc_feature (785)..(785): n is a, c, g, or t
  misc_feature (787)..(787): n is a, c, g, or t
caacgcatgtgccgctcccaacgcatgtgccgctcccaacgcatgtgccgctcccaacgcatgtgccgctcccaacgcatgtgccgctcccaacgcatgtgccggggcctttccggcggtgacgacctacgcacacgagaacatgcctctcgcaaaggatctccttcatccctctccagaagaggagaagaggaaacacaagaagaaacgcctggtgcagagccccaattcctacttcatggatgtgaaatgcccaggatgctataaaatcaccacggtctttagccatgcacaaacggtagttttgtgtgttggctgctccactgtcctctgccagcctacaggaggaaaagcaaggcttacagaaggatgttccttcaggaggaagcagcactaaaagcactctgagtcaagatgagtgggaaaccatctcaataaacacattttggataaaaaaaaaaaaaaaaaaaaaaaaaaaaaaaaaaaaaaaaaaaaaaaaaaaaaaaaaaaaaaaaaaaaaaaaaaaaaaaaaaaaaaaaaaaaaaaaaaaanaaaaaanaaaaaaaaaaaaaaaacnttgtgggcccgcttggcccaagcgcttttaaacttgggcaaggtttagnntggggcccgaattcggggctcacttggcaaattcccccaantgggggggtattaaaattaacgggccggggtttaaaaacgttnggactgggaaaacctggggttacccaacttaaatccctttggagaaaaaacccctttttgcaaagtgggaatancnaaaaaggcccccaccgaaacgcttttcacgttggcaaacccaaatggcaattggtttgagcctt

SEQ ID NO: 682934 - DNA, 858 bp, Homo sapiens
  misc_feature (644)..(644): n is a, c, g, or t
  misc_feature (651)..(651): n is a, c, g, or t
  misc_feature (675)..(675): n is a, c, g, or t
  misc_feature (687)..(688): n is a, c, g, or t
  misc_feature (705)..(705): n is a, c, g, or t
  misc_feature (807)..(807): n is a, c, g, or t
caacgcatgtgccgctcccaacgcatgtgccgctcccaacgcatgtgccgctcccaacgcatgtgccgctcccaacgcatgtgccgctcccaacgcatgtgccggggcctttccggcggtgacgacctacgcacacgagaacatgcctctcgcaaaggatctccttcatccctctccagaagaggagaagaggaaacacaagaagaaacgcctggtgcagagccccaattcctacttcatggatgtgaaatgcccaggatgctataaaatcaccacggtctttagccatgcacaaacggtagttttgtgtgttggctgctccactgtcctctgccagcctacaggaggaaaagcaaggcttacagaaggatgttccttcaggaggaagcagcactaaaagcactctgagtcaagatgagtgggaaaccatctcaataaacacattttggataaaaaaaaaaaaaaaaaaaaaaaaaaaaaaaaacaaaaaaaaaaaaaacacaaaaaaaaaaaaacaaaaaaaacaaaaaaaaaaaaaaaaaaacaaaaaacaaaaaaaaaaaaaacagaaaaaagaaaaaaaaaaaaaaaaaaaaaaaaaaaaaaaaaaaaaaaaaaaaaaaaaaaaaaaaaaaaaaaaaaanaaaaaanaaaaaaaaaaaaaaataaaaaaangaaaaaaaatannataacaaaaaaaaatanaattttttaaaataaatttatttaagtttaattaaaaaatttttaagttagtggttaaaaaattatgggaaatggaaaaatattgatatcaaaatgggaaantgaaggggaaattttttgtataagtgggcttatttttggaggccgctctct

SEQ ID NO: 682935 - DNA, 688 bp, Homo sapiens
  misc_feature (688)..(688): n is a, c, g, or t
caacgcatgtgccgctcccaacgcatgtgccgctcccaacgcatgtgccgctcccaacgcatgtgccgctcccaacgcatgtgccgctcccaacgcatgtgccggggcctttccggcggtgacgacctacgcacacgagaacatgcctctcgcaaaggatctccttcatccctctccagaagaggagaagaggaaacacaagaagaaacgcctggtgcagagccccaattcctacttcatggatgtgaaatgcccaggatgctataaaatcaccacggtctttagccatgcacaaacggtagttttgtgtgttggctgctccactgtcctctgccagcctacaggaggaaaagcaaggcttacagaaggatgttccttcaggaggaagcagcactaaaagcactctgagtcaagatgagtgggaaaccatctcaataaacacattttggataaaaaaaaaaaaaaaaaaaaaaaaaaaaaaaaaaaaaaaaaaaaaaaaaaaaaaaaaaaaaaaaaaaaaaaaaaaaaaaaaaaaaaaacatgcggccgaaattcgggctaacttgcccaattcgccctatagtgggccgtatcaccaataaatggcccgcggtttaacaacgtggtaactggccctgggggttccccaaattaaacgccttgggtatcccttttcggccggtgggcn

SEQ ID NO: 682936 - DNA, 309 bp, Homo sapiens
cattcagctcggtacccactttccagagtggagaagaggaaacacaagaagaaacgcctggtgcagagccccaattcctacttcatggatgtgaaatgcccaggatgctataaaatcaccacggtctttagccatgcacaaacggtagttttgtgtgttggctgctccactgtcctctgccagcctacaggaggaaaagcaaggcttacagaaggatgttccttcaggaggaagcagcactaaaagcactctgagtcaagatgagtgggaaaccatctcaataaacacattttggataaaaaaaaaaaa

SEQ ID NO: 682937 - DNA, 382 bp, Homo sapiens
gtatgtggaggaggaggagggagtgagtgcaggggaggaagaggaggaggaagaggaggatgaagaggcctgaggaggagtgcctggctctggaatgggccctgtggcgcggatgaggacttcctgctggagcacatccgcatcctcaaggtgctgtggtgcttcctgatccactgtgcagtgcagtatccgccatgttcgccgtctgccttgttgttcaccgacttcggcatcgcagtcttcgagatcccgcaccaggagtctcgggggcagcaagccagcacatcctctcctccctgcgcattgtcttttggcttcccgcattggcagacctcaccgagtttggcttcctcattgcgggagcttgtgtcttggttgctca

SEQ ID NO: 682938 - DNA, 210 bp, Homo sapiens
aaatatcgctgcgtgcagctgagttactagctgttgaaacttatcgttacttgtgtaggttgtctgaaacggtcgcagtcaccggttagcttgataagtcaggttttcagcaactgtcatcaagccatcacgacctatataagccactgcaatcgcactttacatcattaagacccttactagaagtaactggccatcctgccaccgctt

SEQ ID NO: 682939 - DNA, 1012 bp, Homo sapiens
caacgcatgtgccgctcccaacgcatgtgccgctcccaacgcatgtgccgctcccaacgcatgtgccgctcccaacgcatgtgccgctcccaacgcatgtgccggggcctttccggcggtgacgacctacgcacacgagaacatgcctctcgcaaaggatctccttcatccctctccagaagaggagaagaggaaacacaagaagaaacgcctggtgcagagccccaattcctacttcatggatgtgaaatgcccaggatgctataaaatcaccacggtctttagccatgcacaaacggtagttttgtgtgttggctgctccactgtcctctgccagcctacaggaggaaaagcaaggcttacagaaggatgttccttcaggaggaagcagcactaaaagcactctgagtcaagatgagtgggaaaccatctcaataaacacattttggataaaaaaaaaaaaaaaaaaaaaaaaaaaaaaaaaaaaaaaaaaaaaaaaaaaaaaaaaaaaaaaacagggggggggcgcccaaaaaactcatcccccaggggggcccaaaccaaagagcgacaccccgagtttgttgggaaaaagggggccccaaaaggggggcgcggtatataaacacacgagcgcaggggcgcgcagcataaacacaggcggaaaggaggaaaacacaggaaaacggggacacactgggagaaggacaccctccacacgggggaggggaaacaaaatggggcacaaccaccaccccagcgcgaaatataaaccgcatccgagcggacacacacatataacaccttttgacacaagtggtattaaacagggggggtgtaaaacacaaaatagcgaggacaaatataatgcacgacatggtgctgtgttagaaagaatgttgtgtgtgacatcacgggaggaatcttattatctgctgataaaacgaatattttttaaacgcgcggagcgagagtgttagtatacatataaaatcgaaaaaaaaaaacaagt

SEQ ID NO: 682940 - DNA, 225 bp, Homo sapiens
tatttgaaacagtctgcccctttgatacggtattgcatttccaaagccaccaatccattttgtggattttatgtgtctgtggcttaataatcatagtaacaacaataatacctttttctccattttgcttgcaggaaacataccttaagttttttttgtcctccccttggccctcccctccctgttttccttgattaagaaaaaatacaatagtcacattttaat

SEQ ID NO: 682941 - DNA, 294 bp, Homo sapiens
agttaacagaatgctctttgttgtcgtactagtaatggacatctgttattatatatccattacatgtaggttgctgttaaagttggcaaatgaaaagatagtgttaagaggttacttttttatcttattataggctatttaactttactctgtttctcaaatcttatcttggaaatgctttctcttgatcactgaagggtatcaggaaagagaatagtgaaaatttcattatgtaaaataattacatcctaccagtggtgggattttaaaaatttaatgtgcgtggggtaggag

SEQ ID NO: 682942 - DNA, 770 bp, Homo sapiens
caacgcatgtgccgctcccaacgcatgtgccgctcccaacgcatgtgccgctcccaacgcatgtgccgctcccaacgcatgtgccgctcccaacgcatgtgccggggcctttccggcggtgacgacctacgcacacgagaacatgcctctcgcaaaggatctccttcatccctctccagaagaggagaagaggaaacacaagaagaaacgcctggtgcagagccccaattcctacttcatggatgtgaaatgcccaggatgctataaaatcaccacggtctttagccatgcacaaacggtagttttgtgtgttggctgctccactgtcctctgccagcctacaggaggaaaagcaaggcttacagaaggatgttccttcaggaggaagcagcactaaaagcactctgagtcaagatgagtgggaaaccatctcaataaacacattttggataaaaaaaaaaaaaaaaaaaaaaaaaaaaaaaaaaaaaaaaaaaaaaaaaaaaaaaaaaaaaaaaggaaaaccgaaaattaacaacgaaaaaccttgtcgcccgcctgggcccagccgattttagactcgggcaagtttatgcatgcggccgaaattggggctcattgggccaattcgccctatggggggccgaataacaattaatgggccgtggttttacaacgttgggactgtggttgggcgaaatacgaaggggcccgaaccggacgcctttccagttgcccaacctgaatggccaattgcacttggaccgcgtttt

SEQ ID NO: 682943 - DNA, 1018 bp, Homo sapiens
caacgcatgtgccgctcccaacgcatgtgccgctcccaacgcatgtgccgctcccaacgcatgtgccgctcccaacgcatgtgccgctcccaacgcatgtgccggggcctttccggcggtgacgacctacgcacacgagaacatgcctctcgcaaaggatctccttcatccctctccagaagaggagaagaggaaacacaagaagaaacgcctggtgcagagccccaattcctacttcatggatgtgaaatgcccaggatgctataaaatcaccacggtctttagccatgcacaaacggtagttttgtgtgttggctgctccactgtcctctgccagcctacaggaggaaaagcaaggcttacagaaggatgttccttcaggaggaagcagcactaaaagcactctgagtcaagatgagtgggaaaccatctcaataaacacattttggataaaaaaaaaaaaaaaaaaaaaaaaaaaaaaaaaaaaaaaaaaaaaaaaaaaaaaaaaaaaaaaagagggggcgcgccgcccccaaaaatatatctcccccagggggcgccccaatttacgcgcgcgccccccagtttttctcggccaaaagggggccccccaaaatatgaggagagaggcacgataataaaatagacgccgtgacgaccgcggggcgccccgaccgcgtaacaaagacaggcgcatagccagcgtggggaacacaagcgagcgcacaccgggggagacacctcgtggagagagaagaacccctaaaactccggggggggagggggagaaaaatatgtggggaacaaaaatatcaataatcttaaaagaaaaaaatattaaagagagctccagcagaagaggagaaattataaaaaaatttttgaagaggggttataatagggggtgttctacacaacgtagggctggcaaattattatgaagagagaagatgaaaagatttggagcattacgcggatagttattgagtatagcagcagaagcaatttatatcacggg

SEQ ID NO: 682944 - DNA, 198 bp, Homo sapiens
cgaagtctcggcgccatccgatgccgcgggagaaagaaagaaatggaatttgaattgccagtggaaacacttatttaaaagacaaggcgctgctgatgttcatgaagcaaagactctaacaagttgtgctctgtgttacaagttatcaaagccagactggttcaggaaccagaagacttggttctgcccgagtcatcg

SEQ ID NO: 682945 - DNA, 116 bp, Homo sapiens
cgctttattgctgatgactttagagccagtatgttacagagctggcatgcgcagtctgtggagaacgacatcatgggctccgaagtcttgatgaacaatataacgaagagcaggag

SEQ ID NO: 682946 - DNA, 750 bp, Homo sapiens
caacgcatgtgccgctcccaacgcatgtgccgctcccaacgcatgtgccgctcccaacgcatgtgccgctcccaacgcatgtgccgctcccaacgcatgtgccggggcctttccggcggtgacgacctacgcacacgagaacatgcctctcgcaaaggatctccttcatccctctccagaagaggagaagaggaaacacaagaagaaacgcctggtgcagagccccaattcctacttcatggatgtgaaatgcccaggatgctataaaatcaccacggtctttagccatgcacaaacggtagttttgtgtgttggctgctccactgtcctctgccagcctacaggaggaaaagcaaggcttacagaaggatgttccttcaggaggaagcagcactaaaagcactctgagtcaagatgagtgggaaaccatctcaataaacacattttggataaaaaaaaaaaaaaaaaaaaaaaaaaaaaaaaaaaaaaaaaaaaaaaaaaaaaaaaaaaaaaaacccgcgcgcgggcgcccctgtgggggggggggaaaaagagggggagagagagagaacgagcggcgaccagagggagaccaacaacaaggagagcccgcaagccccccaatctttctgggcccccaagaggggggaacaaacaggcgcggcggcccccccaaaaaaggaaggcacccgcaataaaacctcaaaaaccccggggtacccccgcgataaaaagccgccacaaaagagt

SEQ ID NO: 682947 - DNA, 448 bp, Homo sapiens
  misc_feature (277)..(277): n is a, c, g, or t
  misc_feature (282)..(282): n is a, c, g, or t
atcttaagtaagagaatgtggagccaccagtggaaagaacaattgcagggaaagaggcctgattatattccagaccctggtcccagccattccttatctgcttacctaaattaattcaaattgagtttcaccatcatactgggacccccacctgatgtggtttcgttgcccatttttcaaatatgtattatttgtggcttacattaacatcttagatttcactctgacttcctcaccagtcagtcttaatctgctataatatggccatcactccatntggtngaaactgttggtatccaaattacaagtgacttaatgtctaaatccactggatgcattctacttgttaatatatttgacacacataaacactcacactgacacacataagtacttcttaaaactctctcctccatgggttggaactatagtctcttggacttttctt

SEQ ID NO: 682948 - DNA, 157 bp, Homo sapiens
acccaagaggcaggaaaaacgcgagtgtcttaagacctcaccctggcaggtgggcttctatccacccatgaggcacctcgggcttctcagccaccccgtggtgtaacaagtggaggaggaggaggggtagacacctttctccagcctgtgccaatcc

SEQ ID NO: 682949 - DNA, 252 bp, Homo sapiens
atccccacttggtgatgccccatctctactaatataaatatcaaaaattagtctgggttgtggtggcatgcacctgtatcctagctactcgggaggctgaggcaggagaattactataacccgggaggcggagttctcggcagtgagctgagattgtgccattatactccagcgcgggcgacagtagtcacagctctgtcttctaaatataccttactctcttattatctttagtaaactaactaggcttag

SEQ ID NO: 682950 - DNA, 296 bp, Homo sapiens
gttcccatttagaactaaccccttttttttccaaaaaaatattaatccctctcccccccggttccctttatatgttaaaaaataatggctttgaggggggaaaaaattaacctaggggagaggggggtttcctgtagtgctgtttccttaaagggtttccgtaaatttaattcccccgctaattcaataaaaaatgggccctttaagtgttttgattttaataaaatttttcccctttttcccccccgtaacaatgtaatatgttaatgtaaaaaaaattggtttttattctccga

SEQ ID NO: 682951 - DNA, 389 bp, Homo sapiens
  misc_feature (337)..(337): n is a, c, g, or t
  misc_feature (352)..(352): n is a, c, g, or t
  misc_feature (369)..(369): n is a, c, g, or t
tggcctcaaccccccaagggggtgggcataacagacatgtaccacggtaccgggccggatctcattctggatctctggcttcagaatatcggcacggagggtaaagcacacgtatgtacacacaaacacacacacaaagtttaatataccttttaaaaaattgtatggtatggtttcctggaaatagggtccggctatgtggcctaggcgggtctggaactccggggataaagcaatcctcccaattaagccttccaaaaggcgggcattacgggggtgagccaccacaatcagtctcttagatttggtttttaaagaacaattcgaagtttacggnaaaatggtgaagaangaacggacggttcccanatacccggtctccacggggt

SEQ ID NO: 682952 - DNA, 379 bp, Homo sapiens
  misc_feature (105)..(105): n is a, c, g, or t
cccccgggggggggattgtttttcccccccaattttatttttttggggggggggtcccccccaaaaacccggggggggtgggccgaaaaaattgtgtgggaaagngccggggtttcgggggggggggggcccccccctttaaaaggccccccgggggggtttttgggtttcccccttttttaaaagggggggggggggttttgggggggggggggcccaaaaaaaaaccccctttttggaccccaagggggggggggggtagttttttccccccccagggggttttcccccgtttttaaacccccctttttttggggggggggccaaatttttggggggttccccccccaaaaaaaaaaggccgggttttttcccttta

SEQ ID NO: 682953 - DNA, 249 bp, Homo sapiens
agagacgacctatagtcgagctgtcatatggcactggacttcaatcttgacaacgctcagtaaatcatagatgaacaatatcctttgcagagtaggacggaatataacttatccataaagtggcagggttataaattataggatagtgacacagtatactgcatagctgaactacacctgcaaacccgtgttaacctgactgggaccgaagacctgggagggactccatctagacatcgaccctggcag

SEQ ID NO: 682954 - DNA, 1397 bp, Homo sapiens
cctgaagagtgcagagcccaagcagggtcgcatatgtggtctttcagtattcggatggaaaactacagactgtgtgctgcacaaaggaagtgaaatgtggtgccgtgtactctatgtgtgtgaatttaactggcgaagctgttagccagcatcaatagcactggtgcggctctatgagtggacaacagagaatcgagctgctgcactgcagtgcaaccactacaacaacatcatggccctctacctgaatgaccaagggcgacttcatcctggtgggctgaccttatgcgctcagtgctgctgcaatgcctacaagcccatggaatgaaactttgaagagattgctcgagaactttcaatacccaactggatgagtgctgtggaaatcttggcatgcatgacaattctctggtgcggctgacacaacttgccttataactagtaaagtgtgtcaaaaggcatagcgcttgccaccactgacgaggagcggcagcacctccaggacgttggtctaattccaacagggacgagtattgtccaatgtctttttgccacggctcttctggtaatgcaccactctgagtgagacttaccaccccacacacacatgctcggtgcctcttcgcgcacggtcaacgggctatgatagggctggtgacctcactgtccagagaacctggtacaaacctacctgctggacattgccgcacatccgactccatccaaggtcatccacagtcgtcggtgacaagcactgtgatgacatccattcatggtacgaaatccttttcacaccccgacacgtaacgcacggtaatcatacacacgtggatcttaattccaactgtgcacctgctacgtcggacgtatccctggaaaactagagcgtgcccagagaaggtatgacgtgtgtttgtcgacccacatcttctgtaccgtggacactagtcataagcatgcaggtacctgataaaacaccacaaatagaatcagctcccacaaaaacaaacatacatccaaactatattctatataacgtaccacccaccacaagtcaaatagtcacccacgccaccacaactcatatacaaaaaagaatcaactagtaactaacgagacatccacatttaaccacctatcagcacctccactctaacctcaccactactactacaacacacaccaccatcctataaccaacaaacaaccaagtcttatatacatacaagctaaactatcataattctactacctactcatctcagctacatccaaactaaccaacacaccactcacatccaactcacaacacacaatccaccaataactacatctaatctaacaacatacccctaaaccacaacactacaccacccaccccaatcaccatcctacca

SEQ ID NO: 682955 - DNA, 489 bp, Homo sapiens
  misc_feature (377)..(377): n is a, c, g, or t
gaaattcggccataatggccgggaaattcaatcggattagccggtgggttggaagctaagttattccaattggatggtaaggtccagttttggaaatgggccgtttccgattaccaaaggtaaaatggcagttaatagcggtggcaacttttaaaggggtaataatggcccttgcatggggggaattaaaggtttaaccactggggtaaaaaaaaaaaaaaaaaaaaaaaaaaaaaaaaaaaaaaaaaaaaaaaaaaaaaaaaaaaaaaaaaaaaaaaaaaaaaaaaaaaaaaaaaaaaaaaaaaaaaaaaaataaataaaaatataatttaacttataaaattattcctttttaattattatatttttttcaattncctctccattattacacctattgccctaatcgcccatttttccgcgcgatcccaacattttgcgctgccttcaaaccctcataatcgggaatactcctctttaccccttctt

SEQ ID NO: 682956 - DNA, 328 bp, Homo sapiens
  misc_feature (121)..(121): n is a, c, g, or t
  misc_feature (148)..(148): n is a, c, g, or t
  misc_feature (227)..(227): n is a, c, g, or t
  misc_feature (245)..(245): n is a, c, g, or t
  misc_feature (304)..(304): n is a, c, g, or t
  misc_feature (314)..(314): n is a, c, g, or t
aagctagaatagataatttgactctatttcaagtcacgacattttgtagccatttgactttggcctaagctttctgaacttgaaattccttgtctatgtaatgggaatcataatatctgcnctctttctttgtatgattgtcctaagnttaagaaaagtaaggtatacatacacagccttacaatggagaaaagtaatgtttaagagtatgatgttctagaaaagancatttccatttatttgcnttgtattgatttcatttatgtactaaagtagcagaactttaaggtagtcaaatatgganttctattttntcagttacccatga

SEQ ID NO: 682957 - DNA, 105 bp, Homo sapiens
tgtactaccgacggttgctacagacaccttacccactactttacaactctcactacactggctcgtgaccgtacgcgtgtggacttacttacgcttatccactac

SEQ ID NO: 682958 - DNA, 296 bp, Homo sapiens
aggtgatgctgaggtactctaagatcccgtggcatgtatcagttacttgggaggctgaggaaggagactgttgagctagcggttgtaggcatgctaagcaacacagtgaaatctgtctctaaaaccattaattcgatggacacagagacagacaccaagtgagatgatgtcaccatcggatggggcgatcgtctgcaaatgtagggagaagaacagctggggaagggcctggagcaagacgggacacacctcagcctcagaagcaaccaggccttgaatacctgtgtctcacattg

SEQ ID NO: 682959 - DNA, 189 bp, Homo sapiens
  misc_feature (56)..(56): n is a, c, g, or t
gaccccgggccatgctgactggttccagtttttgatgagcctggttgcatcctcanctcacaggcacagtgacttagatttgtaactgggtgataaattactcctttttgcttgagctagtttaagagggcttctgttaccaccaccaaaagagccttggccaaggcaagaaccagtcagcattaacca

SEQ ID NO: 682960 - DNA, 176 bp, Homo sapiens
ggttgcagaagatggtcgcctgacatccaggagactgatgggcacctatgtcgccaatatgctctgcaggagtgtgctagaggcaggcatcctctatggccagtgcgcctgtacggctggaccatggagcccgtgtatatgtgccagcgagcacctgcccctacctcgtggactgc

SEQ ID NO: 682961 - DNA, 437 bp, Homo sapiens
tcgatcgttagtttccttaatctctacagagggaggtgggggctaatatggcagggatgtctggggatggatttctttaaaacaacaacaaaaataaaaaacaaacaactctcaaaacacaaagtagtagaagtagaaatattgataggggcggggggagtgctgttggatatatcagtctaattggtggaaacctagaaatcatgtatgtcctagtgggtttattctactggggattagaaaccaagtgcttagggtaaaggaggagagattctgcatttgttttattttcatggcagatgcacattacctctttcagaaattcctgagtcatacatgattacattatgtttgtatgcgagacatttaattccttggcacggggaaataagtttttcagtggcagttttttaaaaggtgaaatgggctgctttata

SEQ ID NO: 682962 - DNA, 123 bp, Homo sapiens
atatcttcgctcatatactctccataataagagtctggtaaggtgcacacttttccttagtcatttatacaatgaaccaatgtcgtggttacctgggaaagaaacttcacgtgcttttaaatc

SEQ ID NO: 682963 - DNA, 892 bp, Homo sapiens
  misc_feature (54)..(54): n is a, c, g, or t
  misc_feature (140)..(140): n is a, c, g, or t
  misc_feature (165)..(165): n is a, c, g, or t
  misc_feature (168)..(168): n is a, c, g, or t
  misc_feature (172)..(172): n is a, c, g, or t
  misc_feature (242)..(242): n is a, c, g, or t
  misc_feature (250)..(250): n is a, c, g, or t
  misc_feature (255)..(255): n is a, c, g, or t
  misc_feature (263)..(263): n is a, c, g, or t
  misc_feature (274)..(275): n is a, c, g, or t
  misc_feature (279)..(280): n is a, c, g, or t
  misc_feature (285)..(285): n is a, c, g, or t
  misc_feature (290)..(290): n is a, c, g, or t
  misc_feature (299)..(299): n is a, c, g, or t
  misc_feature (326)..(326): n is a, c, g, or t
  misc_feature (348)..(348): n is a, c, g, or t
  misc_feature (376)..(376): n is a, c, g, or t
  misc_feature (380)..(380): n is a, c, g, or t
  misc_feature (402)..(402): n is a, c, g, or t
  misc_feature (474)..(474): n is a, c, g, or t
  misc_feature (482)..(482): n is a, c, g, or t
  misc_feature (490)..(490): n is a, c, g, or t
  misc_feature (498)..(498): n is a, c, g, or t
  misc_feature (528)..(528): n is a, c, g, or t
  misc_feature (564)..(564): n is a, c, g, or t
  misc_feature (585)..(585): n is a, c, g, or t
  misc_feature (589)..(589): n is a, c, g, or t
  misc_feature (736)..(736): n is a, c, g, or t
  misc_feature (785)..(785): n is a, c, g, or t
  misc_feature (862)..(862): n is a, c, g, or t
tacaaaaatattacagcagtgtgagcggggattgggaaggaagagatggggaanacaagtagatgctaaaatgggataggtgaacttcaggtcatcatggtcattgaaggaactgtaaattcttaagcttctagattttnccgctcttcagaaaacatttaaggnggntgcntttccccatgaatgagaaatgaaacgttccctaagcatttgagtctaaagacaagaaagcattgcttttnctactggnaaatntctctttncttcccattgnnctgnnctctnccgtncccctcgtngctttatggggtctaagggggagaggngccatgggtttccaccagcggnagagtgggtgctgggcgcaacacagggntgtnagtgacattcagactcactggnaatgggtccaactcatcttgaataaaatacacaaagaaagaaagagagagagagagagagagagagagaganagagaganagagaganagagaganagagagagagagagagagaacccgagaaancgaaaattgtttttttatggagggttttacaaagtnctctagatttctttatgtgcnaganagttcatttctggacttaatctctaggggggcaaaaaagaataaatagaaacaaatttaatgatcattctggaatcctgttctttactttgttcacacgctattaattctcataccttcacctctctaccacaaagcctagaaaatnaaatggtctcctattccatatttgcatagtattaataatactgtcaggnggtgaacttctagccccttgcttgcagccacattcctgaagagcactggtccaatctgacgtattcgaaaacaatanataagtgtctataggccaaaaattgggtcc

SEQ ID NO: 682964 - DNA, 634 bp, Homo sapiens
caacgcatgtgccgctcccaacgcatgtgccgctcccaacgcatgtgccgctcccaacgcatgtgccgctcccaacgcatgtgccgctcccaacgcatgtgccggggcctttccggcggtgacgacctacgcacacgagaacatgcctctcgcaaaggatctccttcatccctctccagaagaggagaagaggaaacacaagaagaaacgcctggtgcagagccccaattcctacttcatggatgtgaaatgcccaggatgctataaaatcaccacggtctttagccatgcacaaacggtagttttgtgtgttggctgctccactgtcctctgccagcctacaggaggaaaagcaaggcttacagaaggatgttccttcaggaggaagcagcactaaaagcactctgagtcaagatgagtgggaaaccatctcaataaacacattttggataaaaaaaaaaaagtcgacgcggccgcgaatttagtagtagtagtcgacccgggaattcgggacgggtactggaggggtgtccagttttcccaaaagggagccgtttaagctctggttaacacagggcaaacggtttcccggtggaaatttttatccctcccaaatttccacaaatatgggggt

SEQ ID NO: 682965 - DNA, 1528 bp, Homo sapiens
caacgcatgtgccgctcccaacgcatgtgccgctcccaacgcatgtgccgctcccaacgcatgtgccgctcccaacgcatgtgccgctcccaacgcatgtgccggggcctttccggcggtgacgacctacgcacacgagaacatgcctctcgcaaaggatctccttcatccctctccagaagaggagaagaggaaacacaagaagaaacgcctggtgcagagccccaattcctacttcatggatgtgaaatgcccaggatgctataaaatcaccacggtctttagccatgcacaaacggtagttttgtgtgttggctgctccactgtcctctgccagcctacaggaggaaaagcaaggcttacagaaggatgttccttcaggaggaagcagcactaaaagcactctgagtcaagatgagtgggaaaccatctcaataaacacattttggataaaaaaaaaaaaaaaaaaaaaaaaaaaaaaaaccccgggggccctctttggcgcgggggcgcgggaaaaagggggtatagagaagggcgcccggggccaagagagtgtgtttccgcgtgacacccaatattttcttgtgtgtcaccagcggggcgaaacatcgcgcgcgcgagtccccccatatgaggagagaggcgcgattataataattcccgaataaagcccggtgtttaaccgcgggctttatgactgtctcggcggcacccacaagtcaatcctcgacacgacaagatcataaccaacgaccgcgacggaggacagcaccaccggagagcgacacagctcaacgacagaacagccggccgcgaatcaccacaccacgacaagcactctgcaggagacaccgaccacaaacaagagaccgcggcgcccgcgaacgacacacacagccacacccacttgtccacacccaggttcgcgacccacgcaccacattgcacacctcaactctcatccaccaccccaccaaccaaaagcaaaaacaaacacaacagcaccgaccaatctactaactacttactcatttataaacaactacttttatacaatatataaaatatactaccaaacagcaaagaggtactatcagtctaaactaaacaaagaaaacaacagtaaactaaacaaacacacaagaactaaacacaccactaaaaatgaagtaaagaacaaacaaaaaaaacaaacagaccatcaacacccaacccaacctcacatactacacaataagaagtacaacaactcaaacaacacaccatgaaagtccgaagatagacacacaagcttaacacctgcacgaaacatacagacaactactcgacaaacactacgacaagacgcgacacacaaatcaaacatggatacataaaacaacatacaaaccataatagcaatcacgacacgccaacacgcacgtcgctatccataaagttctgtaatactaataccaaagtcactgactcatgtctgatatatcagtacagtaacaactaatctacttctcagccaagtcacacc

SEQ ID NO: 682966 - DNA, 394 bp, Homo sapiens
  misc_feature (4)..(4): n is a, c, g, or t
tgantcggcaccgtttgcccacaaggactctggctcagtggttgaagacgattttaagactgaactcctatattctctttcccagcatgccagttaaaaacttcaatcaaggccaggtgcagttactcacacctgtaatcccagcactttgggaggtcgaggtgggcagatcacctgaggtcaggagttcaagtccagcctggccaacatagtgaaacccagtctctactaaaaataccaaaaattagctgggtgtggtggcgggcgcctgtaatcgtagctactcaggaggctgagacaggagaatcgctcgaacccaggaggcagaggttgcagtgagccaagatcacgccattgcactccagcctgagcaacaagagcgaagctccatctc

SEQ ID NO: 682967 - DNA, 747 bp, Homo sapiens
caacgcatgtgccgctcccaacgcatgtgccgctcccaacgcatgtgccgctcccaacgcatgtgccgctcccaacgcatgtgccgctcccaacgcatgtgccggggcctttccggcggtgacgacctacgcacacgagaacatgcctctcgcaaaggatctccttcatccctctccagaagaggagaagaggaaacacaagaagaaacgcctggtgcagagccccaattcctacttcatggatgtgaaatgcccaggatgctataaaatcaccacggtctttagccatgcacaaacggtagttttgtgtgttggctgctccactgtcctctgccagcctacaggaggaaaagcaaggcttacagaaggatgttccttcaggaggaagcagcactaaaagcactctgagtcaagatgagtgggaaaccatctcaataaacacattttggataaaaaaaaaaaacagcagacacaacacaagagaaacacaacgcgacggaggagacaacacagaaaaaacagcaagaagaaagcgggtggggcgcacaggacccccgagaacgacgtcagaaaaccacggtagggcacgaacaccacaagaagaacaaacaaccggacaaaaagaacaaaaaaaaaatgagaggaaaaaaaagagggagagacaccacaaaaaaaaaaacgggggaaaaacaagataagaaacaccaaggaaacaagacaaaggaaacaaggagaaaagacgaaaac

SEQ ID NO: 682968 - DNA, 877 bp, Homo sapiens
ccacattttcttatccagtctatcattgttgaacatttgggttggttccaagtctttgctattgtgagtagtgccgcaataaacatacatgcgcatgtgtctttatagcagcatgatttatattcctttgggtatatacctagtaatgggattgctgggtcaaatggtatttctagttctagatccctaaggaatcgccacactgtcttccacaatagttgaactagtttgcagtcccaccaacaatgtaaaagtgttcctatttcttcacattctctccagcacctgttgtttcctgactttttaatgatcaccattctaactggtgtgagatggtatctcattgtggttttgatttgcatttctctgatggccagtgatgatgagcattttttcatgtgtctgttaaagagcttctgcgcagcaacaagaaactaccatcagagtgcaagaggcaacctacagaatgggagaacatttttgcaatctactcatctgacaaagggctaatatccagcatctacaaaggactcaaacaaatttacaagaaaaaaacaacccatcaaacacgtgggcaaggatatgaacagacacttctcaaaagaagacatatgtcttttaaagtttccactgaaaggagtctacctctgtgttgtcactgtcttacgctttctagacctatttgaatttaaccttctgcatatatataactttgggaaacttacatttaacttttaaaccagattatttactcatcgaagacatctcagtaaatcattcccagcactggtgggtcagcagtttaaactgtgcctcctataactaattcgcttcatgcctcttcacggctgtcactcggtcagccttttcgtggaca

SEQ ID NO: 682969 - DNA, 112 bp, Homo sapiens
ctggcttggtcacgtgatttgcgaggcagcttctctgtgtcattttactcaggcatcaagccttgcatggtccctgcagggcaggtggattcagaactttttttgcattttc

SEQ ID NO: 682970 - DNA, 134 bp, Homo sapiens
tgctccacccagtagcgacccgccatcgcggcgtgggcgctggtcccgcacgcgacgaagtagacgcgcgtgatcttcttcgcgagctccggcgtgacgccgatctcctgcgcggtgatgtcaccgtgctcgag

SEQ ID NO: 682971 - DNA, 116 bp, Homo sapiens
atgtctagctccataactccgcccttcgcgattcttccccgtcccctcggcgtcttgacagatagacagacgagctgccccgccccctgcgcttaccgactgactctagtgacctc

SEQ ID NO: 682972 - DNA, 652 bp, Homo sapiens
  misc_feature (481)..(482): n is a, c, g, or t
  misc_feature (488)..(488): n is a, c, g, or t
  misc_feature (490)..(490): n is a, c, g, or t
  misc_feature (538)..(538): n is a, c, g, or t
  misc_feature (585)..(585): n is a, c, g, or t
caacgcatgtgccgctcccaacgcatgtgccgctcccaacgcatgtgccgctcccaacgcatgtgccgctcccaacgcatgtgccgctcccaacgcatgtgccggggcctttccggcggtgacgacctacgcacacgagaacatgcctctcgcaaaggatctccttcatccctctccagaagaggagaagaggaaacacaagaagaaacgcctggtgcagagccccaattcctacttcatggatgtgaaatgcccaggatgctataaaatcaccacggtctttagccatgcacaaacggtagttttgtgtgttggctgctccactgtcctctgccagcctacaggaggaaaagcaaggcttacagaaggatgttccttcaggaggaagcagcactaaaagcactctgagtcaagatgagtgggaaaccatctcaataaacacattttggataaaaaaaaaaaaaaaaaaaaaaaaaaaaanngggggntnttaggggggggggggaaaaaggggtaaggaaggggcccggggccaaancgggtcccggacccagttttttgggacaaggggggaaatcggggggntcccctattggggggcggattaaattcgagaaaagccggggttacggggtttgaaggggaaaaggct

SEQ ID NO: 682973 - DNA, 125 bp, Homo sapiens
gtacaatcctcctacctcagacctcccaaatagcttggaccacaggcgtccaccaccataccaggccaattcttgagttcttagtagagacacagtttcgccatgccggccattcaacgcctccg

SEQ ID NO: 682974 - DNA, 891 bp, Homo sapiens
  misc_feature (592)..(592): n is a, c, g, or t
  misc_feature (599)..(599): n is a, c, g, or t
  misc_feature (617)..(617): n is a, c, g, or t
  misc_feature (666)..(667): n is a, c, g, or t
  misc_feature (708)..(708): n is a, c, g, or t
  misc_feature (751)..(751): n is a, c, g, or t
  misc_feature (825)..(825): n is a, c, g, or t
  misc_feature (827)..(827): n is a, c, g, or t
caacgcatgtgccgctcccaacgcatgtgccgctcccaacgcatgtgccgctcccaacgcatgtgccgctcccaacgcatgtgccgctcccaacgcatgtgccggggcctttccggcggtgacgacctacgcacacgagaacatgcctctcgcaaaggatctccttcatccctctccagaagaggagaagaggaaacacaagaagaaacgcctggtgcagagccccaattcctacttcatggatgtgaaatgcccaggatgctataaaatcaccacggtctttagccatgcacaaacggtagttttgtgtgttggctgctccactgtcctctgccagcctacaggaggaaaagcaaggcttacagaaggatgttccttcaggaggaagcagcactaaaagcactctgagtcaagatgagtgggaaaccatctcaataaacacattttggataaaaaaaaaaaacaaaaaaaacaaaaaaaaaaaaaaaaaaacaaaaaacaaaaaaaaaaaaaacagaaaaaagaaaaaaaaaaaaaaaaaaaaaaaaaaaaaaaaaaaaaaaaaaaaaaaaaaaaaaaaaaaaaaaaaaanaaaaaanaaaaaaaaaaaaaaaacnttgtgggcccgcttggcccaagcgcttttaaacttgggcaaggtttagnntggggcccgaattcggggctcacttggcaaattcccccaantgggggggtattaaaattaacgggccggggtttaaaaacgttnggactgggaaaacctggggttacccaacttaaatccctttggagaaaaaacccctttttgcaaagtgggaatancnaaaaaggcccccaccgaaacgcttttcacgttggcaaacccaaatggcaattggtttgagcctt

SEQ ID NO: 682975 - DNA, 519 bp, Homo sapiens
  misc_feature (509)..(509): n is a, c, g, or t
caacgcatgtgccgctcccaacgcatgtgccgctcccaacgcatgtgccgctcccaacgcatgtgccgctcccaacgcatgtgccgctcccaacgcatgtgccggggcctttccggcggtgacgacctacgcacacgagaacatgcctctcgcaaaggatctccttcatccctctccagaagaggagaagaggaaacacaagaagaaacgcctggtgcagagccccaattcctacttcatggatgtgaaatgcccaggatgctataaaatcaccacggtctttagccatgcacaaacggtagttttgtgtgttggctgctccactgtcctctgccagcctacaggaggaaaagcaaggcttacagaaggatgttccttcaggaggaagcagcactaaaagcactctgagtcaagatgagtgggaaaccatctcaataaacacattttggataaaaaaaaaaaacatacaaatatatgaatgtgggaaacacaacaataaaaaatgcttnttaatcatgt

SEQ ID NO: 682976 - DNA, 805 bp, Homo sapiens
  misc_feature (547)..(547): n is a, c, g, or t
  misc_feature (596)..(597): n is a, c, g, or t
  misc_feature (638)..(638): n is a, c, g, or t
  misc_feature (681)..(681): n is a, c, g, or t
caacgcatgtgccgctcccaacgcatgtgccgctcccaacgcatgtgccgctcccaacgcatgtgccgctcccaacgcatgtgccgctcccaacgcatgtgccggggcctttccggcggtgacgacctacgcacacgagaacatgcctctcgcaaaggatctccttcatccctctccagaagaggagaagaggaaacacaagaagaaacgcctggtgcagagccccaattcctacttcatggatgtgaaatgcccaggatgctataaaatcaccacggtctttagccatgcacaaacggtagttttgtgtgttggctgctccactgtcctctgccagcctacaggaggaaaagcaaggcttacagaaggatgttccttcaggaggaagcagcactaaaagcactctgagtcaagatgagtgggaaaccatctcaataaacacattttggataaaaaaaaaaaagaaggaaaaatgaaaatgataaaggaaaaataatccgagaaaataaaaataaaaaattaagaaagaagaattcattaaaaaacnttgtgggcccgcttggcccaagcgcttttaaacttgggcaaggtttagnntggggcccgaattcggggctcacttggcaaattcccccaantgggggggtattaaaattaacgggccggggtttaaaaacgttnggactgggaaaacctggggttacccaacttaaatccctttggagaaaaaacccctttttgcaattgggtaaaaagcaatagagcctcccgacggctttcccatttgggcctcctcgaggggcgg

SEQ ID NO: 682977 - DNA, 840 bp, Homo sapiens
  misc_feature (566)..(566): n is a, c, g, or t
  misc_feature (615)..(616): n is a, c, g, or t
  misc_feature (657)..(657): n is a, c, g, or t
  misc_feature (700)..(700): n is a, c, g, or t
  misc_feature (774)..(774): n is a, c, g, or t
  misc_feature (776)..(776): n is a, c, g, or t
caacgcatgtgccgctcccaacgcatgtgccgctcccaacgcatgtgccgctcccaacgcatgtgccgctcccaacgcatgtgccgctcccaacgcatgtgccggggcctttccggcggtgacgacctacgcacacgagaacatgcctctcgcaaaggatctccttcatccctctccagaagaggagaagaggaaacacaagaagaaacgcctggtgcagagccccaattcctacttcatggatgtgaaatgcccaggatgctataaaatcaccacggtctttagccatgcacaaacggtagttttgtgtgttggctgctccactgtcctctgccagcctacaggaggaaaagcaaggcttacagaaggatgttccttcaggaggaagcagcactaaaagcactctgagtcaagatgagtgggaaaccatctcaataaacacattttggataaaaaaaaaaaatatttaatttatttaattaatatttatatactttataatattttattcacttccttatcatcttacaattttaatattaaaaacaactataaaaaaaaaaacnttgtgggcccgcttggcccaagcgcttttaaacttgggcaaggtttagnntggggcccgaattcggggctcacttggcaaattcccccaantgggggggtattaaaattaacgggccggggtttaaaaacgttnggactgggaaaacctggggttacccaacttaaatccctttggagaaaaaacccctttttgcaaagtgggaatancnaaaaaggcccccaccgaaacgcttttcacgttggcaaacccaaatggcaattggtttgagcctt

SEQ ID NO: 682978 - DNA, 762 bp, Homo sapiens
gcggcgcgagcgtcacgccagacagcggcccgcgcgccttctcctcggcgtcggcctgccgccgcctcccagaacctcctcgtgccctcgcgtgccaggcccgcggcgtgccgaaatccgcggttcacacgcatgtcctgcctcggacccctgctgcggagggggagggaacccccacccagcccgcgtccgagaaagaacccgaaatgcccggtcccagagaggagagcgaggaggacgaggacgaggacgacgaggaggaggaggcaggaggaacaaacgaaaagagtctcatcgtggaaggcacacgagggaacacagaaaaaagtacgagacggttgacaatgcaagtctcttccttacagagagagccattttacaatttgcccaacggaaaacggggcagaaacttcgtgacaattgcgaggatacatttttttctacactacagaacgaaaaccgatgaacttcgaaatctacacaaactgctttacaacaggccaggcactgtgtccttcattaccggaagaatgtgggtcagttcagtggctttccatttgcacaccggaagtgtccaatattaccacgacggccgaccatgctcgcacccacctctaccaaatgcccatgctccaagaagcatctgtgaaggtcttgaattcggcagagactcaggtgtacctagtgaacttactgacgaggatcctgaccttcctcaactgctccaaagcttcatggcaaaccattgccgaaatctaacac

SEQ ID NO: 682979 - DNA, 1842 bp, Homo sapiens
  misc_feature (524)..(524): n is a, c, g, or t
  misc_feature (1464)..(1464): n is a, c, g, or t
tcccctcttttatattttttttttttatatatatatatttaaaaaaacgcgtctctctcctctcttcttctctctctccccccccgagagacacaattaaaacccacatcaaagagggggtcttaggggcgcggggggtgcaaagagaggctcaaagaggagcgcgcgctatatatctctttttcggttcctctctcttcacaagcgagcggcggcgggaggggcccgcgtggtgccgcgtgtggtggcacataggcgcagataatagagagtcgaaagagagtgtagagagagagagagtgtgtgtctgcgaggggagtctctctctagaagagagtgtgcgcacagagagagagtgtgcgtgtagtgcgtcccgcagggagtgtagtgggagtgtgatgtgtgagaaagtgtgtctctctctctctctctcacaacactatagagagatcattgtgtgtggtgtctccccacgcagagatgatatctctctcctctctctgcagcgatgagcacagcagagngagatgtgttgtgatcctcgccgcagagaaaagaaggaggagtactatgtggtgtgggcaccactgctgatgagtaaaaacagcagcaggtcgcacccacataatctacgccgccgcgagcggtgctctcttctgcggcagcggagcgcgccccgcagcggtgagcagcacgcgggaggagaatcatcgtcgcgcggcgcccccgtacgtgtggagaggagtgccgggcacttatagtgtgtggcgccccacaatccaaaacagatgcgtagggaggagagaacatcacacacccgcacggaagagttccccccccatagtgtgaaatattttatagtagggggagaaacaaaaaatgttttgttgcaccacacaaagaggtagcttccctattaaaaaaagaggagatctccaaccaccgacgggggggggagagacagacaaccaagcacgcgatgagaaaacacacacagcagtggaaccataccgagaggaggagaagtgaaacaacgtgttgctgcgacacacagcgagaggggtctcatactctgagcagtaatactcccacagggcagaaaagaggtggggggagtacacacaccaccaggtgtgggaagaggaggagcgccaccatcttctataccaacaaaaggaggaggaggacaccacctcttcttttgggcggaagaaagaagcgtccgatgacgagaaggagcacccccggcgagggagaaaaaagactatttaatactgatcaccccgagtaaggacagcacgaggcggggcagcaggcggacaacaacttaattcgcgcaccacaaaaagtaacattctcttgaggcacgcggcggacgggacgaggatcaaaaaaaacatcaactgtggtagtggaaggacacccggggagcagccaacggacgggagtggaaacaaaacccangcgcgcgagagaaggatgaggaaagacactactcctacaccggggagagaggggaaaattccgccgcggagtgttgtttgcccccccccccgcaaaaaacaacaggaggtgtagtagagagcgaatgagaaaccaccacccaatcatcgatggaaacactgcctcatcacaacaacccacggaggggaagacaaaatagattcaccctccagcagaaagagtcaattctgatgacgagagaacaaagaagaggtgtggagggcagccaccaaaacaaacagacaaagtaaatcccccaccacagggagtgagaaacagattggggagtcaaggtaggccgacgaaacaatagtgagtagatcgttgtaggagatgccc

SEQ ID NO: 682980 - DNA, 786 bp, Homo sapiens
  misc_feature (542)..(542): n is a, c, g, or t
caacgcatgtgccgctcccaacgcatgtgccgctcccaacgcatgtgccgctcccaacgcatgtgccgctcccaacgcatgtgccgctcccaacgcatgtgccggggcctttccggcggtgacgacctacgcacacgagaacatgcctctcgcaaaggatctccttcatccctctccagaagaggagaagaggaaacacaagaagaaacgcctggtgcagagccccaattcctacttcatggatgtgaaatgcccaggatgctataaaatcaccacggtctttagccatgcacaaacggtagttttgtgtgttggctgctccactgtcctctgccagcctacaggaggaaaagcaaggcttacagaaggatgttccttcaggaggaagcagcactaaaagcactctgagtcaagatgagtgggaaaccatctcaataaacacattttggataaaaaaaaaaaacaaaaaaaaaaaaaacacaaaaaaaaaaaaaaagggggggcccccccaaaaatcccccccggggggcccgccgagcttntgtcgccgatcctccccgcgcttttttgttgtgtgctaccaaagtgggggccccctctattatggaggcggcgccatttttaaatctccgacggggccgcggcgcccgcgctcgtttctaccacaccgctgcgtcacacgtgggaacaaaccgcgtcatcccgcggggcacctctgttggtgacaggaaccccctccactcctcggggggggtggaaccctatggtggcacccactccccttcg

SEQ ID NO: 682981 - DNA, 526 bp, Homo sapiens
caacgcatgtgccgctcccaacgcatgtgccgctcccaacgcatgtgccgctcccaacgcatgtgccgctcccaacgcatgtgccgctcccaacgcatgtgccggggcctttccggcggtgacgacctacgcacacgagaacatgcctctcgcaaaggatctccttcatccctctccagaagaggagaagaggaaacacaagaagaaacgcctggtgcagagccccaattcctacttcatggatgtgaaatgcccaggatgctataaaatcaccacggtctttagccatgcacaaacggtagttttgtgtgttggctgctccactgtcctctgccagcctacaggaggaaaagcaaggcttacagaaggatgttccttcaggaggaagcagcactaaaagcactctgagtcaagatgagtgggaaaccatctcaataaacacattttggataaaaaaaaaaaacagaaaccaaaataaaaagctttgacatcctgatatcggctgggcgtaattaggaatcggccc

SEQ ID NO: 682982 - DNA, 94 bp, Homo sapiens
gcccccggggtttggggggcctttttttttggccccaggttggggcccccgggggggggtttttttttttaaaaccaagcccatccccttttta

SEQ ID NO: 682983 - DNA, 126 bp, Homo sapiens
atatataatacagccacactctggctgcacagctgccttcaggattacctgccgcagggtctgctgctcagaagcaagccacgaacagactctgccagagcctgaccacacttaccctgcacaatg

SEQ ID NO: 682984 - DNA, 1080 bp, Homo sapiens
gatacagactgttcctggatctgaggcagccaggtgctaagaatcaacatcctttcactgcgtcctaagcattacagttaaattaagatcaaactagcaacttaaaccaaaaacatagaaaaacaccgttaagcgttctatcgcatgcttcccagagagtccccatgaatcggagagaaggcaagcctaaaacaagacaaatctgccactacattctgacataactcttctccagaactcacctgtactcctaacttattctaactgttactgctgtgaggtactgactgtactacaaacactctgatctacttaactttcactccagctaatgactagaacttacatattattaaaaaccagagagcacacaagtagacaggtgatgagaaaggaacacaggcgtaacgcaaacaccaagacacgcaatcgtgaccgacaactacagcacaactagcacgcgaaacacatctcacacaaccgtgccgcgctcccaaggccacacaggatacctacacacacacgacacgcaacaaccacgaaacgacagaacatgcatacaaaccacatcagagatcatactggacaccacagcgaaaaagtacagcatgacacaccacccgcaacaagacactcacaaaccaacactactagcagacaacaaaaaacacgacacaaccactgcaacgcaaaggacgcagaacaagccacataccatcggcccacagaacccaaaggaaacaaaatgaccaaaaggcaaacacaggaagcaaggcgcaaaaacggtaacgaaccgacgacaacagcaccaacaacaacagaggacacaaacaccagatacaaacacatacccaaaaacaacacacgagagcgtacacgacacggcacaccaaacacacacaaagaagtcgaaaacgggcaacacatgcacaccacccaagaagacaacggggaacacagcgtcaccaaaaccacaaagaaaagaaacaaacggaagacagacacagacataaggcgcacgaacagagaccaataagaatcaagagcagcagcagcccccggcccgcagcccgaagcaga

SEQ ID NO: 682985 - DNA, 524 bp, Homo sapiens
tcagtgtaaaatgactggcagctgtatctgtaagtcgctacattctagctctacctaatgtgccaggagctgccggagaactgggacaagcagcctcgtcaggtccttgtgtgcgaagaactttaaagacgtggttatgatgagaaaaaaaaacgtctttgtggagttctatgccccatggtgtggtcactgcaaacagttggctcccattttgagctaaactgttgagagacgtacaaggaccatgagaacatcgtcatcgccaagatggactcgactgccaaagagatgaaggccgtcaaagtgcacagttaccccacactcaagtactatcctgccagtgccgacaggacggtcattgattacaacgggaaacgcacgctgaatggtaaacaagaaattcctgaagagcggtggccaggatggggcaggggcatagatgacgatctcgaggacctgaaagaagcagacggagcccagaacattgaggaagacgatactcaagacgggttctgggtaccgag

SEQ ID NO: 682986 - DNA, 471 bp, Homo sapiens
  misc_feature (34)..(34): n is a, c, g, or t
cggacactgacctagaggcccgagaagggtgggnaccccggaggccagagcttgcagtgagccgagattgtgccactgcacactcccatctgggtgaaagaccgagactccgcctcaaaaaaaaaaaaaaaagaaagaaagaaagaaagaaagaaatctacctgtcaaggaactaaggtattttgctaacaagcaccaacttgccagccatgtaagggagccatcttggaagcagatcctccagcctccagtcaagtcttcagataattgcaacttcagttgatcttttgaccaagacctcaagagagccagaactacccagctaagccttttactaaatttctgaacttctaacactattagataataagtgcttattgtttaacaccattaattttgagtataatttgttacatagcgacagataactatacagctcaacaactagaaaaataaactgtttacctgcct

SEQ ID NO: 682987 - DNA, 455 bp, Homo sapiens
ccagaggccggagaatctcggaccccagaggtggagttttctgtgggcccggatccaacccctgcactcccatctgggtgaaagaccgagactccgcctcaaaaaaaaaaaaaaaagaaagaaagaaagaaagaaagaaatctacctgtcaaggaactaaggtattttgctaacaagcaccaacttgccagccatgtaagggagccatcttggaagcagatcctccagcctccagtcaagtcttcagataattgcaacttcagttgatcttttgaccaagacctcaagagagccagaactacccagctaagccttttactaaatttctgaacttctaacactattagataataagtgcttattgtttaacaccattaattttgagtataatttgttacatagcgacagataactatacagctcaacaactagaaaaataaactgtttacctgcct

SEQ ID NO: 682988 - DNA, 373 bp, Homo sapiens
  misc_feature (259)..(259): n is a, c, g, or t
  misc_feature (355)..(355): n is a, c, g, or t
actgttaacattgggcattaagtttcaacacatgaactttggggaacacattcccaccataggacttgtttttttttttctttccttttaagccctgtcactctcgtattattagtcagagttcatgtctctgttttctgttggatccctgaggtataaaaaaaataagttagttttggagttatacaaaaacctaggttcagattccatctctaccatttactagctttgtgaacttgaacaaatgacatgactattntaagcctctctaaaataggataatggtttctaatttataagattattgtaatgattagaaattaccttttaaaactacctatgctagttctgggcncatgataggtccttgcca

SEQ ID NO: 682989 - DNA, 620 bp, Homo sapiens
  misc_feature (34)..(34): n is a, c, g, or t
  misc_feature (587)..(588): n is a, c, g, or t
  misc_feature (592)..(593): n is a, c, g, or t
  misc_feature (600)..(600): n is a, c, g, or t
  misc_feature (603)..(603): n is a, c, g, or t
  misc_feature (606)..(606): n is a, c, g, or t
cggacactgacctagaggcccgagaagggtgggnaccccggaggccagagcttgcagtgagccgagattgtgccactgcacactcccatctgggtgaaagaccgagactccgcctcaaaaaaaaaaaaaaaagaaagaaagaaagaaagaaagaaatctacctgtcaaggaactaaggtattttgctaacaagcaccaacttgccagccatgtaagggagccatcttggaagcagatcctccagcctccagtcaagtcttcagataattgcaacttcagttgatcttttgaccaagacctcaagagagccagaactacccagctaagccttttactaaatttctgaacttctaacactattagataataagtgcttattgtttaacaccattaattttgagtataatttgttacatagcgacagataactatacagctcaacaactagaaaaataaactgtttacctgccttaattatttatctttagttccttattagttctcaagaaacaaatgctagcttcatatgtatggctgttgctttgcttcatgtgtatggctatttgtatttaacaaggacttaatcnntcanntaatttngtnttnccgcaccgctacta

SEQ ID NO: 682990 - DNA, 262 bp, Homo sapiens
cttcgaatagtcaacaatccataatacttgaagatgcaataagggcaagagcacgaaaacaagatatgcctgtatatcaagaaaactgaaaacatgtccacacaaaaacctgtacatcaatgttcataccagcattattcataatggccacaacgggaaaccaactcaaatgtccatcacactgtcaagggcgtaaacaacacatatcagtatatatcccatacaagggcaatcattcattcaagccccataaaaaggtact

SEQ ID NO: 682991 - DNA, 319 bp, Homo sapiens
caggtacaggaaagcattttccaggtctcctttaaactctgttcgtgatgctttcccaacatgtcatcagggctgtaactcttgtgcctatcaaatcctttctggaggtggggccacgctccgctcggtcatgatgctgatccacttgtggcacacatccagttcctttcctcttccactccagcgtcatagcgcatcgcgagcctcttggtcaatccagttccataatcaaagacagagaccatcctctgctctatctcacctttggccagggccacactcatcagcttgcgaaagtcaacgatgtgggtcccgagct
